United States Patent Application Publication US 2024/0327476 A1 - sequence listing, part 46

SEQ ID NO: 85421 - DNA, 828 bp, synthetic construct; identical to SEQ ID NO: 85420
  misc_feature 1..828: note = Description of Artificial Sequence: Synthetic coding sequence
  source 1..828: mol_type = other DNA

SEQ ID NO: 85422 - DNA, 828 bp, synthetic construct; identical to SEQ ID NO: 85420
  misc_feature 1..828: note = Description of Artificial Sequence: Synthetic coding sequence
  source 1..828: mol_type = other DNA

SEQ ID NO: 85423 - DNA, 828 bp, synthetic construct; identical to SEQ ID NO: 85420
  misc_feature 1..828: note = Description of Artificial Sequence: Synthetic coding sequence
  source 1..828: mol_type = other DNA

SEQ ID NO: 85424 - DNA, 828 bp, synthetic construct; identical to SEQ ID NO: 85420
  misc_feature 1..828: note = Description of Artificial Sequence: Synthetic coding sequence
  source 1..828: mol_type = other DNA

SEQ ID NO: 85425 - DNA, 1644 bp, synthetic construct
  misc_feature 1..1644: note = Description of Artificial Sequence: Synthetic coding sequence
  source 1..1644: mol_type = other DNA
atggccaccatggtgcccagcgtgctgtggcccagagcctgctggaccctgctggtgtgctgcctgctgacccccggcgtgcagggccaggagttcctgctgagagtggagccccagaaccccgtgctgagcgccggcggcagcctgttcgtgaactgcagcaccgactgccccagcagcgagaagatcgccctggagaccagcctgagcaaggagctggtggccagcggcatgggctgggccgccttcaacctgagcaacgtgaccggcaacagcagaatcctgtgcagcgtgtactgcaacggcagccagatcaccggcagcagcaacatcaccgtgtacagactgcccgagagagtggagctggcccccctgcccccctggcagcccgtgggccagaacttcaccctgagatgccaggtggaggacggcagccccagaaccagcctgaccgtggtgctgctgagatgggaggaggagctgagcagacagcccgccgtggaggagcccgccgaggtgaccgccaccgtgctggccagcagagacgaccacggcgcccccttcagctgcagaaccgagctggacatgcagccccagggcctgggcctgttcgtgaacaccagcgcccccagacagctgagaaccttcgtgctgcccgtgaccccccccagactggtggcccccagattcctggaggtggagaccagctggcccgtggactgcaccctggacggcctgttccccgccagcgaggcccaggtgtacctggccctgggcgaccagatgctgaacgccaccgtgatgaaccacggcgacaccctgaccgccaccgccaccgccaccgccagagccgaccaggagggcgccagagagatcgtgtgcaacgtgaccctgggcggcgagagaagagaggccagagagaacctgaccgtgttcagcttcctgggccccatcgtgaacctgagcgagcccaccgcccacgagggcagcaccgtgaccgtgagctgcatggccggcgccagagtgcaggtgaccctggacggcgtgcccgccgccgcccccggccagcccgcccagctgcagctgaacgccaccgagagcgacgacggcagaagcttcttctgcagcgccaccctggaggtggacggcgagttcctgcacagaaacagcagcgtgcagctgagagtgctgtacggccccaagatcgacagagccacctgcccccagcacctgaagtggaaggacaagaccagacacgtgctgcagtgccaggccagaggcaacccctaccccgagctgagatgcctgaaggagggcagcagcagagaggtgcccgtgggcatccccttcttcgtgaacgtgacccacaacggcacctaccagtgccaggccagcagcagcagaggcaagtacaccctggtggtggtgatggacatcgaggccggcagcagccacttcgtgcccgtgttcgtggccgtgctgctgaccctgggcgtggtgaccatcgtgctggccctgatgtacgtgttcagagagcaccagagaagcggcagctaccacgtgagagaggagagcacctacctgcccctgaccagcatgcagcccaccgaggccatgggcgaggagcccagcagagccgagtag

SEQ ID NO: 85426 - DNA, 819 bp, synthetic construct
  misc_feature 1..819: note = Description of Artificial Sequence: Synthetic coding sequence
  source 1..819: mol_type = other DNA
atgggcagcctgttccccctgagcctgctgttcttcctggccgccgcctaccccggcgtgggcagcgccctgggcagaagaaccaagagagcccagagccccaagggcagccccctggcccccagcggcaccagcgtgcccttctgggtgagaatgagccccgagttcgtggccgtgcagcccggcaagagcgtgcagctgaactgcagcaacagctgcccccagccccagaacagcagcctgagaacccccctgagacagggcaagaccctgagaggccccggctgggtgagctaccagctgctggacgtgagagcctggagcagcctggcccactgcctggtgacctgcgccggcaagaccagatgggccaccagcagaatcaccgcctacagcgtgcccggcggcctgctgggcggcgaccccgaggcctggaagcccggccacctgttcagaaagcccggcgccctgcacagacccggcagcggccagagagacctggacctgagagtgtgctgctggacccccagactgctggccgccagagacctgcccagagccccccagagcagaagacccggcggcccccagcagctgggcacccactacaccgacgccagactggagcccagagcccacagcttcggcctgagattccacagatgcccctgcagagaccccccccactgcggcagatgcgtgcccatgcaggtgcccagctacgaggtgcccggcgtgaagggcgacgtgctgtgcagactgagcgagaagaagagaaacatgaagcagagcggcgagatggccatccacggcggctag

SEQ ID NO: 85427 - DNA, 816 bp, synthetic construct
  misc_feature 1..816: note = Description of Artificial Sequence: Synthetic coding sequence
  source 1..816: mol_type = other DNA
atgggcagcctgttccccctgagcctgctgttcttcctggccgccgcctaccccggcgtgggcagcgccctgggcagaagaaccaagagagcccagagccccaagggcagccccctggcccccagcggcaccagcgtgcccttctgggtgagaatgagccccgagttcgtggccgtgcagcccggcaagagcgtgcagctgaactgcagcaacagctgcccccagccccagaacagcagcctgagaacccccctgagacagggcaagaccctgagaggccccggctgggtgagctaccagctgctggacgtgagagcctggagcagcctggcccactgcctggtgacctgcgccggcaagaccagatgggccaccagcagaatcaccgcctacaagcccccccacagcgtgatcctggagccccccgtgctgaagggcagaaagtacaccctgagatgccacgtgacccaggtgttccccgtgggctacctggtggtgaccctgagacacggcagcagagtgatctacagcgagagcctggagagattcaccggcctggacctggccaacgtgaccctgacctacgagttcgccgccggccccagagacttctggcagcccgtgatctgccacgccagactgaacctggacggcctggtggtgagaaacagcagcgcccccatcaccctgatgctggcctggagccccgcccccaccgccctggccagcggcagcatcgccgccctggtgggcatcctgctgaccgtgggcgccgcctacctgtgcaagtgcctggccatgaagagccaggcctag

SEQ ID NO: 85428 - DNA, 714 bp, synthetic construct
  misc_feature 1..714: note = Description of Artificial Sequence: Synthetic coding sequence
  source 1..714: mol_type = other DNA
atgggcagcctgttccccctgagcctgctgttcttcctggccgccgcctaccccggcgtgggcagcgccctgggcagaagaaccaagagagcccagagccccaagggcagccccctggcccccagcggcaccagcgtgcccttctgggtgagaatgagccccgagttcgtggccgtgcagcccggcaagagcgtgcagctgaactgcagcaacagctgcccccagccccagaacagcagcctgagaacccccctgagacagggcaagaccctgagaggccccggctgggtgagctaccagctgctggacgtgagagcctggagcagcctggcccactgcctggtgacctgcgccggcaagaccagatgggccaccagcagaatcaccgcctacaagcccccccacagcgtgatcctggagccccccgtgctgaagggcagaaagtacaccctgagatgccacgtgacccaggtgttccccgtgggctacctggtggtgaccctgagacacggcagcagagtgatctacagcgagagcctggagagattcaccggcctggacctggccaacgtgaccctgacctacgagttcgccgccggccccagagacttctggcagcccgtgatctgccacgccagactgaacctggacggcctggtggtgagaaacagcagcgcccccatcaccctgatgctgggcgaggcccccctgtag

SEQ ID NO: 85429 - DNA, 498 bp, synthetic construct
  misc_feature 1..498: note = Description of Artificial Sequence: Synthetic coding sequence
  source 1..498: mol_type = other DNA
atggagctgtgcagaagcctggccctgctgggcggcagcctgggcctgatgttctgcctgatcgccctgagcaccgacttctggttcgaggccgtgggccccacccacagcgcccacagcggcctgtggcccaccggccacggcgacatcatcagcggctacatccacgtgacccagaccttcagcatcatggccgtgctgtgggccctggtgagcgtgagcttcctggtgctgagctgcttccccagcctgttcccccccggccacggccccctggtgagcaccaccgccgccttcgccgccgccatcagcatggtggtggccatggccgtgtacaccagcgagagatgggaccagcccccccacccccagatccagaccttcttcagctggagcttctacctgggctgggtgagcgccatcctgctgctgtgcaccggcgccctgagcctgggcgcccactgcggcggccccagacccggctacgagaccctgtag

SEQ ID NO: 85430 - DNA, 1674 bp, synthetic construct
  misc_feature 1..1674: note = Description of Artificial Sequence: Synthetic coding sequence
  source 1..1674: mol_type = other DNA
atgatggtggtgctgctgggcgccaccaccctggtgctggtggccgtggccccctgggtgctgagcgccgccgccggcggcaagaacctgaagagcccccagaaggtggaggtggacatcatcgacgacaacttcatcctgagatggaacagaagcgacgagagcgtgggcaacgtgaccttcagcttcgactaccagaagaccggcatggacaactggatcaagctgagcggctgccagaacatcaccagcaccaagtgcaacttcagcagcctgaagctgaacgtgtacgaggagatcaagctgagaatcagagccgagaaggagaacaccagcagctggtacgaggtggacagcttcacccccttcagaaaggcccagatcggcccccccgaggtgcacctggaggccgaggacaaggccatcgtgatccacatcagccccggcaccaaggacagcgtgatgtgggccctggacggcctgagcttcacctacagcctggtgatctggaagaacagcagcggcgtggaggagagaatcgagaacatctacagcagacacaagatctacaagctgagccccgagaccacctactgcctgaaggtgaaggccgccctgctgaccagctggaagatcggcgtgtacagccccgtgcactgcatcaagaccaccgtggagaacgagctgcccccccccgagaacatcgaggtgagcgtgcagaaccagaactacgtgctgaagtgggactacacctacgccaacatgaccttccaggtgcagtggctgcacgccttcctgaagagaaaccccggcaaccacctgtacaagtggaagcagatccccgactgcgagaacgtgaagaccacccagtgcgtgttcccccagaacgtgttccagaagggcatctacctgctgagagtgcaggccagcgacggcaacaacaccagcttctggagcgaggagatcaagttcgacaccgagatccaggccttcctgctgccccccgtgttcaacatcagaagcctgagcgacagcttccacatctacatcggcgcccccaagcagagcggcaacacccccgtgatccaggactaccccctgatctacgagatcatcttctgggagaacaccagcaacgccgagagaaagatcatcgagaagaagaccgacgtgaccgtgcccaacctgaagcccctgaccgtgtactgcgtgaaggccagagcccacaccatggacgagaagctgaacaagagcagcgtgttcagcgacgccgtgtgcgagaagaccaagcccggcaacaccagcaagatctggctgatcgtgggcatctgcatcgccctgttcgccctgcccttcgtgatctacgccgccaaggtgttcctgagatgcatcaactacgtgttcttccccagcctgaagcccagcagcagcatcgacgagtacttcagcgagcagcccctgaagaacctgctgctgagcaccagcgaggagcagatcgagaagtgcttcatcatcgagaacatcagcaccatcgccaccgtggaggagaccaaccagaccgacgaggaccacaagaagtacagcagccagaccagccaggacagcggcaactacagcaacgaggacgagagcgagagcaagaccagcgaggagctgcagcaggacttcgtgtag

SEQ ID NO: 85431 - DNA, 1467 bp, synthetic construct
  misc_feature 1..1467: note = Description of Artificial Sequence: Synthetic coding sequence
  source 1..1467: mol_type = other DNA
atggacaactggatcaagctgagcggctgccagaacatcaccagcaccaagtgcaacttcagcagcctgaagctgaacgtgtacgaggagatcaagctgagaatcagagccgagaaggagaacaccagcagctggtacgaggtggacagcttcacccccttcagaaaggcccagatcggcccccccgaggtgcacctggaggccgaggacaaggccatcgtgatccacatcagccccggcaccaaggacagcgtgatgtgggccctggacggcctgagcttcacctacagcctggtgatctggaagaacagcagcggcgtggaggagagaatcgagaacatctacagcagacacaagatctacaagctgagccccgagaccacctactgcctgaaggtgaaggccgccctgctgaccagctggaagatcggcgtgtacagccccgtgcactgcatcaagaccaccgtggagaacgagctgcccccccccgagaacatcgaggtgagcgtgcagaaccagaactacgtgctgaagtgggactacacctacgccaacatgaccttccaggtgcagtggctgcacgccttcctgaagagaaaccccggcaaccacctgtacaagtggaagcagatccccgactgcgagaacgtgaagaccacccagtgcgtgttcccccagaacgtgttccagaagggcatctacctgctgagagtgcaggccagcgacggcaacaacaccagcttctggagcgaggagatcaagttcgacaccgagatccaggccttcctgctgccccccgtgttcaacatcagaagcctgagcgacagcttccacatctacatcggcgcccccaagcagagcggcaacacccccgtgatccaggactaccccctgatctacgagatcatcttctgggagaacaccagcaacgccgagagaaagatcatcgagaagaagaccgacgtgaccgtgcccaacctgaagcccctgaccgtgtactgcgtgaaggccagagcccacaccatggacgagaagctgaacaagagcagcgtgttcagcgacgccgtgtgcgagaagaccaagcccggcaacaccagcaagatctggctgatcgtgggcatctgcatcgccctgttcgccctgcccttcgtgatctacgccgccaaggtgttcctgagatgcatcaactacgtgttcttccccagcctgaagcccagcagcagcatcgacgagtacttcagcgagcagcccctgaagaacctgctgctgagcaccagcgaggagcagatcgagaagtgcttcatcatcgagaacatcagcaccatcgccaccgtggaggagaccaaccagaccgacgaggaccacaagaagtacagcagccagaccagccaggacagcggcaactacagcaacgaggacgagagcgagagcaagaccagcgaggagctgcagcaggacttcgtgtag

SEQ ID NO: 85432 - DNA, 1491 bp, synthetic construct
  misc_feature 1..1491: note = Description of Artificial Sequence: Synthetic coding sequence
  source 1..1491: mol_type = other DNA
atgatggtggtgctgctgggcgccaccaccctggtgctggtggccgtggccccctgggtgctgagcgccgccgccggcggcaagaacctgaagagcccccagaaggtggaggtggacatcatcgacgacaacttcatcctgagatggaacagaagcgacgagagcgtgggcaacgtgaccttcagcttcgactaccagaagaccggcatggacaactggatcaagctgagcggctgccagaacatcaccagcaccaagtgcaacttcagcagcctgaagctgaacgtgtacgaggagatcaagctgagaatcagagccgagaaggagaacaccagcagctggtacgaggtggacagcttcacccccttcagaaaggcccagatcggcccccccgaggtgcacctggaggccgaggacaaggccatcgtgatccacatcagccccggcaccaaggacagcgtgatgtgggccctggacggcctgagcttcacctacagcctggtgatctggaagaacagcagcggcgtggaggagagaatcgagaacatctacagcagacacaagatctacaagctgagccccgagaccacctactgcctgaaggtgaaggccgccctgctgaccagctggaagatcggcgtgtacagccccgtgcactgcatcaagaccaccgtggagaacgagctgcccccccccgagaacatcgaggtgagcgtgcagaaccagaactacgtgctgaagtgggactacacctacgccaacatgaccttccaggtgcagtggctgcacgccttcctgaagagaaaccccggcaaccacctgtacaagtggaagcagatccccgactgcgagaacgtgaagaccacccagtgcgtgttcccccagaacgtgttccagaagggcatctacctgctgagagtgcaggccagcgacggcaacaacaccagcttctggagcgaggagatcaagttcgacaccgagatccaggccttcctgctgccccccgtgttcaacatcagaagcctgagcgacagcttccacatctacatcggcgcccccaagcagagcggcaacacccccgtgatccaggactaccccctgatctacgagatcatcttctgggagaacaccagcaacgccgagagaaagatcatcgagaagaagaccgacgtgaccgtgcccaacctgaagcccctgaccgtgtactgcgtgaaggccagagcccacaccatggacgagaacgacgccgtgtgcgagtacttcagcgagcagcccctgaagaacctgctgctgagcaccagcgaggagcagatcgagaagtgcttcatcatcgagaacatcagcaccatcgccaccgtggaggagaccaaccagaccgacgaggaccacaagaagtacagcagccagaccagccaggacagcggcaactacagcaacgaggacgagagcgagagcaagaccagcgaggagctgcagcaggacttcgtgtag

SEQ ID NO: 85433 - DNA, 1548 bp, synthetic construct
  misc_feature 1..1548: note = Description of Artificial Sequence: Synthetic coding sequence
  source 1..1548: mol_type = other DNA
atgctgctgagccagaacgccttcatcttcagaagcctgaacctggtgctgatggtgtacatcagcctggtgttcggcatcagctacgacagccccgactacaccgacgagagctgcaccttcaagatcagcctgagaaacttcagaagcatcctgagctgggagctgaagaaccacagcatcgtgcccacccactacaccctgctgtacaccatcatgagcaagcccgaggacctgaaggtggtgaagaactgcgccaacaccaccagaagcttctgcgacctgaccgacgagtggagaagcacccacgaggcctacgtgaccgtgctggagggcttcagcggcaacaccaccctgttcagctgcagccacaacttctggctggccatcgacatgagcttcgagccccccgagttcgagatcgtgggcttcaccaaccacatcaacgtgatggtgaagttccccagcatcgtggaggaggagctgcagttcgacctgagcctggtgatcgaggagcagagcgagggcatcgtgaagaagcacaagcccgagatcaagggcaacatgagcggcaacttcacctacatcatcgacaagctgatccccaacaccaactactgcgtgagcgtgtacctggagcacagcgacgagcaggccgtgatcaagagccccctgaagtgcaccctgctgccccccggccaggagagcgagagcgccgagagcgccaagatcggcggcatcatcaccgtgttcctgatcgccctggtgctgaccagcaccatcgtgaccctgaagtggatcggctacatctgcctgagaaacagcctgcccaaggtgctgaacttccacaacttcctggcctggcccttccccaacctgccccccctggaggccatggacatggtggaggtgatctacatcaacagaaagaagaaggtgtgggactacaactacgacgacgagagcgacagcgacaccgaggccgcccccagaaccagcggcggcggctacaccatgcacggcctgaccgtgagacccctgggccaggccagcgccaccagcaccgagagccagctgatcgaccccgagagcgaggaggagcccgacctgcccgaggtggacgtggagctgcccaccatgcccaaggacagcccccagcagctggagctgctgagcggcccctgcgagagaagaaagagccccctgcaggaccccttccccgaggaggactacagcagcaccgagggcagcggcggcagaatcaccttcaacgtggacctgaacagcgtgttcctgagagtgctggacgacgaggacagcgacgacctggaggcccccctgatgctgagcagccacctggaggagatggtggaccccgaggaccccgacaacgtgcagagcaaccacctgctggccagcggcgagggcacccagcccaccttccccagccccagcagcgagggcctgtggagcgaggacgcccccagcgaccagagcgacaccagcgagagcgacgtggacctgggcgacggctacatcatgagatag

SEQ ID NO: 85434 - DNA, 1548 bp, synthetic construct; identical to SEQ ID NO: 85433
  misc_feature 1..1548: note = Description of Artificial Sequence: Synthetic coding sequence
  source 1..1548: mol_type = other DNA

SEQ ID NO: 85435 - DNA, 996 bp, synthetic construct
  misc_feature 1..996: note = Description of Artificial Sequence: Synthetic coding sequence
  source 1..996: mol_type = other DNA
atgctgctgagccagaacgccttcatcttcagaagcctgaacctggtgctgatggtgtacatcagcctggtgttcggcatcagctacgacagccccgactacaccgacgagagctgcaccttcaagatcagcctgagaaacttcagaagcatcctgagctgggagctgaagaaccacagcatcgtgcccacccactacaccctgctgtacaccatcatgagcaagcccgaggacctgaaggtggtgaagaactgcgccaacaccaccagaagcttctgcgacctgaccgacgagtggagaagcacccacgaggcctacgtgaccgtgctggagggcttcagcggcaacaccaccctgttcagctgcagccacaacttctggctggccatcgacatgagcttcgagccccccgagttcgagatcgtgggcttcaccaaccacatcaacgtgatggtgaagttccccagcatcgtggaggaggagctgcagttcgacctgagcctggtgatcgaggagcagagcgagggcatcgtgaagaagcacaagcccgagatcaagggcaacatgagcggcaacttcacctacatcatcgacaagctgatccccaacaccaactactgcgtgagcgtgtacctggagcacagcgacgagcaggccgtgatcaagagccccctgaagtgcaccctgctgccccccggccaggagagcgagagcgccgagagcgccaagatcggcggcatcatcaccgtgttcctgatcgccctggtgctgaccagcaccatcgtgaccctgaagtggatcggctacatctgcctgagaaacagcctgcccaaggtgctgagacagggcctggccaagggctggaacgccgtggccatccacagatgcagccacaacgccctgcagagcgagacccccgagctgaagcagagcagctgcctgagcttccccagcagctgggactacaagagagccagcctgtgccccagcgactag

SEQ ID NO: 85436 - DNA, 996 bp, synthetic construct; identical to SEQ ID NO: 85435
  misc_feature 1..996: note = Description of Artificial Sequence: Synthetic coding sequence
  source 1..996: mol_type = other DNA

SEQ ID NO: 85437 - DNA, 561 bp, synthetic construct
  misc_feature 1..561: note = Description of Artificial Sequence: Synthetic coding sequence
  source 1..561: mol_type = other DNA
atgctgctgaagagccccgagaacagcctgctgcagttccagttcaagtacggcgtgcccacccccaccaacgtgaccatcgagagctacaacatgaaccccatcgtgtactgggagtaccagatcatgccccaggtgcccgtgttcaccgtggaggtgaagaactacggcgtgaagaacagcgagtggatcgacgcctgcatcaacatcagccaccactactgcaacatcagcgaccacgtgggcgaccccagcaacagcctgtgggtgagagtgaaggccagagtgggccagaaggagagcgcctacgccaagagcgaggagttcgccgtgtgcagagacggcaagatcggcccccccaagctggacatcagaaaggaggagaagcagatcatgatcgacatcttccaccccagcgtgttcgtgaacggcgacgagcaggaggtggactacgaccccgagaccacctgctacatcagagtgtacaacgtgtacgtgagaatgaacggcagcgagatcaagagaagctgcgccttcagcctgttcagcttcttcatctag

SEQ ID NO: 85438 - DNA, 1470 bp, synthetic construct
  misc_feature 1..1470: note = Description of Artificial Sequence: Synthetic coding sequence
  source 1..1470: mol_type = other DNA
atggccctgctgttcctgctgcccctggtgatgcagggcgtgagcagagccgagatgggcaccgccgacctgggccccagcagcgtgcccacccccaccaacgtgaccatcgagagctacaacatgaaccccatcgtgtactgggagtaccagatcatgccccaggtgcccgtgttcaccgtggaggtgaagaactacggcgtgaagaacagcgagtggatcgacgcctgcatcaacatcagccaccactactgcaacatcagcgaccacgtgggcgaccccagcaacagcctgtgggtgagagtgaaggccagagtgggccagaaggagagcgcctacgccaagagcgaggagttcgccgtgtgcagagacggcaagatcggcccccccaagctggacatcagaaaggaggagaagcagatcatgatcgacatcttccaccccagcgtgttcgtgaacggcgacgagcaggaggtggactacgaccccgagaccacctgctacatcagagtgtacaacgtgtacgtgagaatgaacggcagcgagatccagtacaagatcctgacccagaaggaggacgactgcgacgagatccagtgccagctggccatccccgtgagcagcctgaacagccagtactgcgtgagcgccgagggcgtgctgcacgtgtggggcgtgaccaccgagaagagcaaggaggtgtgcatcaccatcttcaacagcagcatcaagggcagcctgtggatccccgtggtggccgccctgctgctgttcctggtgctgagcctggtgttcatctgcttctacatcaagaagatcaaccccctgaaggagaagagcatcatcctgcccaagagcctgatcagcgtggtgagaagcgccaccctggagaccaagcccgagagcaagtacgtgagcctgatcaccagctaccagcccttcagcctggagaaggaggtggtgtgcgaggagcccctgagccccgccaccgtgcccggcatgcacaccgaggacaaccccggcaaggtggagcacaccgaggagctgagcagcatcaccgaggtggtgaccaccgaggagaacatccccgacgtggtgcccggcagccacctgacccccatcgagagagagagcagcagccccctgagcagcaaccagagcgagcccggcagcatcgccctgaacagctaccacagcagaaactgcagcgagagcgaccacagcagaaacggcttcgacaccgacagcagctgcctggagagccacagcagcctgagcgacagcgagttcccccccaacaacaagggcgagatcaagaccgagggccaggagctgatcaccgtgatcaaggcccccaccagcttcggctacgacaagccccacgtgctggtggacctgctggtggacgacagcggcaaggagagcctgatcggctacagacccaccgaggacagcaaggagttcagctag

SEQ ID NO: 85439 - DNA, 486 bp, synthetic construct
  misc_feature 1..486: note = Description of Artificial Sequence: Synthetic coding sequence
  source 1..486: mol_type = other DNA
atgctgctgaagagccccgagaacagcctgctgcagttccagttcaagtacggcgtgcccacccccaccaacgtgaccatcgagagctacaacatgaaccccatcgtgtactgggagtaccagatcatgccccaggtgcccgtgttcaccgtggaggtgaagaactacggcgtgaagaacagcgagtggatcgacgcctgcatcaacatcagccaccactactgcaacatcagcgaccacgtgggcgaccccagcaacagcctgtgggtgagagtgaaggccagagtgggccagaaggagagcgcctacgccaagagcgaggagttcgccgtgtgcagagacggcaagatcggcccccccaagctggacatcagaaaggaggagaagcagatcatgatcgacatcttccaccccagcgtgttcgtgaacggcgacgagcaggaggtggactacgaccccgagaccacctgctacatcagagtgtag

SEQ ID NO: 85440 - DNA, 825 bp, synthetic construct
  misc_feature 1..825: note = Description of Artificial Sequence: Synthetic coding sequence
  source 1..825: mol_type = other DNA
atggccctgctgttcctgctgcccctggtgatgcagggcgtgagcagagccgagatgggcaccgccgacctgggccccagcagcgtgcccacccccaccaacgtgaccatcgagagctacaacatgaaccccatcgtgtactgggagtaccagatcatgccccaggtgcccgtgttcaccgtggaggtgaagaactacggcgtgaagaacagcgagtggatcgacgcctgcatcaacatcagccaccactactgcaacatcagcgaccacgtgggcgaccccagcaacagcctgtgggtgagagtgaaggccagagtgggccagaaggagagcgcctacgccaagagcgaggagttcgccgtgtgcagagacggcaagatcggcccccccaagctggacatcagaaaggaggagaagcagatcatgatcgacatcttccaccccagcgtgttcgtgaacggcgacgagcaggaggtggactacgaccccgagaccacctgctacatcagagtgtacaacgtgtacgtgagaatgaacggcagcgagatccagtacaagatcctgacccagaaggaggacgactgcgacgagatccagtgccagctggccatccccgtgagcagcctgaacagccagtactgcgtgagcgccgagggcgtgctgcacgtgtggggcgtgaccaccgagaagagcaaggaggtgtgcatcaccatcttcaacagcagcatcaagggcagcctgtggatccccgtggtggccgccctgctgctgttctgcctggcctggtacagcagcgtgttcatcctgagaaagctgatccactag

SEQ ID NO: 85441 - DNA, 633 bp, synthetic construct
  misc_feature 1..633: note = Description of Artificial Sequence: Synthetic coding sequence
  source 1..633: mol_type = other DNA
atggccctgctgttcctgctgcccctggtgatgcagggcgtgagcagagccgagatgggcaccgccgacctgggccccagcagcgtgcccacccccaccaacgtgaccatcgagagctacaacatgaaccccatcgtgtactgggagtaccagatcatgccccaggtgcccgtgttcaccgtggaggtgaagaactacggcgtgaaggccagagtgggccagaaggagagcgcctacgccaagagcgaggagttcgccgtgtgcagagacggcaagatcggcccccccaagctggacatcagaaaggaggagaagcagatcatgatcgacatcttccaccccagcgtgttcgtgaacggcgacgagcaggaggtggactacgaccccgagaccacctgctacatcagagtgtacaacgtgtacgtgagaatgaacggcagcgagatccagtacaagatcctgacccagaaggaggacgactgcgacgagatccagtgccagctggccatccccgtgagcagcctgaacagccagtactgcgtgagcgccgagggcgtgctgcacgtgtggggcgtgaccaccgagaagagcaaggaggtgtgcatcaccatcttcaacagcagcatcaagtag

SEQ ID NO: 85442 - DNA, 1386 bp, synthetic construct
  misc_feature 1..1386: note = Description of Artificial Sequence: Synthetic coding sequence
  source 1..1386: mol_type = other DNA
atgcccacccccaccaacgtgaccatcgagagctacaacatgaaccccatcgtgtactgggagtaccagatcatgccccaggtgcccgtgttcaccgtggaggtgaagaactacggcgtgaagaacagcgagtggatcgacgcctgcatcaacatcagccaccactactgcaacatcagcgaccacgtgggcgaccccagcaacagcctgtgggtgagagtgaaggccagagtgggccagaaggagagcgcctacgccaagagcgaggagttcgccgtgtgcagagacggcaagatcggcccccccaagctggacatcagaaaggaggagaagcagatcatgatcgacatcttccaccccagcgtgttcgtgaacggcgacgagcaggaggtggactacgaccccgagaccacctgctacatcagagtgtacaacgtgtacgtgagaatgaacggcagcgagatccagtacaagatcctgacccagaaggaggacgactgcgacgagatccagtgccagctggccatccccgtgagcagcctgaacagccagtactgcgtgagcgccgagggcgtgctgcacgtgtggggcgtgaccaccgagaagagcaaggaggtgtgcatcaccatcttcaacagcagcatcaagggcagcctgtggatccccgtggtggccgccctgctgctgttcctggtgctgagcctggtgttcatctgcttctacatcaagaagatcaaccccctgaaggagaagagcatcatcctgcccaagagcctgatcagcgtggtgagaagcgccaccctggagaccaagcccgagagcaagtacgtgagcctgatcaccagctaccagcccttcagcctggagaaggaggtggtgtgcgaggagcccctgagccccgccaccgtgcccggcatgcacaccgaggacaaccccggcaaggtggagcacaccgaggagctgagcagcatcaccgaggtggtgaccaccgaggagaacatccccgacgtggtgcccggcagccacctgacccccatcgagagagagagcagcagccccctgagcagcaaccagagcgagcccggcagcatcgccctgaacagctaccacagcagaaactgcagcgagagcgaccacagcagaaacggcttcgacaccgacagcagctgcctggagagccacagcagcctgagcgacagcgagttcccccccaacaacaagggcgagatcaagaccgagggccaggagctgatcaccgtgatcaaggcccccaccagcttcggctacgacaagccccacgtgctggtggacctgctggtggacgacagcggcaaggagagcctgatcggctacagacccaccgaggacagcaaggagttcagctag

SEQ ID NO: 85443 - DNA, 1014 bp, synthetic construct
  misc_feature 1..1014: note = Description of Artificial Sequence: Synthetic coding sequence
  source 1..1014: mol_type = other DNA
atgagacccaccctgctgtggagcctgctgctgctgctgggcgtgttcgccgccgccgccgccgccccccccgaccccctgagccagctgcccgccccccagcaccccaagatcagactgtacaacgccgagcaggtgctgagctgggagcccgtggccctgagcaacagcaccagacccgtggtgtaccaggtgcagttcaagtacaccgacagcaagtggttcaccgccgacatcatgagcatcggcgtgaactgcacccagatcaccgccaccgagtgcgacttcaccgccgccagccccagcgccggcttccccatggacttcaacgtgaccctgagactgagagccgagctgggcgccctgcacagcgcctgggtgaccatgccctggttccagcactacagaaacgtgaccgtgggcccccccgagaacatcgaggtgacccccggcgagggcagcctgatcatcagattcagcagccccttcgacatcgccgacaccagcaccgccttcttctgctactacgtgcactactgggagaagggcggcatccagcaggtgaagggccccttcagaagcaacagcatcagcctggacaacctgaagcccagcagagtgtactgcctgcaggtgcaggcccagctgctgtggaacaagagcaacatcttcagagtgggccacctgagcaacatcagctgctacgagaccatggccgacgccagcaccgagctgcagcaggtgatcctgatcagcgtgggcaccttcagcctgctgagcgtgctggccggcgcctgcttcttcctggtgctgaagtacagaggcctgatcaagtactggttccacaccccccccagcatccccctgcagatcgaggagtacctgaaggaccccacccagcccatcctggaggccctggacaaggacagcagccccaaggacgacgtgtgggacagcgtgagcatcatcagcttccccgagaaggagcaggaggacgtgctgcagaccctgtag

SEQ ID NO: 85444 - DNA, 378 bp, synthetic construct
  misc_feature 1..378: note = Description of Artificial Sequence: Synthetic coding sequence
  source 1..378: mol_type = other DNA
atgcacaaggaggagcacgaggtggccgtgctgggccccccccccagcaccatcctgcccagaagcaccgtgatcaacatccacagcgagaccagcgtgcccgaccacgtggtgtggagcctgttcaacaccctgttcctgaactggtgctgcctgggcttcatcgccttcgcctacagcgtgaagagcagagacagaaagatggtgggcgacgtgaccggcgcccaggcctacgccagcaccgccaagtgcctgaacatctgggccctgatcctgggcatcctgatgaccatcggcttcatcctgctgctggtgttcggcagcgtgaccgtgtaccacatcatgctgcagatcatccaggagaagagaggctactag

SEQ ID NO: 85445 - DNA, 378 bp, synthetic construct; identical to SEQ ID NO: 85444
  misc_feature 1..378: note = Description of Artificial Sequence: Synthetic coding sequence
  source 1..378: mol_type = other DNA

SEQ ID NO: 85446 - DNA, 300 bp, synthetic construct
  misc_feature 1..300: note = Description of Artificial Sequence: Synthetic coding sequence
  source 1..300: mol_type = other DNA
ccccagagccagaagatgcacaaggaggagcacgaggtggccgtgctgggccccccccccagcaccatcctgcccagaagcaccgtgatcaacatccacagcgagaccagcgtgcccgaccacgtggtggtgcccgtgcagcaccccctgctggagtgctgcctgggcttcatcgccttcgcctacagcgtgaagagcagagacagaaagatggtgggcgacgtgaccggcgcccaggccctgcacagacaggtgcccgagcacctgggccccgacagcggccacccccacgaccactag

SEQ ID NO: 85447 - DNA, 378 bp, synthetic construct; identical to SEQ ID NO: 85444
  misc_feature 1..378: note = Description of Artificial Sequence: Synthetic coding sequence
  source 1..378: mol_type = other DNA

SEQ ID NO: 85448 - DNA, 495 bp, synthetic construct
  misc_feature 1..495: note = Description of Artificial Sequence: Synthetic coding sequence
  source 1..495: mol_type = other DNA
atgaaccacatcgtgcagaccttcagccccgtgaacagcggccagccccccaactacgagatgctgaaggaggagcaggaggtggccatgctgggcgtgccccacaaccccgccccccccatgagcaccgtgatccacatcagaagcgagaccagcgtgcccgaccacgtggtggtgcccgtgcagcaccccctgcacgagtgctgcctgggcttcatcgccttcgcctacagcgtgaagagcagagacagaaagatggtgggcgacgtgaccggcgcccaggccctgcacagacaggtgcccgagcacctgggccccgacttcggccacctgcacgaccacagcgcccaccaccaccccagcgtgggcagacccggccccgccatcgaccaggaggccagcctgagacccggcgccctgcccgtgacctgcatccccagaaccctgagcagcatccccagacccgcccccagaggccaggagctgtgcccctag

SEQ ID NO: 85449 - DNA, 399 bp, synthetic construct
  misc_feature 1..399: note = Description of Artificial Sequence: Synthetic coding sequence
  source 1..399: mol_type = other DNA
atgaaccacatcgtgcagaccttcagccccgtgaacagcggccagccccccaactacgagatgctgaaggaggagcaggaggtggccatgctgggcgtgccccacaaccccgccccccccatgagcaccgtgatccacatcagaagcgagaccagcgtgcccgaccacgtggtgtggagcctgttcaacaccctgttcatgaacacctgctgcctgggcttcatcgccttcgcctacagcgtgaagagcagagacagaaagatggtgggcgacgtgaccggcgcccaggcctacgccagcaccgccaagtgcctgaacatctgggccctgatcctgggcatcttcatgaccatcctgctgatcatcatccccgtgctggtggtgcaggcccagagatag

SEQ ID NO: 85450 - DNA, 447 bp, synthetic construct
  misc_feature 1..447: note = Description of Artificial Sequence: Synthetic coding sequence
  source 1..447: mol_type = other DNA
ccccccaactacgagatgctgaaggaggagcacgaggtggccgtgctgggcgccccccacaaccccgccccccccaccagcaccgtgatccacatcagaagcgagaccagcgtgcccgaccacgtggtggtgcccgtgcagcaccccctgcacgagtgctgcctgggcttcatcgccttcgcctacagcgtgaagagcagagacagaaagatggtgggcgacgtgaccggcgcccaggccctgcacagacaggtgcccgagcacctgggccccgacagcggccacccccacgaccacagcgcccacagacaccccagcgccgacctgcccggcctgtggatcgaccaggaggccagcctgagacccggcgccctgcccatgacctgcatccccagaacccccaccagcatccccagacccgcccccggcgccgagagctgcatctag

SEQ ID NO: 85451 - DNA, 402 bp, synthetic construct
  misc_feature 1..402: note = Description of Artificial Sequence: Synthetic coding sequence
  source 1..402: mol_type = other DNA
atgaaccacaccgtgcagaccttcttcagccccgtgaacagcggccagccccccaactacgagatgctgaaggaggagcacgaggtggccgtgctgggcgccccccacaaccccgccccccccaccagcaccgtgatccacatcagaagcgagaccagcgtgcccgaccacgtggtgtggagcctgttcaacaccctgttcatgaacccctgctgcctgggcttcatcgccttcgcctacagcgtgaagagcagagacagaaagatggtgggcgacgtgaccggcgcccaggcctacgccagcaccgccaagtgcctgaacatctgggccctgatcctgggcatcctgatgaccatcctgctgatcgtgatccccgtgctgatcttccaggcctacggctag

SEQ ID NO: 85452 - DNA, 3078 bp, synthetic construct
  misc_feature 1..3078: note = Description of Artificial Sequence: Synthetic coding sequence
  source 1..3078: mol_type = other DNA
atgagcaacggctacagcaccgacgagaacttcagatacctgatcagctgcttcagagccagagtgaagatgtacatccaggtggagcccgtgctggactacctgaccttcctgcccgccgaggtgaaggagcagatccagagaaccgtggccaccagcggcaacatgcaggccgtggagctgctgctgagcaccctggagaagggcgtgtggcacctgggctggaccagagagttcgtggaggccctgagaagaaccggcagccccctggccgccagatacatgaaccccgagctgaccgacctgcccagccccagcttcgagaacgcccacgacgagtacctgcagctgctgaacctgctgcagcccaccctggtggacaagctgctggtgagagacgtgctggacaagtgcatggaggaggagctgctgaccatcgaggacagaaacagaatcgccgccgccgagaacaacggcaacgagagcggcgtgagagagctgctgaagagaatcgtgcagaaggagaactggttcagcgccttcctgaacgtgctgagacagaccggcaacaacgagctggtgcaggagctgaccggcagcgactgcagcgagagcaacgccgagatcgagaacctgagccaggtggacggcccccaggtggaggagcagctgctgagcaccaccgtgcagcccaacctggagaaggaggtgtggggcatggagaacaacagcagcgagagcagcttcgccgacagcagcgtggtgagcgagagcgacaccagcctggccgagggcagcgtgagctgcctggacgagagcctgggccacaacagcaacatgggcagcgacagcggcaccatgggcagcgacagcgacgaggagaacgtggccgccagagccagccccgagcccgagctgcagctgagaccctaccagatggaggtggcccagcccgccctggagggcaagaacatcatcatctgcctgcccaccggcagcggcaagaccagagtggccgtgtacatcgccaaggaccacctggacaagaagaagaaggccagcgagcccggcaaggtgatcgtgctggtgaacaaggtgctgctggtggagcagctgttcagaaaggagttccagcccttcctgaagaagtggtacagagtgatcggcctgagcggcgacacccagctgaagatcagcttccccgaggtggtgaagagctgcgacatcatcatcagcaccgcccagatcctggagaacagcctgctgaacctggagaacggcgaggacgccggcgtgcagctgagcgacttcagcctgatcatcatcgacgagtgccaccacaccaacaaggaggccgtgtacaacaacatcatgagacactacctgatgcagaagctgaagaacaacagactgaagaaggagaacaagcccgtgatccccctgccccagatcctgggcctgaccgccagccccggcgtgggcggcgccaccaagcaggccaaggccgaggagcacatcctgaagctgtgcgccaacctggacgccttcaccatcaagaccgtgaaggagaacctggaccagctgaagaaccagatccaggagccctgcaagaagttcgccatcgccgacgccaccagagaggaccccttcaaggagaagctgctggagatcatgaccagaatccagacctactgccagatgagccccatgagcgacttcggcacccagccctacgagcagtgggccatccagatggagaagaaggccgccaaggagggcaacagaaaggagagagtgtgcgccgagcacctgagaaagtacaacgaggccctgcagatcaacgacaccatcagaatgatcgacgcctacacccacctggagaccttctacaacgaggagaaggacaagaagttcgccgtgatcgaggacgacagcgacgagggcggcgacgacgagtactgcgacggcgacgaggacgaggacgacctgaagaagcccctgaagctggacgagaccgacagattcctgatgaccctgttcttcgagaacaacaagatgctgaagagactggccgagaaccccgagtacgagaacgagaagctgaccaagctgagaaacaccatcatggagcagtacaccagaaccgaggagagcgccagaggcatcatcttcaccaagaccagacagagcgcctacgccctgagccagtggatcaccgagaacgagaagttcgccgaggtgggcgtgaaggcccaccacctgatcggcgccggccacagcagcgagttcaagcccatgacccagaacgagcagaaggaggtgatcagcaagttcagaaccggcaagatcaacctgctgatcgccaccaccgtggccgaggagggcctggacatcaaggagtgcaacatcgtgatcagatacggcctggtgaccaacgagatcgccatggtgcaggccagaggcagagccagagccgacgagagcacctacgtgctggtggcccacagcggcagcggcgtgatcgagcacgagaccgtgaacgacttcagagagaagatgatgtacaaggccatccactgcgtgcagaacatgaagcccgaggagtacgcccacaagatcctggagctgcagatgcagagcatcatggagaagaagatgaagaccaagagaaacatcgccaagcactacaagaacaaccccagcctgatcaccttcctgtgcaagaactgcagcgtgctggcctgcagcggcgaggacatccacgtgatcgagaagatgcaccacgtgaacatgacccccgagttcaaggagctgtacatcgtgagagagaacaaggccctgcagaagaagtgcgccgactaccagatcaacggcgagatcatctgcaagtgcggccaggcctggggcaccatgatggtgcacaagggcctggacctgccctgcctgaagatcagaaacttcgtggtggtgttcaagaacaacagcaccaagaagcagtacaagaagtgggtggagctgcccatcaccttccccaacctggactacagcgagtgctgcctgttcagcgacgaggactag

SEQ ID NO: 85453 - DNA, 666 bp, synthetic construct
  misc_feature 1..666: note = Description of Artificial Sequence: Synthetic coding sequence
  source 1..666: mol_type = other DNA
atgagcaacggctacagcaccgacgagaacttcagatacctgatcagctgcttcagagccagagtgaagatgtacatccaggtggagcccgtgctggactacctgaccttcctgcccgccgaggtgaaggagcagatccagagaaccgtggccaccagcggcaacatgcaggccgtggagctgctgctgagcaccctggagaagggcgtgtggcacctgggctggaccagagagttcgtggaggccctgagaagaaccggcagccccctggccgccagatacatgaaccccgagctgaccgacctgcccagccccagcttcgagaacgcccacgacgagtacctgcagctgctgaacctgctgcagcccaccctggtggacaagctgctggtgagagacgtgctggacaagtgcatggaggaggagctgctgaccatcgaggacagaaacagaatcgccgccgccgagaacaacggcaacgagagcggcgtgagagagctgctgaagagaatcgtgcagaaggagaactggttcagcgccttcctgaacgtgctgagacagaccggcaacaacgagctggtgcaggagctgaccggcagcgactgcagcgagagcaacgccggcatctgcaacttcaccgaggaggacagcagcaacagcgcctag

SEQ ID NO: 85454 - DNA, 3078 bp, synthetic construct; identical to SEQ ID NO: 85452
  misc_feature 1..3078: note = Description of Artificial Sequence: Synthetic coding sequence
  source 1..3078: mol_type = other DNA

SEQ ID NO: 85455 - DNA, 1050 bp, synthetic construct
  misc_feature 1..1050: note = Description of Artificial Sequence: Synthetic coding sequence
  source 1..1050: mol_type = other DNA
atgcccgtggagagaatgagaatgagaccctggctggaggagcagatcaacagcaacaccatccccggcctgaagtggctgaacaaggagaagaagatcttccagatcccctggatgcacgccgccagacacggctgggacgtggagaaggacgcccccctgttcagaaactgggccatccacaccggcaagcaccagcccggcgtggacaagcccgaccccaagacctggaaggccaacttcagatgcgccatgaacagcctgcccgacatcgaggaggtgaaggacaagagcatcaagaagggcaacaacgccttcagagtgtacagaatgctgcccctgagcgagagacccagcaagaagggcaagaagcccaagaccgagaaggaggacaaggtgaagcacatcaagcaggagcccgtggagagcagcctgggcctgagcaacggcgtgagcgacctgagccccgagtacgccgtgctgaccagcaccatcaagaacgaggtggacagcaccgtgaacatcatcgtggtgggccagagccacctggacagcaacatcgagaaccaggagatcgtgaccaacccccccgacatctgccaggtggtggaggtgaccaccgagagcgacgagcagcccgtgagcatgagcgagctgtaccccctgcagatcagccccgtgagcagctacgccgagagcgagaccaccgacagcgtgcccagcgacgaggagagcgccgagggcagaccccactggagaaagagaaacatcgagggcaagcagtacctgagcaacatgggcaccagaggcagctacctgctgcccggcatggccagcttcgtgaccagcaacaagcccgacctgcaggtgaccatcaaggaggagagcaaccccgtgccctacaacagcagctggccccccttccaggacctgcccctgagcagcagcatgacccccgccagcagcagcagcagacccgacagagagaccagagccagcgtgatcaagaagaccagcgacatcacccaggccagagtgaagagctgctag

SEQ ID NO: 85456 - DNA, 414 bp, synthetic construct
  misc_feature 1..414: note = Description of Artificial Sequence: Synthetic coding sequence
  source 1..414: mol_type = other DNA
atgcccgtggagagaatgagaatgagaccctggctggaggagcagatcaacagcaacaccatccccggcctgaagtggctgaacaaggagaagaagatcttccagatcccctggatgcacgccgccagacacggctgggacgtggagaaggacgcccccctgttcagaaactgggccatccacaccggcaagcaccagcccggcgtggacaagcccgaccccaagacctggaaggccaacttcagatgcgccatgaacagcctgcccgacatcgaggaggtgaaggacaagagcatcaagaagggcaacaacgccttcagagtgtacagaatgctgcccctgagcgagagacccagcaagaagggcaagaagcccaagaccgagaaggaggacaaggtgaagcacatcaagtag

SEQ ID NO: 85457 - DNA, 414 bp, synthetic construct; identical to SEQ ID NO: 85456
  misc_feature 1..414: note = Description of Artificial Sequence: Synthetic coding sequence
  source 1..414: mol_type = other DNA

SEQ ID NO: 85458 - DNA, 531 bp, synthetic construct
  misc_feature 1..531: note = Description of Artificial Sequence: Synthetic coding sequence
  source 1..531: mol_type = other DNA
atgcccgtggagagaatgagaatgagaccctggctggaggagcagatcaacagcaacaccatccccggcctgaagtggctgaacaaggagaagaagatcttccagatcccctggatgcacgccgccagacacggctgggacgtggagaaggacgcccccctgttcagaaactgggccatccacaccggcaagcaccagcccggcgtggacaagcccgaccccaagacctggaaggccaacttcagatgcgccatgaacagcctgcccgacatcgaggaggtgaaggacaagagcatcaagaagggcaacaacgccttcagagtgtacagaatgctgcccctgagcgagagacccagcaagaagggcaagaagcccaagaccgagaaggaggacaaggtgaagcacatcaagcaggagcccgtggagagcagcctgggcctgagcaacggcgtgagcgacctgagccccgagtacgccgtgctgaccagcaccatcaagaacgaggtggacagcaccgtgaacatcatctag

SEQ ID NO: 85459 - DNA, 486 bp, synthetic construct
  misc_feature 1..486: note = Description of Artificial Sequence: Synthetic coding sequence
  source 1..486: mol_type = other DNA
atgcccgtggagagaatgagaatgagaccctggctggaggagcagatcaacagcaacaccatccccggcctgaagtggctgaacaaggagaagaagatcttccagatcccctggatgcacgccgccagacacggctgggacgtggagaaggacgcccccctgttcagaaactgggccatccacaccggcaagcaccagcccggcgtggacaagcccgaccccaagacctggaaggccaacttcagatgcgccatgaacagcctgcccgacatcgaggaggtgaaggacaagagcatcaagaagggcaacaacgccttcagagtgtacagaatgctgcccctgagcgagagacccagcaagaagggcaagaagcccaagaccgagaaggaggacaaggtgaagcacatcaagcaggagcccgtggagagcagcctgggcctgagcaacggcgtgagcgacctgagccccgagtacgccgtgctgtag

SEQ ID NO: 85460 - DNA, 1284 bp, synthetic construct
  misc_feature 1..1284: note = Description of Artificial Sequence: Synthetic coding sequence
  source 1..1284: mol_type = other DNA
atgggcacccccaagcccagaatcctgccctggctggtgagccagctggacctgggccagctggagggcgtggcctgggtgaacaagagcagaaccagattcagaatcccctggaagcacggcctgagacaggacgcccagcaggaggacttcggcatcttccaggcctgggccgaggccaccggcgcctacgtgcccggcagagacaagcccgacctgcccacctggaagagaaacttcagaagcgccctgaacagaaaggagggcctgagactggccgaggacagaagcaaggacccccacgacccccacaagatctacgagttcgtgaacagcggcgtgggcgacttcagccagcccgacaccagccccgacaccaacggcggcggcagcaccagcgacacccaggaggacatcctggacgagctgctgggcaacatggtgctggcccccctgcccgaccccggcccccccagcctggccgtggcccccgagccctgcccccagcccctgagaagccccagcctggacaaccccacccccttccccaacctgggccccagcgagaaccccctgaagagactgctggtgcccggcgaggagtgggagttcgaggtgaccgccttctacagaggcagacaggtgttccagcagaccatcagctgccccgagggcctgagactggtgggcagcgaggtgggcgacagaaccctgcccggctggcccgtgaccctgcccgaccccggcatgagcctgaccgacagaggcgtgatgagctacgtgagacacgtgctgagctgcctgggcggcggcctggccctgtggagagccggccagtggctgtgggcccagagactgggccactgccacacctactgggccgtgagcgaggagctgctgcccaacagcggccacggccccgacggcgaggtgcccaaggacaaggagggcggcgtgttcgacctgggccccttcatcgtggacctgatcaccttcaccgagggcagcggcagaagccccagatacgccctgtggttctgcgtgggcgagagctggccccaggaccagccctggaccaagagactggtgatggtgaaggtggtgcccacctgcctgagagccctggtggagatggccagagtgggcggcgccagcagcctggagaacaccgtggacctgcacatcagcaacagccaccccctgagcctgaccagcgaccagtacaaggcctacctgcaggacctggtggagggcatggacttccagggccccggcgagagctag

SEQ ID NO: 85461 - DNA, 903 bp, synthetic construct
  misc_feature 1..903: note = Description of Artificial Sequence: Synthetic coding sequence
  source 1..903: mol_type = other DNA
atgggcacccccaagcccagaatcctgccctggctggtgagccagctggacctgggccagctggagggcgtggcctgggtgaacaagagcagaaccagattcagaatcccctggaagcacggcctgagacaggacgcccagcaggaggacttcggcatcttccaggcctgggccgaggccaccggcgcctacgtgcccggcagagacaagcccgacctgcccacctggaagagaaacttcagaagcgccctgaacagaaaggagggcctgagactggccgaggacagaagcaaggacccccacgacccccacaagatctacgagttcgtgaacagcggcgtgggcgacttcagccagcccgacaccagccccgacaccaacggcggcggcagcaccagcgacacccaggaggacatcctggacgagctgctgggcaacatggtgctggcccccctgcccgaccccggcccccccagcctggccgtggcccccgagccctgcccccagcccctgagaagccccagcctggacaaccccacccccttccccaacctgggccccagcgagaaccccctgaagagactgctggtgcccggcgaggacctgatcaccttcaccgagggcagcggcagaagccccagatacgccctgtggttctgcgtgggcgagagctggccccaggaccagccctggaccaagagactggtgatggtgaaggtggtgcccacctgcctgagagccctggtggagatggccagagtgggcggcgccagcagcctggagaacaccgtggacctgcacatcagcaacagccaccccctgagcctgaccagcgaccagtacaaggcctacctgcaggacctggtggagggcatggacttccagggccccggcgagagctag

SEQ ID NO: 85462 - DNA, 1284 bp, synthetic construct; identical to SEQ ID NO: 85460
  misc_feature 1..1284: note = Description of Artificial Sequence: Synthetic coding sequence
  source 1..1284: mol_type = other DNA

SEQ ID NO: 85463 - DNA, 315 bp, synthetic construct
  misc_feature 1..315: note = Description of Artificial Sequence: Synthetic coding sequence
  source 1..315: mol_type = other DNA
atgggcacccccaagcccagaatcctgccctggctggtgagccagctggacctgggccagctggagggcgtggcctgggtgaacaagagcagaaccagattcagaatcccctggaagcacggcctgagacaggacgcccagcaggaggacttcggcatcttccaggagctgggcaccttccccagccagacccccctgagaacccccatggtggaggccgtgctgctgatccccagaaagaccttctggatgagctactgggtgacctggtgctggccccacagccagatcagagacccccaggcctggctgtag

SEQ ID NO: 85464 - DNA, 846 bp, synthetic construct
  misc_feature 1..846: note = Description of Artificial Sequence: Synthetic coding sequence
  source 1..846: mol_type = other DNA
atggtgctggcccccctgcccgaccccggcccccccagcctggccgtggcccccgagccctgcccccagcccctgagaagccccagcctggacaaccccacccccttccccaacctgggccccagcgagaaccccctgaagagactgctggtgcccggcgaggagtgggagttcgaggtgaccgccttctacagaggcagacaggtgttccagcagaccatcagctgccccgagggcctgagactggtgggcagcgaggtgggcgacagaaccctgcccggctggcccgtgaccctgcccgaccccggcatgagcctgaccgacagaggcgtgatgagctacgtgagacacgtgctgagctgcctgggcggcggcctggccctgtggagagccggccagtggctgtgggcccagagactgggccactgccacacctactgggccgtgagcgaggagctgctgcccaacagcggccacggccccgacggcgaggtgcccaaggacaaggagggcggcgtgttcgacctgggccccttcatcgtggacctgatcaccttcaccgagggcagcggcagaagccccagatacgccctgtggttctgcgtgggcgagagctggccccaggaccagccctggaccaagagactggtgatggtgaaggtggtgcccacctgcctgagagccctggtggagatggccagagtgggcggcgccagcagcctggagaacaccgtggacctgcacatcagcaacagccaccccctgagcctgaccagcgaccagtacaaggcctacctgcaggacctggtggagggcatggacttccagggccccggcgagagctag

SEQ ID NO: 85465 - DNA, 465 bp, synthetic construct
  misc_feature 1..465: note = Description of Artificial Sequence: Synthetic coding sequence
  source 1..465: mol_type = other DNA
atggtgctggcccccctgcccgaccccggcccccccagcctggccgtggcccccgagccctgcccccagcccctgagaagccccagcctggacaaccccacccccttccccaacctgggccccagcgagaaccccctgaagagactgctggtgcccggcgaggacctgatcaccttcaccgagggcagcggcagaagccccagatacgccctgtggttctgcgtgggcgagagctggccccaggaccagccctggaccaagagactggtgatggtgaaggtggtgcccacctgcctgagagccctggtggagatggccagagtgggcggcgccagcagcctggagaacaccgtggacctgcacatcagcaacagccaccccctgagcctgaccagcgaccagtacaaggcctacctgcaggacctggtggagggcatggacttccagggccccggcgagagctag

SEQ ID NO: 85466 - DNA, 846 bp, synthetic construct; identical to SEQ ID NO: 85464
  misc_feature 1..846: note = Description of Artificial Sequence: Synthetic coding sequence
  source 1..846: mol_type = other DNA

SEQ ID NO: 85467 - DNA, 903 bp, synthetic construct; identical to SEQ ID NO: 85461
  misc_feature 1..903: note = Description of Artificial Sequence: Synthetic coding sequence
  source 1..903: mol_type = other DNA

SEQ ID NO: 85468 - DNA, 465 bp, synthetic construct; identical to SEQ ID NO: 85465
  misc_feature 1..465: note = Description of Artificial Sequence: Synthetic coding sequence
  source 1..465: mol_type = other DNA

SEQ ID NO: 85469 - DNA, 1404 bp, synthetic construct
  misc_feature 1..1404: note = Description of Artificial Sequence: Synthetic coding sequence
  source 1..1404: mol_type = other DNA
atggccctgcaccccagaagagtgagactgaagccctggctggtggcccaggtggacagcggcctgtaccccggcctgatctggctgcacagagacagcaagagattccagatcccctggaagcacgccaccagacacagcccccagcaggaggaggagaacaccatcttcaaggcctgggccgtggagaccggcaagtaccaggagggcgtggacgaccccgaccccgccaagtggaaggcccagctgagatgcgccctgaacaagagcagagagttcaacctgatgtacgacggcaccaaggaggtgcccatgaaccccgtgaagatctaccaggtgtgcgacatcccccagccccagggcagcatcatcaaccccggcagcaccggcagcgccccctgggacgagaaggacaacgacgtggacgaggaggacgaggaggacgagctggaccagagccagcaccacgtgcccatccaggacaccttccccttcctgaacatcaacggcagccccatggcccccgccagcgtgggcaactgcagcgtgggcaactgcagccccgaggccgtgtggcccaagaccgagcccctggagatggaggtgccccaggcccccatccagcccttctacagcagccccgagctgtggatcagcagcctgcccatgaccgacctggacatcaagttccagtacagaggcaaggagtacggccagaccatgaccgtgagcaacccccagggctgcagactgttctacggcgacctgggccccatgcccgaccaggaggagctgttcggccccgtgagcctggagcaggtgaagttccccggccccgagcacatcaccaacgagaagcagaagctgttcaccagcaagctgctggacgtgatggacagaggcctgatcctggaggtgagcggccacgccatctacgccatcagactgtgccagtgcaaggtgtactggagcggcccctgcgcccccagcctggtggcccccaacctgatcgagagacagaagaaggtgaagctgttctgcctggagaccttcctgagcgacctgatcgcccaccagaagggccagatcgagaagcagccccccttcgagatctacctgtgcttcggcgaggagtggcccgacggcaagcccctggagagaaagctgatcctggtgcaggtgatccccgtggtggccagaatgatctacgagatgttcagcggcgacttcaccagaagcttcgacagcggcagcgtgagactgcagatcagcacccccgacatcaaggacaacatcgtggcccagctgaagcagctgtacagaatcctgcagacccaggagagctggcagcccatgcagcccacccccagcatgcagctgccccccgccctgcccccccagtag

SEQ ID NO: 85470 - DNA, 831 bp, synthetic construct
  misc_feature 1..831: note = Description of Artificial Sequence: Synthetic coding sequence
  source 1..831: mol_type = other DNA
atggccctgcaccccagaagagtgagactgaagccctggctggtggcccaggtggacagcggcctgtaccccggcctgatctggctgcacagagacagcaagagattccagatcccctggaagcacgccaccagacacagcccccagcaggaggaggagaacaccatcttcaaggcctgggccgtggagaccggcaagtaccaggagggcgtggacgaccccgaccccgccaagtggaaggcccagctgagatgcgccctgaacaagagcagagagttcaacctgatgtacgacggcaccaaggaggtgcccatgaaccccgtgaagatctaccaggtgtgcgacatcccccagccccagggcagcatcatcaaccccggcagcaccggcagcgccccctgggacgagaaggacaacgacgtggacgaggaggacgaggaggacgagctggaccagagccagcaccacgtgcccatccaggacaccttccccttcctgaacatcaacggcagccccatggcccccgccagcgtgggcaactgcagcgtgggcaactgcagccccgaggccgtgtggcccaagaccgagcccctggagatggaggtgccccaggcccccatccagcccttctacagcagccccgagctgtggatcagcagcctgcccatgaccgacctggacatcaagttccagtacagaggcaaggagtacggccagaccatgaccgtgagcaacccccagggctgcagactgttctacggcgacctgggccccatgcccgaccaggaggagctgttcggccccgtgagcctggagcaggtgaagttctag

SEQ ID NO: 85471 - DNA, 1119 bp, synthetic construct
  misc_feature 1..1119: note = Description of Artificial Sequence: Synthetic coding sequence
  source 1..1119: mol_type = other DNA
atgtacgacggcaccaaggaggtgcccatgaaccccgtgaagatctaccaggtgtgcgacatcccccagccccagggcagcatcatcaaccccggcagcaccggcagcgccccctgggacgagaaggacaacgacgtggacgaggaggacgaggaggacgagctggaccagagccagcaccacgtgcccatccaggacaccttccccttcctgaacatcaacggcagccccatggcccccgccagcgtgggcaactgcagcgtgggcaactgcagccccgaggccgtgtggcccaagaccgagcccctggagatggaggtgccccaggcccccatccagcccttctacagcagccccgagctgtggatcagcagcctgcccatgaccgacctggacatcaagttccagtacagaggcaaggagtacggccagaccatgaccgtgagcaacccccagggctgcagactgttctacggcgacctgggccccatgcccgaccaggaggagctgttcggccccgtgagcctggagcaggtgaagttccccggccccgagcacatcaccaacgagaagcagaagctgttcaccagcaagctgctggacgtgatggacagaggcctgatcctggaggtgagcggccacgccatctacgccatcagactgtgccagtgcaaggtgtactggagcggcccctgcgcccccagcctggtggcccccaacctgatcgagagacagaagaaggtgaagctgttctgcctggagaccttcctgagcgacctgatcgcccaccagaagggccagatcgagaagcagccccccttcgagatctacctgtgcttcggcgaggagtggcccgacggcaagcccctggagagaaagctgatcctggtgcaggtgatccccgtggtggccagaatgatctacgagatgttcagcggcgacttcaccagaagcttcgacagcggcagcgtgagactgcagatcagcacccccgacatcaaggacaacatcgtggcccagctgaagcagctgtacagaatcctgcagacccaggagagctggcagcccatgcagcccacccccagcatgcagctgccccccgccctgcccccccagtag

SEQ ID NO: 85472 - DNA, 1281 bp, synthetic construct
  misc_feature 1..1281: note = Description of Artificial Sequence: Synthetic coding sequence
  source 1..1281: mol_type = other DNA
atgtgcgacagaaacggcggcagaagactgagacagtggctgatcgagcagatcgacagcagcatgtaccccggcctgatctgggagaacgaggagaagagcatgttcagaatcccctggaagcacgccggcaagcaggactacaaccaggaggtggacgccagcatcttcaaggcctgggccgtgttcaagggcaagttcaaggagggcgacaaggccgagcccgccacctggaagaccagactgagatgcgccctgaacaagagccccgacttcgaggaggtgaccgacagaagccagctggacatcagcgagccctacaaggtgtacagaatcgtgcccgaggaggagcagaagtgcaagctgggcgtggccaccgccggctgcgtgaacgaggtgaccgagatggagtgcggcagaagcgagatcgacgagctgatcaaggagcccagcgtggacgactacatgggcatgatcaagagaagccccagcccccccgaggcctgcagaagccagctgctgcccgactggtgggcccagcagcccagcaccggcgtgcccctggtgaccggctacaccacctacgacgcccaccacagcgccttcagccagatggtgatcagcttctactacggcggcaagctggtgggccaggccaccaccacctgccccgagggctgcagactgagcctgagccagcccggcctgcccggcaccaagctgtacggccccgagggcctggagctggtgagattcccccccgccgacgccatccccagcgagagacagagacaggtgaccagaaagctgttcggccacctggagagaggcgtgctgctgcacagcagcagacagggcgtgttcgtgaagagactgtgccagggcagagtgttctgcagcggcaacgccgtggtgtgcaagggcagacccaacaagctggagagagacgaggtggtgcaggtgttcgacaccagccagttcttcagagagctgcagcagttctacaacagccagggcagactgcccgacggcagagtggtgctgtgcttcggcgaggagttccccgacatggcccccctgagaagcaagctgatcctggtgcagatcgagcagctgtacgtgagacagctggccgaggaggccggcaagagctgcggcgccggcagcgtgatgcaggcccccgaggagcccccccccgaccaggtgttcagaatgttccccgacatctgcgccagccaccagagaagcttcttcagagagaaccagcagatcaccgtgtag

SEQ ID NO: 85473 - DNA, 546 bp, synthetic construct
  misc_feature 1..546: note = Description of Artificial Sequence: Synthetic coding sequence
  source 1..546: mol_type = other DNA
atggccggcagcagagaggtggtggccatggactgcgagatggtgggcctgggcccccacagagagagcggcctggccagatgcagcctggtgaacgtgcacggcgccgtgctgtacgacaagttcatcagacccgagggcgagatcaccgactacagaaccagagtgagcggcgtgaccccccagcacatggtgggcgccacccccttcgccgtggccagactggagatcctgcagctgctgaagggcaagctggtggtgggccacgacctgaagcacgacttccaggccctgaaggaggacatgagcggctacaccatctacgacaccagcaccgacagactgctgtggagagaggccaagctggaccactgcagaagagtgagcctgagagtgctgagcgagagactgctgcacaagagcatccagaacagcctgctgggccacagcagcgtggaggacgccagagccaccatggagctgtaccagatcagccagagaatcagagccagaagaggcctgcccagactggccgtgagcgactag

SEQ ID NO: 85474 - DNA, 546 bp, synthetic construct; identical to SEQ ID NO: 85473
  misc_feature 1..546: note = Description of Artificial Sequence: Synthetic coding sequence
  source 1..546: mol_type = other DNA

SEQ ID NO: 85475 - DNA, 1062 bp, synthetic construct
  misc_feature 1..1062: note = Description of Artificial Sequence: Synthetic coding sequence
  source 1..1062: mol_type = other DNA
atgagcaccctgctgctgaacctggacttcggcgagcccccccccaagaaggccctggagggcaacgccaagcacagaaacttcgtgaagaagagaagactgctggagagaagaggcttcctgagcaagaagaaccagccccccagcaaggcccccaagctgcacagcgagcccagcaagaagggcgagacccccaccgtggacggcacctggaagacccccagcttccccaagaagaagaccgccgccagcagcaacggcagcggccagcccctggacaagaaggccgccgtgagctggctgacccccgcccccagcaagaaggccgacagcgtggccgccaaggtggacctgctgggcgagttccagagcgccctgcccaagatcaacagccaccccaccagaagccagaagaagagcagccagaagaagagcagcaagaagaaccacccccagaagaacgccccccagaacagcacccaggcccacagcgagaacaagtgcagcggcgccagccagaagctgcccagaaagatggtggccatcgactgcgagatggtgggcaccggccccaagggccacgtgagcagcctggccagatgcagcatcgtgaactacaacggcgacgtgctgtacgacgagtacatcctgcccccctgccacatcgtggactacagaaccagatggagcggcatcagaaagcagcacatggtgaacgccacccccttcaagatcgccagaggccagatcctgaagatcctgaccggcaagatcgtggtgggccacgccatccacaacgacttcaaggccctgcagtacttccaccccaagagcctgaccagagacaccagccacatcccccccctgaacagaaaggccgactgccccgagaacgccaccatgagcctgaagcacctgaccaagaagctgctgaacagagacatccaggtgggcaagagcggccacagcagcgtggaggacgcccaggccaccatggagctgtacaagctggtggaggtggagtgggaggagcacctggccagaaacccccccaccgactag

SEQ ID NO: 85476 - DNA, 1062 bp, synthetic construct; identical to SEQ ID NO: 85475
  misc_feature 1..1062: note = Description of Artificial Sequence: Synthetic coding sequence
  source 1..1062: mol_type = other DNA

SEQ ID NO: 85477 - DNA, 360 bp, synthetic construct
  misc_feature 1..360: note = Description of Artificial Sequence: Synthetic coding sequence
  source 1..360: mol_type = other DNA
atggaggccagcgccctgaccagcagcgccgtgaccagcgtggccaaggtggtgagagtggccagcggcagcgccgtggtgctgcccctggccagaatcgccaccgtggtgatcggcggcgtggtggccgtgcccatggtgctgagcgccatgggcttcaccgccgccggcatcgccagcagcagcatcgccgccaagatgatgagcgccgccgccatcgccaacggcggcggcgtggccagcggcagcctggtggccaccctgcagagcctgggcgccaccggcctgagcggcctgaccaagttcatcctgggcagcatcggcagcgccatcgccgccgtgatcgccagattctactag

SEQ ID NO: 85478 - DNA, 369 bp, synthetic construct
  misc_feature 1..369: note = Description of Artificial Sequence: Synthetic coding sequence
  source 1..369: mol_type = other DNA
atggaggccagcgccctgaccagcagcgccgtgaccagcgtggccaaggtggtgagagtggccagcggcagcgccgtggtgctgcccctggccagaatcgccaccgtggtgatcggcggcggcgagagcgtggtggccgtgcccatggtgctgagcgccatgggcttcaccgccgccggcatcgccagcagcagcatcgccgccaagatgatgagcgccgccgccatcgccaacggcggcggcgtggccagcggcagcctggtggccaccctgcagagcctgggcgccaccggcctgagcggcctgaccaagttcatcctgggcagcatcggcagcgccatcgccgccgtgatcgccagattctactag

SEQ ID NO: 85479 - DNA, 369 bp, synthetic construct
  misc_feature 1..369: note = Description of Artificial Sequence: Synthetic coding sequence
  source 1..369: mol_type = other DNA
atggaggccagcgccctgaccagcagcgccgtgaccagcgtggccaaggtggtgagagtggccagcggcagcgccgtggtgctgcccctggccagaatcgccaccgtggtgatcggcggcgtggccagcatcgtggccgtgcccatggtgctgagcgccatgggcttcaccgccgccggcatcgccagcagcagcatcgccgccaagatgatgagcgccgccgccatcgccaacggcggcggcgtggccagcggcagcctggtggccaccctgcagagcctgggcgccaccggcctgagcggcctgaccaagttcatcctgggcagcatcggcagcgccatcgccgccgtgatcgccagattctactag

SEQ ID NO: 85480 - DNA, 189 bp, synthetic construct
  misc_feature 1..189: note = Description of Artificial Sequence: Synthetic coding sequence
  source 1..189: mol_type = other DNA
atggaggccagcgccctgaccagcagcgccgtgaccagcgtggccaaggtggtgagagtggccagcggcagcgccgtggtgctgcccctggccagaatcgccaccgtggtgatcggcggcgtggtggccgtgcccatggtgctgagcgccatgggcttcaccgccgccggcatcgccagcagcagctag

SEQ ID NO: 85481 - DNA, 174 bp, synthetic construct
  misc_feature 1..174: note = Description of Artificial Sequence: Synthetic coding sequence
  source 1..174: mol_type = other DNA
atggaggccagcgccctgaccagcagcgccgtgaccagcgtggccaaggtggtgagagtggccagcggcagcgccgtggtgctgcccctggccagaatcgccaccgtggtgatcggcggcgtggtggccgtgcccatggtgctgagcgccatgggcttcaccgccgccggctag

SEQ ID NO: 85482 - DNA, 360 bp, synthetic construct; identical to SEQ ID NO: 85477
  misc_feature 1..360: note = Description of Artificial Sequence: Synthetic coding sequence
  source 1..360: mol_type = other DNA

SEQ ID NO: 85483 - DNA, 123 bp, synthetic construct
  misc_feature 1..123: note = Description of Artificial Sequence: Synthetic coding sequence
  source 1..123: mol_type = other DNA
atggaggccagcgccctgaccagcagcgccgtgaccagcgtggccaaggtggtgagagtggccagcggcagcgccgtggtgctgcccctggccagaatcgccaccgtggtgatcggcggctag

SEQ ID NO: 85484 - DNA, 282 bp, synthetic construct
  misc_feature 1..282: note = Description of Artificial Sequence: Synthetic coding sequence
  source 1..282: mol_type = other DNA
atggaggccagcgccctgaccagcagcgccgtgaccagcgtggccaaggtggtgagagtggccagcggcagcgccgtggtgctgcccctggccagaatcgccaccgtggtgatcggcggcgtggtggccgtgcccatggtgctgagcgccatgggcttcaccgccgccggcatcgccagcagcagcatcgccgccaagatgatgagcgccgccgccatcgccaacggcggcggcgtggccagcggcagcctggtggccaccctgcagagcctgggcgcctag

SEQ ID NO: 85485 - DNA, 2358 bp, synthetic construct
  misc_feature 1..2358: note = Description of Artificial Sequence: Synthetic coding sequence
  source 1..2358: mol_type = other DNA
atgggcaagaagtacaagaacatcgtgctgctgaagggcctggaggtgatcaacgactaccacttcagaatggtgaagagcctgctgagcaacgacctgaagctgaacctgaagatgagagaggagtacgacaagatccagatcgccgacctgatggaggagaagttcagaggcgacgccggcctgggcaagctgatcaagatcttcgaggacatccccaccctggaggacctggccgagaccctgaagaaggagaagctgaaggtgaagggccccgccctgagcagaaagagaaagaaggaggtggacgccaccagccccgcccccagcaccagcagcaccgtgaagaccgagggcgccgaggccacccccggcgcccagaagagaaagaagagcaccaaggagaaggccggccccaagggcagcaaggtgagcgaggagcagacccagccccccagccccgccggcgccggcatgagcaccgccatgggcagaagccccagccccaagaccagcctgagcgccccccccaacagcagcagcaccgagaaccccaagaccgtggccaagtgccaggtgacccccagaagaaacgtgctgcagaagagacccgtgatcgtgaaggtgctgagcaccaccaagcccttcgagtacgagacccccgagatggagaagaagatcatgttccacgccaccgtggccacccagacccagttcttccacgtgaaggtgctgaacaccagcctgaaggagaagttcaacggcaagaagatcatcatcatcagcgactacctggagtacgacagcctgctggaggtgaacgaggagagcaccgtgagcgaggccggccccaaccagaccttcgaggtgcccaacaagatcatcaacagagccaaggagaccctgaagatcgacatcctgcacaagcaggccagcggcaacatcgtgtacggcgtgttcatgctgcacaagaagaccgtgaaccagaagaccaccatctacgagatccaggacgacagaggcaagatggacgtggtgggcaccggccagtgccacaacatcccctgcgaggagggcgacaagctgcagctgttctgcttcagactgagaaagaagaaccagatgagcaagctgatcagcgagatgcacagcttcatccagatcaagaagaagaccaaccccagaaacaacgaccccaagagcatgaagctgccccaggagcagagacagctgccctaccccagcgaggccagcaccaccttccccgagagccacctgagaaccccccagatgccccccaccacccccagcagcagcttcttcaccaagaagagcgaggacaccatcagcaagatgaacgacttcatgagaatgcagatcctgaaggagggcagccacttccccggccccttcatgaccagcatcggccccgccgagagccacccccacaccccccagatgccccccagcacccccagcagcagcttcctgaccaccaagagcgaggacaccatcagcaagatgaacgacttcatgagaatgcagatcctgaaggagggcagccacttccccggccccttcatgaccagcatcggccccgccgagagccacccccacaccccccagatgccccccagcacccccagcagcagcttcctgaccaccctgaagcccagactgaagaccgagcccgaggaggtgagcatcgaggacagcgcccagagcgacctgaaggaggtgatggtgctgaacgccaccgagagcttcgtgtacgagcccaaggagcagaagaagatgttccacgccaccgtggccaccgagaacgaggtgttcagagtgaaggtgttcaacatcgacctgaaggagaagttcacccccaagaagatcatcgccatcgccaactacgtgtgcagaaacggcttcctggaggtgtaccccttcaccctggtggccgacgtgaacgccgacagaaacatggagatccccaagggcctgatcagaagcgccagcgtgacccccaagatcaaccagctgtgcagccagaccaagggcagcttcgtgaacggcgtgttcgaggtgcacaagaagaacgtgagaggcgagttcacctactacgagatccaggacaacaccggcaagatggaggtggtggtgcacggcagactgaccaccatcaactgcgaggagggcgacaagctgaagctgacctgcttcgagctggcccccaagagcggcaacaccggcgagctgagaagcgtgatccacagccacatcaaggtgatcaagaccagaaagaacaagaaggacatcctgaaccccgacagcagcatggagaccagccccgacttcttcttctag

SEQ ID NO: 85486 - DNA, 2022 bp, synthetic construct
  misc_feature 1..2022: note = Description of Artificial Sequence: Synthetic coding sequence
  source 1..2022: mol_type = other DNA
atgggcaagaagtacaagaacatcgtgctgctgaagggcctggaggtgatcaacgactaccacttcagaatggtgaagagcctgctgagcaacgacctgaagctgaacctgaagatgagagaggagtacgacaagatccagatcgccgacctgatggaggagaagttcagaggcgacgccggcctgggcaagctgatcaagatcttcgaggacatccccaccctggaggacctggccgagaccctgaagaaggagaagctgaaggtgaagggccccgccctgagcagaaagagaaagaaggaggtggacgccaccagccccgcccccagcaccagcagcaccgtgaagaccgagggcgccgaggccacccccggcgcccagaagagaaagaagagcaccaaggagaaggccggccccaagggcagcaaggtgagcgaggagcagacccagccccccagccccgccggcgccggcatgagcaccgccatgggcagaagccccagccccaagaccagcctgagcgccccccccaacagcagcagcaccgagaaccccaagaccgtggccaagtgccaggtgacccccagaagaaacgtgctgcagaagagacccgtgatcgtgaaggtgctgagcaccaccaagcccttcgagtacgagacccccgagatggagaagaagatcatgttccacgccaccgtggccacccagacccagttcttccacgtgaaggtgctgaacaccagcctgaaggagaagttcaacggcaagaagatcatcatcatcagcgactacctggagtacgacagcctgctggaggtgaacgaggagagcaccgtgagcgaggccggccccaaccagaccttcgaggtgcccaacaagatcatcaacagagccaaggagaccctgaagatcgacatcctgcacaagcaggccagcggcaacatcgtgtacggcgtgttcatgctgcacaagaagaccgtgaaccagaagaccaccatctacgagatccaggacgacagaggcaagatggacgtggtgggcaccggccagtgccacaacatcccctgcgaggagggcgacaagctgcagctgttctgcttcagactgagaaagaagaaccagatgagcaagctgatcagcgagatgcacagcttcatccagatcaagaagaagaccaaccccagaaacaacgaccccaagagcatgaagctgccccaggagcagagacagctgccctaccccagcgaggccagcaccaccttccccgagagccacctgagaaccccccagatgccccccaccacccccagcagcagcttcttcaccaagctgaagcccagactgaagaccgagcccgaggaggtgagcatcgaggacagcgcccagagcgacctgaaggaggtgatggtgctgaacgccaccgagagcttcgtgtacgagcccaaggagcagaagaagatgttccacgccaccgtggccaccgagaacgaggtgttcagagtgaaggtgttcaacatcgacctgaaggagaagttcacccccaagaagatcatcgccatcgccaactacgtgtgcagaaacggcttcctggaggtgtaccccttcaccctggtggccgacgtgaacgccgacagaaacatggagatccccaagggcctgatcagaagcgccagcgtgacccccaagatcaaccagctgtgcagccagaccaagggcagcttcgtgaacggcgtgttcgaggtgcacaagaagaacgtgagaggcgagttcacctactacgagatccaggacaacaccggcaagatggaggtggtggtgcacggcagactgaccaccatcaactgcgaggagggcgacaagctgaagctgacctgcttcgagctggcccccaagagcggcaacaccggcgagctgagaagcgtgatccacagccacatcaaggtgatcaagaccagaaagaacaagaaggacatcctgaaccccgacagcagcatggagaccagccccgacttcttcttctag

SEQ ID NO: 85487 - DNA, 1245 bp, synthetic construct
  misc_feature 1..1245: note = Description of Artificial Sequence: Synthetic coding sequence
  source 1..1245: mol_type = other DNA
atgggcaagaagtacaagaacatcgtgctgctgaagggcctggaggtgatcaacgactaccacttcagaatggtgaagagcctgctgagcaacgacctgaagctgaacctgaagatgagagaggagtacgacaagatccagatcgccgacctgatggaggagaagttcagaggcgacgccggcctgggcaagctgatcaagatcttcgaggacatccccaccctggaggacctggccgagaccctgaagaaggagaagctgaaggtgaagggccccgccctgagcagaaagagaaagaaggaggtggacgccaccagccccgcccccagcaccagcagcaccgtgaagaccgagggcgccgaggccacccccggcgcccagaagagaaagaagagcaccaaggagaaggccggccccaagggcagcaaggtgagcgaggagcagacccagccccccagccccgccggcgccggcatgagcaccgccatgggcagaagccccagccccaagaccagcctgagcgccccccccaacagcagcagcaccgagaaccccaagaccgtggccaagtgccaggtgacccccagaagaaacgtgctgcagaagagacccgtgatcgtgaaggtgctgagcaccaccaagcccttcgagtacgagacccccgagatggagaagaagatcatgttccacgccaccgtggccacccagacccagttcttccacgtgaaggtgctgaacaccagcctgaaggagaagttcacccccaagaagatcatcgccatcgccaactacgtgtgcagaaacggcttcctggaggtgtaccccttcaccctggtggccgacgtgaacgccgacagaaacatggagatccccaagggcctgatcagaagcgccagcgtgacccccaagatcaaccagctgtgcagccagaccaagggcagcttcgtgaacggcgtgttcgaggtgcacaagaagaacgtgagaggcgagttcacctactacgagatccaggacaacaccggcaagatggaggtggtggtgcacggcagactgaccaccatcaactgcgaggagggcgacaagctgaagctgacctgcttcgagctggcccccaagagcggcaacaccggcgagctgagaagcgtgatccacagccacatcaaggtgatcaagaccagaaagaacaagaaggacatcctgaaccccgacagcagcatggagaccagccccgacttcttcttctag

SEQ ID NO: 85488 - DNA, 2190 bp, synthetic construct
  misc_feature 1..2190: note = Description of Artificial Sequence: Synthetic coding sequence
  source 1..2190: mol_type = other DNA
atgggcaagaagtacaagaacatcgtgctgctgaagggcctggaggtgatcaacgactaccacttcagaatggtgaagagcctgctgagcaacgacctgaagctgaacctgaagatgagagaggagtacgacaagatccagatcgccgacctgatggaggagaagttcagaggcgacgccggcctgggcaagctgatcaagatcttcgaggacatccccaccctggaggacctggccgagaccctgaagaaggagaagctgaaggtgaagggccccgccctgagcagaaagagaaagaaggaggtggacgccaccagccccgcccccagcaccagcagcaccgtgaagaccgagggcgccgaggccacccccggcgcccagaagagaaagaagagcaccaaggagaaggccggccccaagggcagcaaggtgagcgaggagcagacccagccccccagccccgccggcgccggcatgagcaccgccatgggcagaagccccagccccaagaccagcctgagcgccccccccaacagcagcagcaccgagaaccccaagaccgtggccaagtgccaggtgacccccagaagaaacgtgctgcagaagagacccgtgatcgtgaaggtgctgagcaccaccaagcccttcgagtacgagacccccgagatggagaagaagatcatgttccacgccaccgtggccacccagacccagttcttccacgtgaaggtgctgaacaccagcctgaaggagaagttcaacggcaagaagatcatcatcatcagcgactacctggagtacgacagcctgctggaggtgaacgaggagagcaccgtgagcgaggccggccccaaccagaccttcgaggtgcccaacaagatcatcaacagagccaaggagaccctgaagatcgacatcctgcacaagcaggccagcggcaacatcgtgtacggcgtgttcatgctgcacaagaagaccgtgaaccagaagaccaccatctacgagatccaggacgacagaggcaagatggacgtggtgggcaccggccagtgccacaacatcccctgcgaggagggcgacaagctgcagctgttctgcttcagactgagaaagaagaaccagatgagcaagctgatcagcgagatgcacagcttcatccagatcaagaagaagaccaaccccagaaacaacgaccccaagagcatgaagctgccccaggagcagagacagctgccctaccccagcgaggccagcaccaccttccccgagagccacctgagaaccccccagatgccccccaccacccccagcagcagcttcttcaccaagaagagcgaggacaccatcagcaagatgaacgacttcatgagaatgcagatcctgaaggagggcagccacttccccggccccttcatgaccagcatcggccccgccgagagccacccccacaccccccagatgccccccagcacccccagcagcagcttcctgaccaccctgaagcccagactgaagaccgagcccgaggaggtgagcatcgaggacagcgcccagagcgacctgaaggaggtgatggtgctgaacgccaccgagagcttcgtgtacgagcccaaggagcagaagaagatgttccacgccaccgtggccaccgagaacgaggtgttcagagtgaaggtgttcaacatcgacctgaaggagaagttcacccccaagaagatcatcgccatcgccaactacgtgtgcagaaacggcttcctggaggtgtaccccttcaccctggtggccgacgtgaacgccgacagaaacatggagatccccaagggcctgatcagaagcgccagcgtgacccccaagatcaaccagctgtgcagccagaccaagggcagcttcgtgaacggcgtgttcgaggtgcacaagaagaacgtgagaggcgagttcacctactacgagatccaggacaacaccggcaagatggaggtggtggtgcacggcagactgaccaccatcaactgcgaggagggcgacaagctgaagctgacctgcttcgagctggcccccaagagcggcaacaccggcgagctgagaagcgtgatccacagccacatcaaggtgatcaagaccagaaagaacaagaaggacatcctgaaccccgacagcagcatggagaccagccccgacttcttcttctag

SEQ ID NO: 85489 - DNA, 2190 bp, synthetic construct; identical to SEQ ID NO: 85488
  misc_feature 1..2190: note = Description of Artificial Sequence: Synthetic coding sequence
  source 1..2190: mol_type = other DNA

SEQ ID NO: 85490 - DNA, 384 bp, synthetic construct
  misc_feature 1..384: note = Description of Artificial Sequence: Synthetic coding sequence
  source 1..384: mol_type = other DNA
atgggcaagaagtacaagaacatcgtgctgctgaagggcctggaggtgatcaacgactaccacttcagaatggtgaagagcctgctgagcaacgacctgaagctgaacctgaagatgagagaggagtacgacaagatccagatcgccgacctgatggaggagaagttcagaggcgacgccggcctgggcaagctgatcaagatcttcgaggacatccccaccctggaggacctggccgagaccctgaagaaggagaagctgaaggtgaagggccccgccctgagcagaaagagaaagaaggaggtggacgccaccagccccgcccccagcaccagcagcaccgtgaagaccgagggcgccgaggccacccccggcgcccagtag

SEQ ID NO: 85491 - DNA, 2202 bp, synthetic construct
  misc_feature 1..2202: note = Description of Artificial Sequence: Synthetic coding sequence
  source 1..2202: mol_type = other DNA
atgagcgtgaagatgggcaagaagtacaagaacatcgtgctgctgaagggcctggaggtgatcaacgactaccacttcagaatggtgaagagcctgctgagcaacgacctgaagctgaacctgaagatgagagaggagtacgacaagatccagatcgccgacctgatggaggagaagttcagaggcgacgccggcctgggcaagctgatcaagatcttcgaggacatccccaccctggaggacctggccgagaccctgaagaaggagaagctgaaggtgaagggccccgccctgagcagaaagagaaagaaggaggtggacgccaccagccccgcccccagcaccagcagcaccgtgaagaccgagggcgccgaggccacccccggcgcccagaaccccaagaccgtggccaagtgccaggtgacccccagaagaaacgtgctgcagaagagacccgtgatcgtgaaggtgctgagcaccaccaagcccttcgagtacgagacccccgagatggagaagaagatcatgttccacgccaccgtggccacccagacccagttcttccacgtgaaggtgctgaacaccagcctgaaggagaagttcaacggcaagaagatcatcatcatcagcgactacctggagtacgacagcctgctggaggtgaacgaggagagcaccgtgagcgaggccggccccaaccagaccttcgaggtgcccaacaagatcatcaacagagccaaggagaccctgaagatcgacatcctgcacaagcaggccagcggcaacatcgtgtacggcgtgttcatgctgcacaagaagaccgtgaaccagaagaccaccatctacgagatccaggacgacagaggcaagatggacgtggtgggcaccggccagtgccacaacatcccctgcgaggagggcgacaagctgcagctgttctgcttcagactgagaaagaagaaccagatgagcaagctgatcagcgagatgcacagcttcatccagatcaagaagaagaccaaccccagaaacaacgaccccaagagcatgaagctgccccaggagcagagacagctgccctaccccagcgaggccagcaccaccttccccgagagccacctgagaaccccccagatgccccccaccacccccagcagcagcttcttcaccaagaagagcgaggacaccatcagcaagatgaacgacttcatgagaatgcagatcctgaaggagggcagccacttccccggccccttcatgaccagcatcggccccgccgagagccacccccacaccccccagatgccccccagcacccccagcagcagcttcctgaccaccaagagcgaggacaccatcagcaagatgaacgacttcatgagaatgcagatcctgaaggagggcagccacttccccggccccttcatgaccagcatcggccccgccgagagccacccccacaccccccagatgccccccagcacccccagcagcagcttcctgaccaccctgaagcccagactgaagaccgagcccgaggaggtgagcatcgaggacagcgcccagagcgacctgaaggaggtgatggtgctgaacgccaccgagagcttcgtgtacgagcccaaggagcagaagaagatgttccacgccaccgtggccaccgagaacgaggtgttcagagtgaaggtgttcaacatcgacctgaaggagaagttcacccccaagaagatcatcgccatcgccaactacgtgtgcagaaacggcttcctggaggtgtaccccttcaccctggtggccgacgtgaacgccgacagaaacatggagatccccaagggcctgatcagaagcgccagcgtgacccccaagatcaaccagctgtgcagccagaccaagggcagcttcgtgaacggcgtgttcgaggtgcacaagaagaacgtgagaggcgagttcacctactacgagatccaggacaacaccggcaagatggaggtggtggtgcacggcagactgaccaccatcaactgcgaggagggcgacaagctgaagctgacctgcttcgagctggcccccaagagcggcaacaccggcgagctgagaagcgtgatccacagccacatcaaggtgatcaagaccagaaagaacaagaaggacatcctgaaccccgacagcagcatggagaccagccccgacttcttcttctag

SEQ ID NO: 85492 - DNA, 543 bp, synthetic construct
  misc_feature 1..543: note = Description of Artificial Sequence: Synthetic coding sequence
  source 1..543: mol_type = other DNA
atgggcaagaagtacaagaacatcgtgctgctgaagggcctggaggtgatcaacgactaccacttcagaatggtgaagagcctgctgagcaacgacctgaagctgaacctgaagatgagagaggagtacgacaagatccagatcgccgacctgatggaggagaagttcagaggcgacgccggcctgggcaagctgatcaagatcttcgaggacatccccaccctggaggacctggccgagaccctgaagaaggagaagctgaaggtgaagggccccgccctgagcagaaagagaaagaaggaggtggacgccaccagccccgcccccagcaccagcagcaccgtgaagaccgagggcgccgaggccacccccggcgcccagaagagaaagaagagcaccaaggagaaggccggccccaagggcagcaaggtgagcgaggagcagacccagccccccagccccgccggcgccggcatgagcaccgccatgggcagaagccccagccccaagaccagcctgagcgccccccccaacagcagctag

SEQ ID NO: 85493 - DNA, 1485 bp, synthetic construct
  misc_feature 1..1485: note = Description of Artificial Sequence: Synthetic coding sequence
  source 1..1485: mol_type = other DNA
tgaagcaccgagaaccccaagaccgtggccaagtgccaggtgacccccagaagaaacgtgctgcagaagagacccgtgatcgtgaaggtgctgagcaccaccaagcccttcgagtacgagacccccgagatggagaagaagatcatgttccacgccaccgtggccacccagacccagttcttccacgtgaaggtgctgaacaccagcctgaaggagaagttcaacggcaagaagatcatcatcatcagcgactacctggagtacgacagcctgctggaggtgaacgaggagagcaccgtgagcgaggccggccccaaccagaccttcgaggtgcccaacaagatcatcaacagagccaaggagaccctgaagatcgacatcctgcacaagcaggccagcggcaacatcgtgtacggcgtgttcatgctgcacaagaagaccgtgaaccagaagaccaccatctacgagatccaggacgacagaggcaagatggacgtggtgggcaccggccagtgccacaacatcccctgcgaggagggcgacaagctgcagctgttctgcttcagactgagaaagaagaaccagatgagcaagctgatcagcgagatgcacagcttcatccagatcaagaagaagaccaaccccagaaacaacgaccccaagagcatgaagctgccccaggagcagagacagctgccctaccccagcgaggccagcaccaccttccccgagagccacctgagaaccccccagatgccccccaccacccccagcagcagcttcttcaccaagctgaagcccagactgaagaccgagcccgaggaggtgagcatcgaggacagcgcccagagcgacctgaaggaggtgatggtgctgaacgccaccgagagcttcgtgtacgagcccaaggagcagaagaagatgttccacgccaccgtggccaccgagaacgaggtgttcagagtgaaggtgttcaacatcgacctgaaggagaagttcacccccaagaagatcatcgccatcgccaactacgtgtgcagaaacggcttcctggaggtgtaccccttcaccctggtggccgacgtgaacgccgacagaaacatggagatccccaagggcctgatcagaagcgccagcgtgacccccaagatcaaccagctgtgcagccagaccaagggcagcttcgtgaacggcgtgttcgaggtgcacaagaagaacgtgagaggcgagttcacctactacgagatccaggacaacaccggcaagatggaggtggtggtgcacggcagactgaccaccatcaactgcgaggagggcgacaagctgaagctgacctgcttcgagctggcccccaagagcggcaacaccggcgagctgagaagcgtgatccacagccacatcaaggtgatcaagaccagaaagaacaagaaggacatcctgaaccccgacagcagcatggagaccagccccgacttcttcttctag

SEQ ID NO: 85494 - DNA, 753 bp, synthetic construct
  misc_feature 1..753: note = Description of Artificial Sequence: Synthetic coding sequence
  source 1..753: mol_type = other DNA
atgaccctgagccccctgctgctgttcctgccccccctgctgctgctgctggacgtgcccaccgccgccgtgcaggccagccccctgcaggccctggacttcttcggcaacggcccccccgtgaactacaagaccggcaacctgtacctgagaggccccctgaagaagagcaacgcccccctggtgaacgtgaccctgtactacgaggccctgtgcggcggctgcagagccttcctgatcagagagctgttccccacctggctgctggtgatggagatcctgaacgtgaccctggtgccctacggcaacgcccaggagcagaacgtgagcggcagatgggagttcaagtgccagcacggcgaggaggagtgcaagttcaacaaggtggaggcctgcgtgctggacgagctggacatggagctggccttcctgaccatcgtgtgcatggaggagttcgaggacatggagagaagcctgcccctgtgcctgcagctgtacgcccccggcctgagccccgacaccatcatggagtgcgccatgggcgacagaggcatgcagctgatgcacgccaacgcccagagaaccgacgccctgcagcccccccacgagtacgtgccctgggtgaccgtgaacggcaagcccctggaggaccagacccagctgctgaccctggtgtgccagctgtaccagggcaagaagcccgacgtgtgccccagcagcaccagcagcctgagaagcgtgtgcttcaagtag

SEQ ID NO: 85495 - DNA, 588 bp, synthetic construct
  misc_feature 1..588: note = Description of Artificial Sequence: Synthetic coding sequence
  source 1..588: mol_type = other DNA
atggccctgctgttccccctgctggccgccctggtgatgaccagctacagccccgtgggcagcctgggctgcgacctgccccagaaccacggcctgctgagcagaaacaccctggtgctgctgcaccagatgagaagaatcagccccttcctgtgcctgaaggacagaagagacttcagattcccccaggagatggtgaagggcagccagctgcagaaggcccacgtgatgagcgtgctgcacgagatgctgcagcagatcttcagcctgttccacaccgagagaagcagcgccgcctggaacatgaccctgctggaccagctgcacaccggcctgcaccagcagctgcagcacctggagacctgcctgctgcaggtggtgggcgagggcgagagcgccggcgccatcagcagccccgccctgaccctgagaagatacttccagggcatcagagtgtacctgaaggagaagaagtacagcgactgcgcctgggaggtggtgagaatggagatcatgaagagcctgttcctgagcaccaacatgcaggagagactgagaagcaaggacagagacctgggcagcagctag

SEQ ID NO: 85496 - DNA, 861 bp, synthetic construct
  misc_feature 1..861: note = Description of Artificial Sequence: Synthetic coding sequence
  source 1..861: mol_type = other DNA
atgagcgcccccctggacgccgccctgcacgccctgcaggaggagcaggccagactgaagatgagactgtgggacctgcagcagctgagaaaggagctgggcgacagccccaaggacaaggtgcccttcagcgtgcccaagatccccctggtgttcagaggccacacccagcaggaccccgaggtgcccaagagcctggtgagcaacctgagaatccactgccccctgctggccggcagcgccctgatcaccttcgacgaccccaaggtggccgagcaggtgctgcagcagaaggagcacaccatcaacatggaggagtgcagactgagagtgcaggtgcagcccctggagctgcccatggtgaccaccatccagatgagcagccagctgagcggcagaagagtgctggtgaccggcttccccgccagcctgagactgagcgaggaggagctgctggacaagctggagatcttcttcggcaagaccagaaacggcggcggcgacgtggacgtgagagagctgctgcccggcagcgtgatgctgggcttcgccagagacggcgtggcccagagactgtgccagatcggccagttcaccgtgcccctgggcggccagcaggtgcccctgagagtgagcccctacgtgaacggcgagatccagaaggccgagatcagaagccagcccgtgcccagaagcgtgctggtgctgaacatccccgacatcctggacggccccgagctgcacgacgtgctggagatccacttccagaagcccaccagaggcggcggcgaggtggaggccctgaccgtggtgccccagggccagcagggcctggccgtgttcaccagcgagagcggctag

SEQ ID NO: 85497 - DNA, 867 bp, synthetic construct
  misc_feature 1..867: note = Description of Artificial Sequence: Synthetic coding sequence
  source 1..867: mol_type = other DNA
atgagcgcccccctggacgccgccctgcacgccctgcaggaggagcaggccagactgaagatgagactgtgggacctgcagcagctgagaaaggagctgggcgacagccccaaggacaaggtgcccttcagcgtgcccaagatccccctggtgttcagaggccacacccagcaggaccccgaggtgcccaagagcctggtgagcaacctgagaatccactgccccctgctggccggcagcgccctgatcaccttcgacgaccccaaggtggccgagcaggtgctgcagcagaaggagcacaccatcaacatggaggagtgcagactgagagtgcaggtgcagcccctggagctgcccatggtgaccaccatccaggtgatgatgagcagccagctgagcggcagaagagtgctggtgaccggcttccccgccagcctgagactgagcgaggaggagctgctggacaagctggagatcttcttcggcaagaccagaaacggcggcggcgacgtggacgtgagagagctgctgcccggcagcgtgatgctgggcttcgccagagacggcgtggcccagagactgtgccagatcggccagttcaccgtgcccctgggcggccagcaggtgcccctgagagtgagcccctacgtgaacggcgagatccagaaggccgagatcagaagccagcccgtgcccagaagcgtgctggtgctgaacatccccgacatcctggacggccccgagctgcacgacgtgctggagatccacttccagaagcccaccagaggcggcggcgaggtggaggccctgaccgtggtgccccagggccagcagggcctggccgtgttcaccagcgagagcggctag

SEQ ID NO: 85498 - DNA, 1335 bp, synthetic construct
  misc_feature 1..1335: note = Description of Artificial Sequence: Synthetic coding sequence
  source 1..1335: mol_type = other DNA
atggccgtgaccaccagactgacctggctgcacgagaagatcctgcagaaccacttcggcggcaagagactgagcctgctgtacaagggcagcgtgcacggcttcagaaacggcgtgctgctggacagatgctgcaaccagggccccaccctgaccgtgatctacagcgaggaccacatcatcggcgcctacgccgaggagagctaccaggagggcaagtacgccagcatcatcctgttcgccctgcaggacaccaagatcagcgagtggaagctgggcctgtgcacccccgagaccctgttctgctgcgacgtgaccaagtacaacagccccaccaacttccagatcgacggcagaaacagaaaggtgatcatggacctgaagaccatggagaacctgggcctggcccagaactgcaccatcagcatccaggactacgaggtgttcagatgcgaggacagcctggacgagagaaagatcaagggcgtgatcgagctgagaaagagcctgctgagcgccctgagaacctacgagccctacggcagcctggtgcagcagatcagaatcctgctgctgggccccatcggcgccggcaagagcagcttcttcaacagcgtgagaagcgtgttccagggccacgtgacccaccaggccctggtgggcaccaacaccaccggcatcagcgagaagtacagaacctacagcatcagagacggcaaggacggcaagtacctgcccttcatcctgtgcgacagcctgggcctgagcgagaaggagggcggcctgtgcagagacgacatcttctacatcctgaacggcaacatcagagacagataccagttcaaccccatggagagcatcaagctgaaccaccacgactacatcgacagccccagcctgaaggacagaatccactgcgtggccttcgtgttcgacgccagcagcatccagtacttcagcagccagatgatcgtgaagatcaagagaatcagaagagagctggtgaacgccggcgtggtgcacgtggccctgctgacccacgtggacagcatggacctgatcaccaagggcgacctgatcgagatcgagagatgcgagcccgtgagaagcaagctggaggaggtgcagagaaagctgggcttcgccctgagcgacatcagcgtggtgagcaactacagcagcgagtgggagctggaccccgtgaaggacgtgctgatcctgagcgccctgagaagaatgctgtgggccgccgacgacttcctggaggacctgcccttcgagcagatcggcaacctgagagaggagatcatcaactgcgcccagggcaagaagtag

SEQ ID NO: 85499 - DNA, 588 bp, synthetic construct
  misc_feature 1..588: note = Description of Artificial Sequence: Synthetic coding sequence
  source 1..588: mol_type = other DNA
atggacctgaagaccatggagaacctgggcctggcccagaactgcaccatcagcatccaggactacgaggtgttcagatgcgaggacagcctggacgagagaaagatcaagggcgtgatcgagctgagaaagagcctgctgagcgccctgagaacctacgagccctacggcagcctggtgcagcagatcagaatcctgctgctgggccccatcggcgccggcaagagcagcttcttcaacagcgtgagaagcgtgttccagggccacgtgacccaccaggccctggtgggcaccaacaccaccggcatcagcgagaagtacagaacctacagcatcagagacggcaaggacggcaagtacctgcccttcatcctgtgcgacagcctgggcctgagcgagaaggagggcggcctgtgcagagacgacatcttctacatcctgaacggcaacatcagagacagataccagttcaaccccatggagagcatcaagctgaaccaccacgactacatcgacagccccagcctgaaggacagaatccactgcgtggccttcgtgttcgacgccagcagcatccagtacttctag

SEQ ID NO: 85500 - DNA, 231 bp, synthetic construct
  misc_feature 1..231: note = Description of Artificial Sequence: Synthetic coding sequence
  source 1..231: mol_type = other DNA
tgactgagcgacatcagcgtggtgagcaactacagcagcgagtgggagctggaccccgtgaaggacgtgctgatcctgagcgccctgagaagaatgctgtgggccgccgacgacttcctggaggacctgcccttcgagcagatcggcagatggttcggcggcgtggaggcctggaagagaagcggcaacctgagagaggagatcatcaactgcgcccagggcaagaagtag

SEQ ID NO: 85501 - DNA, 390 bp, synthetic construct
  misc_feature 1..390: note = Description of Artificial Sequence: Synthetic coding sequence
  source 1..390: mol_type = other DNA
atggagagcatcaagctgaaccaccacgactacatcgacagccccagcctgaaggacagaatccactgcgtggccttcgtgttcgacgccagcagcatccagtacttcagcagccagatgatcgtgaagatcaagagaatcagaagagagctggtgaacgccggcgtggtgcacgtggccctgctgacccacgtggacagcatggacctgatcaccaagggcgacctgatcgagatcgagagatgcgagcccgtgagaagcaaggtgatgaacgacgccctgagaaagcacatcttctggggcatgctgctgcagagccacaccagcgtgtacaagaacaagaacaagcagctgctgggcctgagaagaatcaccaagctgctgaagtag

SEQ ID NO: 85502 - DNA, 585 bp, synthetic construct
  misc_feature 1..585: note = Description of Artificial Sequence: Synthetic coding sequence
  source 1..585: mol_type = other DNA
atgctgtgcgacaccatgggcctggacggcgccgagggcgccggcctgtgcatggacgacatcccccacatcctgaagggctgcatgcccgacagataccagttcaacagcagaaagcccatcacccccgagcacagcaccttcatcaccagccccagcctgaaggacagaatccactgcgtggcctacgtgctggacatcaacagcatcgacaacctgtacagcaagatgctggccaaggtgaagcaggtgcacaaggaggtgctgaactgcggcatcgcctacgtggccctgctgaccaaggtggacgactgcagcgaggtgctgcaggacaacttcctgaacatgagcagaagcatgaccagccagagcagagtgatgaacgtgcacaagatgctgggcatccccatcagcaacatcctgatggtgggcaactacgccagcgacctggagctggaccccatgaaggacatcctgatcctgagcgccctgagacagatgctgagagccgccgacgacttcctggaggacctgcccctggaggagaccggcgccatcgagagagccctgcagccctgcatctag

SEQ ID NO: 85503 - DNA, 1359 bp, synthetic construct
  misc_feature 1..1359: note = Description of Artificial Sequence: Synthetic coding sequence
  source 1..1359: mol_type = other DNA
atggaggtgaccaccagactgacctggaacgacgagaaccacctgagaaagctgctgggcaacgtgagcctgagcctgctgtacaagagcagcgtgcacggcggcagcatcgaggacatggtggagagatgcagcagacagggctgcaccatcaccatggcctacatcgactacaacatgatcgtggccttcatgctgggcaactacatcaacctgcacgagagcagcaccgagcccaacgacagcctgtggttcagcctgcagaagaagaacgacaccaccgagatcgagaccctgctgctgaacaccgcccccaagatcatcgacgagcagctggtgtgcagactgagcaagaccgacatcttcatcatctgcagagacaacaagatctacctggacaagatgatcaccagaaacctgaagctgagattctacggccacagacagtacctggagtgcgaggtgttcagagtggagggcatcaaggacaacctggacgacatcaagagaatcatcaaggccagagagcacagaaacagactgctggccgacatcagagactacagaccctacgccgacctggtgagcgagatcagaatcctgctggtgggccccgtgggcagcggcaagagcagcttcttcaacagcgtgaagagcatcttccacggccacgtgaccggccaggccgtggtgggcagcgacatcaccagcatcaccgagagatacagaatctacagcgtgaaggacggcaagaacggcaagagcctgcccttcatgctgtgcgacaccatgggcctggacggcgccgagggcgccggcctgtgcatggacgacatcccccacatcctgaagggctgcatgcccgacagataccagttcaacagcagaaagcccatcacccccgagcacagcaccttcatcaccagccccagcctgaaggacagaatccactgcgtggcctacgtgctggacatcaacagcatcgacaacctgtacagcaagatgctggccaaggtgaagcaggtgcacaaggaggtgctgaactgcggcatcgcctacgtggccctgctgaccaaggtggacgactgcagcgaggtgctgcaggacaacttcctgaacatgagcagaagcatgaccagccagagcagagtgatgaacgtgcacaagatgctgggcatccccatcagcaacatcctgatggtgggcaactacgccagcgacctggagctggaccccatgaaggacatcctgatcctgagcgccctgagacagatgctgagagccgccgacgacttcctggaggacctgcccctggaggagaccggcgccatcgagagagccctgcagccctgcatctag

SEQ ID NO: 85504 - DNA, 294 bp, synthetic construct
  misc_feature 1..294: note = Description of Artificial Sequence: Synthetic coding sequence
  source 1..294: mol_type = other DNA
atggaggtgaccaccagactgacctggaacgacgagaaccacctgagaaagctgctgggcaacgtgagcctgagcctgctgtacaagagcagcgtgcacggcggcagcatcgaggacatggtggagagatgcagcagacagggctgcaccatcaccatggcctacatcgactacaacatgatcgtggccttcatgctgggcaactacatcaacctgcacgagagcagcaccgagcccaacgacagcctgtggttcagcctgcagaagaagaacgacaccaccgagatcgagtag

SEQ ID NO: 85505 - DNA, 1437 bp, synthetic construct
  misc_feature 1..1437: note = Description of Artificial Sequence: Synthetic coding sequence
  source 1..1437: mol_type = other DNA
atgagcaccaacggcgacgaccaccaggtgaaggacagcctggagcagctgagatgccacttcacctgggagctgagcatcgacgacgacgagatgcccgacctggagaacagagtgctggaccagatcgagttcctggacaccaagtacagcgtgggcatccacaacctgctggcctacgtgaagcacctgaagggccagaacgaggaggccctgaagagcctgaaggaggccgagaacctgatgcaggaggagcacgacaaccaggccaacgtgagaagcctggtgacctggggcaacttcgcctggatgtactaccacatgggcagactggccgaggcccagacctacctggacaaggtggagaacatctgcaagaagctgagcaaccccttcagatacagaatggagtgccccgagatcgactgcgaggagggctgggccctgctgaagtgcggcggcaagaactacgagagagccaaggcctgcttcgagaaggtgctggaggtggaccccgagaaccccgagagcagcgccggctacgccatcagcgcctacagactggacggcttcaagctggccaccaagaaccacaagcccttcagcctgctgcccctgagacaggccgtgagactgaaccccgacaacggctacatcaaggtgctgctggccctgaagctgcaggacgagggccaggaggccgagggcgagaagtacatcgaggaggccctggccaacatgagcagccagacctacgtgttcagatacgccgccaagttctacagaagaaagggcagcgtggacaaggccctggagctgctgaagaaggccctgcaggagacccccaccagcgtgctgctgcaccaccagatcggcctgtgctacaaggcccagatgatccagatcaaggaggccaccaagggccagcccagaggccagaacagagagaagctggacaagatgatcagaagcgccatcttccacttcgagagcgccgtggagaagaagcccaccttcgaggtggcccacctggacctggccagaatgtacatcgaggccggcaaccacagaaaggccgaggagaacttccagaagctgctgtgcatgaagcccgtggtggaggagaccatgcaggacatccacttccactacggcagattccaggagttccagaagaagagcgacgtgaacgccatcatccactacctgaaggccatcaagatcgagcaggccagcctgaccagagacaagagcatcaacagcctgaagaagctggtgctgagaaagctgagaagaaaggccctggacctggagagcctgagcctgctgggcttcgtgtacaagctggagggcaacatgaacgaggccctggagtactacgagagagccctgagactggccgccgacttcgagaacagcgtgagacagggcccctag

SEQ ID NO: 85506 - DNA, 1344 bp, synthetic construct
  misc_feature 1..1344: note = Description of Artificial Sequence: Synthetic coding sequence
  source 1..1344: mol_type = other DNA
atgcccgacctggagaacagagtgctggaccagatcgagttcctggacaccaagtacagcgtgggcatccacaacctgctggcctacgtgaagcacctgaagggccagaacgaggaggccctgaagagcctgaaggaggccgagaacctgatgcaggaggagcacgacaaccaggccaacgtgagaagcctggtgacctggggcaacttcgcctggatgtactaccacatgggcagactggccgaggcccagacctacctggacaaggtggagaacatctgcaagaagctgagcaaccccttcagatacagaatggagtgccccgagatcgactgcgaggagggctgggccctgctgaagtgcggcggcaagaactacgagagagccaaggcctgcttcgagaaggtgctggaggtggaccccgagaaccccgagagcagcgccggctacgccatcagcgcctacagactggacggcttcaagctggccaccaagaaccacaagcccttcagcctgctgcccctgagacaggccgtgagactgaaccccgacaacggctacatcaaggtgctgctggccctgaagctgcaggacgagggccaggaggccgagggcgagaagtacatcgaggaggccctggccaacatgagcagccagacctacgtgttcagatacgccgccaagttctacagaagaaagggcagcgtggacaaggccctggagctgctgaagaaggccctgcaggagacccccaccagcgtgctgctgcaccaccagatcggcctgtgctacaaggcccagatgatccagatcaaggaggccaccaagggccagcccagaggccagaacagagagaagctggacaagatgatcagaagcgccatcttccacttcgagagcgccgtggagaagaagcccaccttcgaggtggcccacctggacctggccagaatgtacatcgaggccggcaaccacagaaaggccgaggagaacttccagaagctgctgtgcatgaagcccgtggtggaggagaccatgcaggacatccacttccactacggcagattccaggagttccagaagaagagcgacgtgaacgccatcatccactacctgaaggccatcaagatcgagcaggccagcctgaccagagacaagagcatcaacagcctgaagaagctggtgctgagaaagctgagaagaaaggccctggacctggagagcctgagcctgctgggcttcgtgtacaagctggagggcaacatgaacgaggccctggagtactacgagagagccctgagactggccgccgacttcgagaacagcgtgagacagggcccctag

SEQ ID NO: 85507 - DNA, 1419 bp, synthetic construct
  misc_feature 1..1419: note = Description of Artificial Sequence: Synthetic coding sequence
  source 1..1419: mol_type = other DNA
atgagcgagaacaacaagaacagcctggagagcagcctgagacagctgaagtgccacttcacctggaacctgatggagggcgagaacagcctggacgacttcgaggacaaggtgttctacagaaccgagttccagaacagagagttcaaggccaccatgtgcaacctgctggcctacctgaagcacctgaagggccagaacgaggccgccctggagtgcctgagaaaggccgaggagctgatccagcaggagcacgccgaccaggccgagatcagaagcctggtgacctggggcaactacgcctgggtgtactaccacatgggcagactgagcgacgtgcagatctacgtggacaaggtgaagcacgtgtgcgagaagttcagcagcccctacagaatcgagagccccgagctggactgcgaggagggctggaccagactgaagtgcggcggcaaccagaacgagagagccaaggtgtgcttcgagaaggccctggagaagaagcccaagaaccccgagttcaccagcggcctggccatcgccagctacagactggacaactggccccccagccagaacgccatcgaccccctgagacaggccatcagactgaaccccgacaaccagtacctgaaggtgctgctggccctgaagctgcacaagatgagagaggagggcgaggaggagggcgagggcgagaagctggtggaggaggccctggagaaggcccccggcgtgaccgacgtgctgagaagcgccgccaagttctacagaagaaaggacgagcccgacaaggccatcgagctgctgaagaaggccctggagtacatccccaacaacgcctacctgcactgccagatcggctgctgctacagagccaaggtgttccaggtgatgaacctgagagagaacggcatgtacggcaagagaaagctgctggagctgatcggccacgccgtggcccacctgaagaaggccgacgaggccaacgacaacctgttcagagtgtgcagcatcctggccagcctgcacgccctggccgaccagtacgaggacgccgagtactacttccagaaggagttcagcaaggagctgacccccgtggccaagcagctgctgcacctgagatacggcaacttccagctgtaccagatgaagtgcgaggacaaggccatccaccacttcatcgagggcgtgaagatcaaccagaagagcagagagaaggagaagatgaaggacaagctgcagaagatcgccaagatgagactgagcaagaacggcgccgacagcgaggccctgcacgtgctggccttcctgcaggagctgaacgagaagatgcagcaggccgacgaggacagcgagagaggcctggagagcggcagcctgatccccagcgccagcagctggaacggcgagtag

SEQ ID NO: 85508 - DNA, 1356 bp, synthetic construct
  misc_feature 1..1356: note = Description of Artificial Sequence: Synthetic coding sequence
  source 1..1356: mol_type = other DNA
atgcccaagaacaagaagagaaacaccccccacagaggcagcagcgccggcggcggcggcagcggcgccgccgccgccaccgccgccaccgccggcggccagcacagaaacgtgcagcccttcagcgacgaggacgccagcatcgagaccatgagccactgcagcggctacagcgaccccagcagcttcgccgaggacggccccgaggtgctggacgaggagggcacccaggaggacctggagtacaagctgaagggcctgatcgacctgaccctggacaagagcgccaagaccagacaggccgccctggagggcatcaagaacgccctggccagcaagatgctgtacgagttcatcctggagagaagaatgaccctgaccgacagcatcgagagatgcctgaagaagggcaagagcgacgagcagagagccgccgccgccctggccagcgtgctgtgcatccagctgggccccggcatcgagagcgaggagatcctgaagaccctgggccccatcctgaagaagatcatctgcgacggcagcgccagcatgcaggccagacagacctgcgccacctgcttcggcgtgtgctgcttcatcgccaccgacgacatcaccgagctgtacagcaccctggagtgcctggagaacatcttcaccaagagctacctgaaggagaaggacaccaccgtgatctgcagcacccccaacaccgtgctgcacatcagcagcctgctggcctggaccctgctgctgaccatctgccccatcaacgaggtgaagaagaagctggagatgcacttccacaagctgcccagcctgctgagctgcgacgacgtgaacatgagaatcgccgccggcgagagcctggccctgctgttcgagctggccagaggcatcgagagcgacttcttctacgaggacatggagagcctgacccagatgctgagagccctggccaccgacggcaacaagcacagagccaaggtggacaagagaaagcagagaagcgtgttcagagacgtgctgagagccgtggaggagagagacttccccaccgagaccatcaagttcggccccgagagaatgtacatcgactgctgggtgaagaagcacacctacgacaccttcaaggaggtgctgggcagcggcatgcagtaccacctgcagagcaacgagttcctgagaaacgtgttcgagctgggcccccccgtgatgctggacgccgccaccctgaagaccatgaagatcagcagattcgagagacacctgtacaacagcgccgccttcaaggccagaaccaaggccagaagcaagtgcagagacaagagagccgacgtgggcgagttcttctag

SEQ ID NO: 85509 - DNA, 1356 bp, synthetic construct; identical to SEQ ID NO: 85508
  misc_feature 1..1356: note = Description of Artificial Sequence: Synthetic coding sequence
  source 1..1356: mol_type = other DNA

SEQ ID NO: 85510 - DNA, 57 bp, synthetic construct
  misc_feature 1..57: note = Description of Artificial Sequence: Synthetic coding sequence
  source 1..57: mol_type = other DNA
atgcccaagaacaagaagagaaacaccccccacagaggcagcagcgccggcggctag

SEQ ID NO: 85511 - DNA, 96 bp, synthetic construct
  misc_feature 1..96: note = Description of Artificial Sequence: Synthetic coding sequence
  source 1..96: mol_type = other DNA
atgcccaagaacaagaagagaaacaccccccacagaggcagcagcgccggcggcggcggcagcggcgccgccgccgccaccgccgccaccgcctag

SEQ ID NO: 85512 - DNA, 189 bp, synthetic construct
  misc_feature 1..189: note = Description of Artificial Sequence: Synthetic coding sequence
  source 1..189: mol_type = other DNA
atgcccaagaacaagaagagaaacaccccccacagaggcagcagcgccggcggcggcggcagcggcgccgccgccgccaccgccgccaccgccggcggccagcacagaaacgtgcagcccttcagcgacgaggacgccagcatcgagaccatgagccactgcagcggctacagcgaccccagcagctag

SEQ ID NO: 85513 - DNA, 1206 bp, synthetic construct
  misc_feature 1..1206: note = Description of Artificial Sequence: Synthetic coding sequence
  source 1..1206: mol_type = other DNA
atgagccactgcagcggctacagcgaccccagcagcttcgccgaggacggccccgaggtgctggacgaggagggcacccaggaggacctggagtacaagctgaagggcctgatcgacctgaccctggacaagagcgccaagaccagacaggccgccctggagggcatcaagaacgccctggccagcaagatgctgtacgagttcatcctggagagaagaatgaccctgaccgacagcatcgagagatgcctgaagaagggcaagagcgacgagcagagagccgccgccgccctggccagcgtgctgtgcatccagctgggccccggcatcgagagcgaggagatcctgaagaccctgggccccatcctgaagaagatcatctgcgacggcagcgccagcatgcaggccagacagacctgcgccacctgcttcggcgtgtgctgcttcatcgccaccgacgacatcaccgagctgtacagcaccctggagtgcctggagaacatcttcaccaagagctacctgaaggagaaggacaccaccgtgatctgcagcacccccaacaccgtgctgcacatcagcagcctgctggcctggaccctgctgctgaccatctgccccatcaacgaggtgaagaagaagctggagatgcacttccacaagctgcccagcctgctgagctgcgacgacgtgaacatgagaatcgccgccggcgagagcctggccctgctgttcgagctggccagaggcatcgagagcgacttcttctacgaggacatggagagcctgacccagatgctgagagccctggccaccgacggcaacaagcacagagccaaggtggacaagagaaagcagagaagcgtgttcagagacgtgctgagagccgtggaggagagagacttccccaccgagaccatcaagttcggccccgagagaatgtacatcgactgctgggtgaagaagcacacctacgacaccttcaaggaggtgctgggcagcggcatgcagtaccacctgcagagcaacgagttcctgagaaacgtgttcgagctgggcccccccgtgatgctggacgccgccaccctgaagaccatgaagatcagcagattcgagagacacctgtacaacagcgccgccttcaaggccagaaccaaggccagaagcaagtgcagagacaagagagccgacgtgggcgagttcttctag

SEQ ID NO: 85514 - DNA, 474 bp, synthetic construct
  misc_feature 1..474: note = Description of Artificial Sequence: Synthetic coding sequence
  source 1..474: mol_type = other DNA
atgcacttccacaagctgcccagcctgctgagctgcgacgacgtgaacatgagaatcgccgccggcgagagcctggccctgctgttcgagctggccagaggcatcgagagcgacttcttctacgaggacatggagagcctgacccagatgctgagagccctggccaccgacggcaacaagcacagagccaaggtggacaagagaaagcagagaagcgtgttcagagacgtgctgagagccgtggaggagagagacttccccaccgagaccatcaagttcggccccgagagaatgtacatcgactgctgggtgaagaagcacacctacgacaccttcaaggaggtgctgggcagcggcatgcagtaccacctgcagagcaacgagttcctgagaaacgtgttcgagctgggcccccccgtgatgctggacgccgccaccctgaagaccatgaagatcagcagattcgagagatag

SEQ ID NO: 85515 - DNA, 1827 bp, synthetic construct
  misc_feature 1..1827: note = Description of Artificial Sequence: Synthetic coding sequence
  source 1..1827: mol_type = other DNA
atgggccccaagaagagctggagaagccacttcttccccctgcccgaggtgtggctgctgctgctgctgagccaggccctgagccccagccacggcccccagacccaggccggcgtgggcctggtgtggagcgtgcccctgcccagcgccctgagaagccagagctgcctgggcgcccccctgagagacgccagcgagctgaccaccgtgcacctgttccccaccagaggctggggcgccagaagagccctgtgggtgcacagcagcgccagcgccagcagcgccgccagcagaagaagactgagagcccaggccagcggcatcagcagcttcagcctggtggacggcggcgcccccagagaggacggcggcgccagaggcgtgtggctgcccagcagcggccaggtgagcgcccagagaaccggcagaagactggtgggcctggagcccacccccaccggcagcctgacccccagaccccccagacccgtgcccggcatgcccagagccagaaagggcaacaccctgagaaagggcggccagagaagaggcggcggcgccagaagcagcgcccaggccgacagcggcagcagcgacgacgaggccgccagcgaggccagaagcaccgccagcgagtgccccagcctgctgagcaccaccgccgaggacagcctgggcggcgacgtggtggacgagcagggccagcaggaggacctggaggagaagctgaaggagtacgtggactgcctgaccgacaagagcgccaagaccagacagggcgccctggagagcctgagactggccctggccagcagactgctgcccgacttcctgctggagagaagactgaccctggccgacgccctggagaagtgcctgaagaagggcaagggcgaggagcaggccctggccgccgccgtgctgggcctgctgtgcgtgcagctgggccccggccccaagggcgaggagctgttccacagcctgcagcccctgctggtgagcgtgctgagcgacagcaccgccagccccgccgccagactgcactgcgccagcgccctgggcctgggctgctacgtggccgccgccgacatccaggacctggtgagctgcctggcctgcctggagagcgtgttcagcagattctacggcctgggcggcagcagcaccagccccgtggtgcccgccagcctgcacggcctgctgagcgccgccctgcaggcctgggccctgctgctgaccatctgccccagcacccagatcagccacatcctggacagacagctgcccagactgccccagctgctgagcagcgagagcgtgaacctgagaatcgccgccggcgagaccatcgccctgctgttcgagctggccagagacctggaggaggagttcgtgtacgaggacatggaggccctgtgcagcgtgctgagaaccctggccaccgacagcaacaagtacagagccaaggccgacagaagaagacagagaagcaccttcagagccgtgctgcacagcgtggagggcggcgagtgcgaggaggagatcgtgagattcggcttcgaggtgctgtacatggacagctgggccagacacagaatctacgccgccttcaaggaggtgctgggcagcggcatgcaccaccacctgcagaacaacgagctgctgagagacatcttcggcctgggccccgtgctgctgctggacgccaccgccctgaaggcctgcaaggtgcccagattcgagaagcacctgtacaacgccgccgccttcaaggccagaaccaaggccagaagcagagtgagagacaagagagccgacatcctgtag

SEQ ID NO: 85516 - DNA, 1329 bp, synthetic construct
  misc_feature 1..1329: note = Description of Artificial Sequence: Synthetic coding sequence
  source 1..1329: mol_type = other DNA
atgcccagagccagaaagggcaacaccctgagaaagggcggccagagaagaggcggcggcgccagaagcagcgcccaggccgacagcggcagcagcgacgacgaggccgccagcgaggccagaagcaccgccagcgagtgccccagcctgctgagcaccaccgccgaggacagcctgggcggcgacgtggtggacgagcagggccagcaggaggacctggaggagaagctgaaggagtacgtggactgcctgaccgacaagagcgccaagaccagacagggcgccctggagagcctgagactggccctggccagcagactgctgcccgacttcctgctggagagaagactgaccctggccgacgccctggagaagtgcctgaagaagggcaagggcgaggagcaggccctggccgccgccgtgctgggcctgctgtgcgtgcagctgggccccggccccaagggcgaggagctgttccacagcctgcagcccctgctggtgagcgtgctgagcgacagcaccgccagccccgccgccagactgcactgcgccagcgccctgggcctgggctgctacgtggccgccgccgacatccaggacctggtgagctgcctggcctgcctggagagcgtgttcagcagattctacggcctgggcggcagcagcaccagccccgtggtgcccgccagcctgcacggcctgctgagcgccgccctgcaggcctgggccctgctgctgaccatctgccccagcacccagatcagccacatcctggacagacagctgcccagactgccccagctgctgagcagcgagagcgtgaacctgagaatcgccgccggcgagaccatcgccctgctgttcgagctggccagagacctggaggaggagttcgtgtacgaggacatggaggccctgtgcagcgtgctgagaaccctggccaccgacagcaacaagtacagagccaaggccgacagaagaagacagagaagcaccttcagagccgtgctgcacagcgtggagggcggcgagtgcgaggaggagatcgtgagattcggcttcgaggtgctgtacatggacagctgggccagacacagaatctacgccgccttcaaggaggtgctgggcagcggcatgcaccaccacctgcagaacaacgagctgctgagagacatcttcggcctgggccccgtgctgctgctggacgccaccgccctgaaggcctgcaaggtgcccagattcgagaagcacctgtacaacgccgccgccttcaaggccagaaccaaggccagaagcagagtgagagacaagagagccgacatcctgtag

SEQ ID NO: 85517 - DNA, 1521 bp, synthetic construct
  misc_feature 1..1521: note = Description of Artificial Sequence: Synthetic coding sequence
  source 1..1521: mol_type = other DNA
atggcctggaacagccccagcagaagacccgtgtggcagggcggcgcccccagagaggacggcggcgccagaggcgtgtggctgcccagcagcggccaggtgagcgcccagagaaccggcagaagactggtgggcctggagcccacccccaccggcagcctgacccccagaccccccagacccgtgcccggcatgcccagagccagaaagggcaacaccctgagaaagggcggccagagaagaggcggcggcgccagaagcagcgcccaggccgacagcggcagcagcgacgacgaggccgccagcgaggccagaagcaccgccagcgagtgccccagcctgctgagcaccaccgccgaggacagcctgggcggcgacgtggtggacgagcagggccagcaggaggacctggaggagaagctgaaggagtacgtggactgcctgaccgacaagagcgccaagaccagacagggcgccctggagagcctgagactggccctggccagcagactgctgcccgacttcctgctggagagaagactgaccctggccgacgccctggagaagtgcctgaagaagggcaagggcgaggagcaggccctggccgccgccgtgctgggcctgctgtgcgtgcagctgggccccggccccaagggcgaggagctgttccacagcctgcagcccctgctggtgagcgtgctgagcgacagcaccgccagccccgccgccagactgcactgcgccagcgccctgggcctgggctgctacgtggccgccgccgacatccaggacctggtgagctgcctggcctgcctggagagcgtgttcagcagattctacggcctgggcggcagcagcaccagccccgtggtgcccgccagcctgcacggcctgctgagcgccgccctgcaggcctgggccctgctgctgaccatctgccccagcacccagatcagccacatcctggacagacagctgcccagactgccccagctgctgagcagcgagagcgtgaacctgagaatcgccgccggcgagaccatcgccctgctgttcgagctggccagagacctggaggaggagttcgtgtacgaggacatggaggccctgtgcagcgtgctgagaaccctggccaccgacagcaacaagtacagagccaaggccgacagaagaagacagagaagcaccttcagagccgtgctgcacagcgtggagggcggcgagtgcgaggaggagatcgtgagattcggcttcgaggtgctgtacatggacagctgggccagacacagaatctacgccgccttcaaggaggtgctgggcagcggcatgcaccaccacctgcagaacaacgagctgctgagagacatcttcggcctgggccccgtgctgctgctggacgccaccgccctgaaggcctgcaaggtgcccagattcgagaagcacctgtacaacgccgccgccttcaaggccagaaccaaggccagaagcagagtgagagacaagagagccgacatcctgtag

SEQ ID NO: 85518 - DNA, 1329 bp, synthetic construct; identical to SEQ ID NO: 85516
  misc_feature 1..1329: note = Description of Artificial Sequence: Synthetic coding sequence
  source 1..1329: mol_type = other DNA

SEQ ID NO: 85519 - DNA, 1713 bp, synthetic construct
  misc_feature 1..1713: note = Description of Artificial Sequence: Synthetic coding sequence
  source 1..1713: mol_type = other DNA
atgaccctgctgtggtgcgtggtgagcctgtacttctacggcatcctgcagagcgacgccagcgagagatgcgacgactggggcctggacaccatgagacagatccaggtgttcgaggacgagcccgccagaatcaagtgccccctgttcgagcacttcctgaagttcaactacagcaccgcccacagcgccggcctgaccctgatctggtactggaccagacaggacagagacctggaggagcccatcaacttcagactgcccgagaacagaatcagcaaggagaaggacgtgctgtggttcagacccaccctgctgaacgacaccggcaactacacctgcatgctgagaaacaccacctactgcagcaaggtggccttccccctggaggtggtgcagaaggacagctgcttcaacagccccatgaagctgcccgtgcacaagctgtacatcgagtacggcatccagagaatcacctgccccaacgtggacggctacttccccagcagcgtgaagcccaccatcacctggtacatgggctgctacaagatccagaacttcaacaacgtgatccccgagggcatgaacctgagcttcctgatcgccctgatcagcaacaacggcaactacacctgcgtggtgacctaccccgagaacggcagaaccttccacctgaccagaaccctgaccgtgaaggtggtgggcagccccaagaacgccgtgccccccgtgatccacagccccaacgaccacgtggtgtacgagaaggagcccggcgaggagctgctgatcccctgcaccgtgtacttcagcttcctgatggacagcagaaacgaggtgtggtggaccatcgacggcaagaagcccgacgacatcaccatcgacgtgaccatcaacgagagcatcagccacagcagaaccgaggacgagaccagaacccagatcctgagcatcaagaaggtgaccagcgaggacctgaagagaagctacgtgtgccacgccagaagcgccaagggcgaggtggccaaggccgccaaggtgaagcagaaggtgcccgcccccagatacaccgtggagctggcctgcggcttcggcgccaccgtgctgctggtggtgatcctgatcgtggtgtaccacgtgtactggctggagatggtgctgttctacagagcccacttcggcaccgacgagaccatcctggacggcaaggagtacgacatctacgtgagctacgccagaaacgccgaggaggaggagttcgtgctgctgaccctgagaggcgtgctggagaacgagttcggctacaagctgtgcatcttcgacagagacagcctgcccggcggcatcgtgaccgacgagaccctgagcttcatccagaagagcagaagactgctggtggtgctgagccccaactacgtgctgcagggcacccaggccctgctggagctgaaggccggcctggagaacatggccagcagaggcaacatcaacgtgatcctggtgcagtacaaggccgtgaaggagaccaaggtgaaggagctgaagagagccaagaccgtgctgaccgtgatcaagtggaagggcgagaagagcaagtacccccagggcagattctggaagcagctgcaggtggccatgcccgtgaagaagagccccagaagaagcagcagcgacgagcagggcctgagctacagcagcctgaagaacgtgtag

SEQ ID NO: 85520 - DNA, 2064 bp, synthetic construct
  misc_feature 1..2064: note = Description of Artificial Sequence: Synthetic coding sequence
  source 1..2064: mol_type = other DNA
atgaccctgctgtggtgcgtggtgagcctgtacttctacggcatcctgcagagcgacgccagcgagagatgcgacgactggggcctggacaccatgagacagatccaggtgttcgaggacgagcccgccagaatcaagtgccccctgttcgagcacttcctgaagttcaactacagcaccgcccacagcgccggcctgaccctgatctggtactggaccagacaggacagagacctggaggagcccatcaacttcagactgcccgagaacagaatcagcaaggagaaggacgtgctgtggttcagacccaccctgctgaacgacaccggcaactacacctgcatgctgagaaacaccacctactgcagcaaggtggccttccccctggaggtggtgcagaaggacagctgcttcaacagccccatgaagctgcccgtgcacaagctgtacatcgagtacggcatccagagaatcacctgccccaacgtggacggctacttccccagcagcgtgaagcccaccatcacctggtacatgggctgctacaagatccagaacttcaacaacgtgatccccgagggcatgaacctgagcttcctgatcgccctgatcagcaacaacggcaactacacctgcgtggtgacctaccccgagaacggcagaaccttccacctgaccagaaccctgaccgtgaaggtggtgggcagccccaagaacgccgtgccccccgtgatccacagccccaacgaccacgtggtgtacgagaaggagcccggcgaggagctgctgatcccctgcaccgtgtacttcagcttcctgatggacagcagaaacgaggtgtggtggaccatcgacggcaagaagcccgacgacatcaccatcgacgtgaccatcaacgagagcatcagccacagcagaaccgaggacgagaccagaacccagatcctgagcatcaagaaggtgaccagcgaggacctgaagagaagctacgtgtgccacgccagaagcgccaagggcgaggtggccaaggccgccaaggtgaagcagaaggtgcccgcccccagatacaccgtggagctggcctgcggcttcggcgccaccgtgctgctggtggtgatcctgatcgtggtgtaccacgtgtactggctggagatggtgctgttctacagagcccacttcggcaccgacgagaccatcctggacggcaaggagtacgacatctacgtgagctacgccagaaacgccgaggaggaggagttcgtgctgctgaccctgagaggcgtgctggagaacgagttcggctacaagctgtgcatcttcgacagagacagcctgcccggcggcaacaccgtggaggccgtgttcgacttcatccagagaagcagaagaatgatcgtggtgctgagccccgactacgtgaccgagaagagcatcagcatgctggagttcaagctgggcgtgatgtgccagaacagcatcgccaccaagctgatcgtggtggagtacagacccctggagcacccccaccccggcatcctgcagctgaaggagagcgtgagcttcgtgagctggaagggcgagaagagcaagcacagcggcagcaagttctggaaggccctgagactggccctgcccctgagaagcctgagcgccagcagcggctggaacgagagctgcagcagccagagcgacatcagcctggaccacgtgcagagaagaagaagcagactgaaggagccccccgagctgcagagcagcgagagagccgccggcagcccccccgcccccggcaccatgagcaagcacagaggcaagagcagcgccacctgcagatgctgcgtgacctactgcgagggcgagaaccacctgagaaacaagagcagagccgagatccacaaccagccccagtgggagacccacctgtgcaagcccgtgccccaggagagcgagacccagtggatccagaacggcaccagactggagccccccgccccccagatcagcgccctggccctgcaccacttcaccgacctgagcaacaacaacgacttctacatcctgtag

SEQ ID NO: 85521 - DNA, 1713 bp, synthetic construct; identical to SEQ ID NO: 85519
  misc_feature 1..1713: note = Description of Artificial Sequence: Synthetic coding sequence
  source 1..1713: mol_type = other DNA

SEQ ID NO: 85522 - DNA, 1071 bp, synthetic construct
  misc_feature 1..1071: note = Description of Artificial Sequence: Synthetic coding sequence
  source 1..1071: mol_type = other DNA
atgaccctgctgtggtgcgtggtgagcctgtacttctacggcatcctgcagagcgacgccagcgagagatgcgacgactggggcctggacaccatgagacagatccaggtgttcgaggacgagcccgccagaatcaagtgccccctgttcgagcacttcctgaagttcaactacagcaccgcccacagcgccggcctgaccctgatctggtactggaccagacaggacagagacctggaggagcccatcaacttcagactgcccgagaacagaatcagcaaggagaaggacgtgctgtggttcagacccaccctgctgaacgacaccggcaactacacctgcatgctgagaaacaccacctactgcagcaaggtggccttccccctggaggtggtgcagaaggacagctgcttcaacagccccatgaagctgcccgtgcacaagctgtacatcgagtacggcatccagagaatcacctgccccaacgtggacggctacttccccagcagcgtgaagcccaccatcacctggtacatgggctgctacaagatccagaacttcaacaacgtgatccccgagggcatgaacctgagcttcctgatcgccctgatcagcaacaacggcaactacacctgcgtggtgacctaccccgagaacggcagaaccttccacctgaccagaaccctgaccgtgaaggtggtgggcagccccaagaacgccgtgccccccgtgatccacagccccaacgaccacgtggtgtacgagaaggagcccggcgaggagctgctgatcccctgcaccgtgtacttcagcttcctgatggacagcagaaacgaggtgtggtggaccatcgacggcaagaagcccgacgacatcaccatcgacgtgaccatcaacgagagcatcagccacagcagaaccgaggacgagaccagaacccagatcctgagcatcaagaaggtgaccagcgaggacctgaagagaagctacgtgtgccacgccagaagcgccaagggcgaggtggccaaggccgccaaggtgaagcagaagggcaacagatgcggccagtag

SEQ ID NO: 85523 - DNA, 342 bp, synthetic construct
  misc_feature 1..342: note = Description of Artificial Sequence: Synthetic coding sequence
  source 1..342: mol_type = other DNA
atgaccctgctgtggtgcgtggtgagcctgtacttctacggcatcctgcagagcgacgccagcgagagatgcgacgactggggcctggacaccatgagacagatccaggtgttcgaggacgagcccgccagaatcaagtgccccctgttcgagcacttcctgaagttcaactacagcaccgcccacagcgccggcctgaccctgatctggtactggaccagacaggacagagacctggaggagcccatcaacttcagactgcccgagaacagaatcagcaaggagaaggacgtgctgtggttcagacccaccctgctgaacgacaccggcaactacacctag

SEQ ID NO: 85524 - DNA, 1071 bp, synthetic construct; identical to SEQ ID NO: 85522
  misc_feature 1..1071: note = Description of Artificial Sequence: Synthetic coding sequence
  source 1..1071: mol_type = other DNA

SEQ ID NO: 85525 - DNA, 1713 bp, synthetic construct; identical to SEQ ID NO: 85519
  misc_feature 1..1713: note = Description of Artificial Sequence: Synthetic coding sequence
  source 1..1713: mol_type = other DNA

SEQ ID NO: 85526 - DNA, 2064 bp, synthetic construct; identical to SEQ ID NO: 85520
  misc_feature 1..2064: note = Description of Artificial Sequence: Synthetic coding sequence
  source 1..2064: mol_type = other DNA

SEQ ID NO: 85527 - DNA, 1713 bp, synthetic construct; identical to SEQ ID NO: 85519
  misc_feature 1..1713: note = Description of Artificial Sequence: Synthetic coding sequence
  source 1..1713: mol_type = other DNA

SEQ ID NO: 85528 - DNA, 438 bp, synthetic construct
  misc_feature 1..438: note = Description of Artificial Sequence: Synthetic coding sequence
  source 1..438: mol_type = other DNA
atgaccctgctgtggtgcgtggtgagcctgtacttctacggcatcctgcagagcgacgccagcgagagatgcgacgactggggcctggacaccatgagacagatccaggtgttcgaggacgagcccgccagaatcaagtgccccctgttcgagcacttcctgaagttcaactacagcaccgcccacagcgccggcctgaccctgatctggtactggaccagacaggacagagacctggaggagcccatcaacttcagactgcccgagaacagaatcagcaaggagaaggacgtgctgtggttcagacccaccctgctgaacgacaccggcaactacacctgcatgctgagaaacaccacctactgcagcaaggtggccttccccctggaggtggtgcagaaggacagctgcttcaacagccccatgaagctgccctag

SEQ ID NO: 85529 - DNA, 2091 bp, synthetic construct
  misc_feature 1..2091: note = Description of Artificial Sequence: Synthetic coding sequence
  source 1..2091: mol_type = other DNA
atgaaggcccccatcccccacctgatcctgctgtacgccaccttcacccagagcctgaaggtggtgaccaagagaggcagcgccgacggctgcaccgactggagcatcgacatcaagaagtaccaggtgctggtgggcgagcccgtgagaatcaagtgcgccctgttctacggctacatcagaaccaactacagcctggcccagagcgccggcctgagcctgatgtggtacaagagcagcggccccggcgacttcgaggagcccatcgccttcgacggcagcagaatgagcaaggaggaggacagcatctggttcagacccaccctgctgcaggacagcggcctgtacgcctgcgtgatcagaaacagcacctactgcatgaaggtgagcatcagcctgaccgtgggcgagaacgacaccggcctgtgctacaacagcaagatgaagtacttcgagaaggccgagctgagcaagagcaaggagatcagctgcagagacatcgaggacttcctgctgcccaccagagagcccgagatcctgtggtacaaggagtgcagaaccaagacctggagacccagcatcgtgttcaagagagacaccctgctgatcagagaggtgagagaggacgacatcggcaactacacctgcgagctgaagtacggcggcttcgtggtgagaagaaccaccgagctgaccgtgaccgcccccctgaccgacaagccccccaagctgctgtaccccatggagagcaagctgaccatccaggagacccagctgggcgacagcgccaacctgacctgcagagccttcttcggctacagcggcgacgtgagccccctgatctactggatgaagggcgagaagttcatcgaggacctggacgagaacagagtgtgggagagcgacatcagaatcctgaaggagcacctgggcgagcaggaggtgagcatcagcctgatcgtggacagcgtggaggagggcgacctgggcaactacagctgctacgtggagaacggcaacggcagaagacacgccagcgtgctgctgcacaagagagagctgatgtacaccgtggagctggccggcggcctgggcgccatcctgctgctgctggtgtgcctggtgaccatctacaagtgctacaagatcgagatcatgctgttctacagaaaccacttcggcgccgaggagctggacggcgacaacaaggactacgacgcctacctgagctacaccaaggtggaccccgaccagtggaaccaggagaccggcgaggaggagagattcgccctggagatcctgcccgacatgctggagaagcactacggctacaagctgttcatccccgacagagacctgatccccaccggcacctacatcgaggacgtggccagatgcgtggaccagagcaagagactgatcatcgtgatgacccccaactacgtggtgagaagaggctggagcatcttcgagctggagaccagactgagaaacatgctggtgaccggcgagatcaaggtgatcctgatcgagtgcagcgagctgagaggcatcatgaactaccaggaggtggaggccctgaagcacaccatcaagctgctgaccgtgatcaagtggcacggccccaagtgcaacaagctgaacagcaagttctggaagagactgcagtacgagatgcccttcaagagaatcgagcccatcacccacgagcaggccctggacgtgagcgagcagggccccttcggcgagctgcagaccgtgagcgccatcagcatggccgccgccaccagcaccgccctggccaccgcccaccccgacctgagaagcaccttccacaacacctaccacagccagatgagacagaagcactactacagaagctacgagtacgacgtgccccccaccggcaccctgcccctgaccagcatcggcaaccagcacacctactgcaacatccccatgaccctgatcaacggccagagaccccagaccaagagcagcagagagcagaaccccgacgaggcccacaccaacagcgccatcctgcccctgctgcccagagagaccagcatcagcagcgtgatctggtag

SEQ ID NO: 85530 - DNA, 2091 bp, synthetic construct; identical to SEQ ID NO: 85529
  misc_feature 1..2091: note = Description of Artificial Sequence: Synthetic coding sequence
  source 1..2091: mol_type = other DNA

SEQ ID NO: 85531 - DNA, 2061 bp, synthetic construct
  misc_feature 1..2061: note = Description of Artificial Sequence: Synthetic coding sequence
  source 1..2061: mol_type = other DNA
atgaagccccccttcctgctggccctggtggtgtgcagcgtggtgagcaccaacctgaagatggtgagcaagagaaacagcgtggacggctgcatcgactggagcgtggacctgaagacctacatggccctggccggcgagcccgtgagagtgaagtgcgccctgttctacagctacatcagaaccaactacagcaccgcccagagcaccggcctgagactgatgtggtacaagaacaagggcgacctggaggagcccatcatcttcagcgaggtgagaatgagcaaggaggaggacagcatctggttccacagcgccgaggcccaggacagcggcttctacacctgcgtgctgagaaacagcacctactgcatgaaggtgagcatgagcctgaccgtggccgagaacgagagcggcctgtgctacaacagcagaatcagatacctggagaagagcgaggtgaccaagagaaaggagatcagctgccccgacatggacgacttcaagaagagcgaccaggagcccgacgtggtgtggtacaaggagtgcaagcccaagatgtggagaagcatcatcatccagaagggcaacgccctgctgatccaggaggtgcaggaggaggacggcggcaactacacctgcgagctgaagtacgagggcaagctggtgagaagaaccaccgagctgaaggtgaccgccctgctgaccgacaagccccccaagcccctgttccccatggagaaccagcccagcgtgatcgacgtgcagctgggcaagcccctgaacatcccctgcaaggccttcttcggcttcagcggcgagagcggccccatgatctactggatgaagggcgagaagttcatcgaggagctggccggccacatcagagagggcgagatcagactgctgaaggagcacctgggcgagaaggaggtggagctggccctgatcttcgacagcgtggtggaggccgacctggccaactacacctgccacgtggagaacagaaacggcagaaagcacgccagcgtgctgctgagaaagaaggacctgatctacaagatcgagctggccggcggcctgggcgccatcttcctgctgctggtgctgctggtggtgatctacaagtgctacaacatcgagctgatgctgttctacagacagcacttcggcgccgacgagaccaacgacgacaacaaggagtacgacgcctacctgagctacaccaaggtggaccaggacaccctggactgcgacaaccccgaggaggagcagttcgccctggaggtgctgcccgacgtgctggagaagcactacggctacaagctgttcatccccgagagagacctgatccccagcggcacctacatggaggacctgaccagatacgtggagcagagcagaagactgatcatcgtgctgacccccgactacatcctgagaagaggctggagcatcttcgagctggagagcagactgcacaacatgctggtgagcggcgagatcaaggtgatcctgatcgagtgcaccgagctgaagggcaaggtgaactgccaggaggtggagagcctgaagagaagcatcaagctgctgagcctgatcaagtggaagggcagcaagagcagcaagctgaacagcaagttctggaagcacctggtgtacgagatgcccatcaagaagaaggagatgctgcccagatgccacgtgctggacagcgccgagcagggcctgttcggcgagctgcagcccatccccagcatcgccatgaccagcaccagcgccaccctggtgagcagccaggccgacctgcccgagttccaccccagcgacagcatgcagatcagacactgctgcagaggctacaagcacgagatccccgccaccaccctgcccgtgcccagcctgggcaaccaccacacctactgcaacctgcccctgaccctgctgaacggccagctgcccctgaacaacaccctgaaggacacccaggagttccacagaaacagcagcctgctgcccctgagcagcaaggagctgagcttcaccagcgacatctggtag

SEQ ID NO: 85532 - DNA, 2061 bp, synthetic construct; identical to SEQ ID NO: 85531
  misc_feature 1..2061: note = Description of Artificial Sequence: Synthetic coding sequence
  source 1..2061: mol_type = other DNA

SEQ ID NO: 85533 - DNA, 876 bp, synthetic construct
  misc_feature 1..876: note = Description of Artificial Sequence: Synthetic coding sequence
  source 1..876: mol_type = other DNA
atgagagacaacaaggagtacgacgcctacctgagctacaccaaggtggaccaggacaccctggactgcgacaaccccgaggaggagcagttcgccctggaggtgctgcccgacgtgctggagaagcactacggctacaagctgttcatccccgagagagacctgatccccagcggcacctacatggaggacctgaccagatacgtggagcagagcagaagactgatcatcgtgctgacccccgactacatcctgagaagaggctggagcatcttcgagctggagagcagactgcacaacatgctggtgagcggcgagatcaaggtgatcctgatcgagtgcaccgagctgaagggcaaggtgaactgccaggaggtggagagcctgaagagaagcatcaagctgctgagcctgatcaagtggaagggcagcaagagcagcaagctgaacagcaagttctggaagcacctggtgtacgagatgcccatcaagaagaaggagatgctgcccagatgccacgtgctggacagcgccgagcagggcctgttcggcgagctgcagcccatccccagcatcgccatgaccagcaccagcgccaccctggtgagcagccaggccgacctgcccgagttccaccccagcgacagcatgcagatcagacactgctgcagaggctacaagcacgagatccccgccaccaccctgcccgtgcccagcctgggcaaccaccacacctactgcaacctgcccctgaccctgctgaacggccagctgcccctgaacaacaccctgaaggacacccaggagttccacagaaacagcagcctgctgcccctgagcagcaaggagctgagcttcaccagcgacatctggtag

SEQ ID NO: 85534 - DNA, 1197 bp, synthetic construct
  misc_feature 1..1197: note = Description of Artificial Sequence: Synthetic coding sequence
  source 1..1197: mol_type = other DNA
atgctgagactgtacgtgctggtgatgggcgtgagcgccttcaccctgcagcccgccgcccacaccggcgccgccagaagctgcagattcagaggcagacactacaagagagagttcagactggagggcgagcccgtggccctgagatgcccccaggtgccctactggctgtgggccagcgtgagccccagaatcaacctgacctggcacaagaacgacagcgccagaaccgtgcccggcgaggaggagaccagaatgtgggcccaggacggcgccctgtggctgctgcccgccctgcaggaggacagcggcacctacgtgtgcaccaccagaaacgccagctactgcgacaagatgagcatcgagctgagagtgttcgagaacaccgacgccttcctgcccttcatcagctacccccagatcctgaccctgagcaccagcggcgtgctggtgtgccccgacctgagcgagttcaccagagacaagaccgacgtgaagatccagtggtacaaggacagcctgctgctggacaaggacaacgagaagttcctgagcgtgagaggcaccacccacctgctggtgcacgacgtggccctggaggacgccggctactacagatgcgtgctgaccttcgcccacgagggccagcagtacaacatcaccagaagcatcgagctgagaatcaagaagaagaaggaggagaccatccccgtgatcatcagccccctgaagaccatcagcgccagcctgggcagcagactgaccatcccctgcaaggtgttcctgggcaccggcacccccctgaccaccatgctgtggtggaccgccaacgacacccacatcgagagcgcctaccccggcggcagagtgaccgagggccccagacaggagtacagcgagaacaacgagaactacatcgaggtgcccctgatcttcgaccccgtgaccagagaggacctgcacatggacttcaagtgcgtggtgcacaacaccctgagcttccagaccctgagaaccaccgtgaaggaggccagcagcaccttcagctggggcatcgtgctggcccccctgagcctggccttcctggtgctgggcggcatctggatgcacagaagatgcaagcacagaaccggcaaggccgacggcctgaccgtgctgtggccccaccaccaggacttccagagctaccccaagtag

SEQ ID NO: 85535 - DNA, 1197 bp, synthetic construct; identical to SEQ ID NO: 85534
  misc_feature 1..1197: note = Description of Artificial Sequence: Synthetic coding sequence
  source 1..1197: mol_type = other DNA

SEQ ID NO: 85536 - DNA, 690 bp, synthetic construct
  misc_feature 1..690: note = Description of Artificial Sequence: Synthetic coding sequence
  source 1..690: mol_type = other DNA
atgctgagactgtacgtgctggtgatgggcgtgagcgccttcaccctgcagcccgccgcccacaccggcgccgccagaagctgcagattcagaggcagacactacaagagagagttcagactggagggcgagcccgtggccctgagatgcccccaggtgccctactggctgtgggccagcgtgagccccagaatcaacctgacctggcacaagaacgacagcgccagaaccgtgcccggcgaggaggagaccagaatgtgggcccaggacggcgccctgtggctgctgcccgccctgcaggaggacagcggcacctacgtgtgcaccaccagaaacgccagctactgcgacaagatgagcatcgagctgagagtgttcgagaacaccgacgccttcctgcccttcatcagctacccccagatcctgaccctgagcaccagcggcgtgctggtgtgccccgacctgagcgagttcaccagagacaagaccgacgtgaagatccagtggtacaaggacagcctgctgctggacaaggacaacgagaagttcctgagcgtgagaggcaccacccacctgctggtgcacgacgtggccctggaggacgccggctactacagatgcgtgctgaccttcgcccacgagggccagcagtacaacatcaccagaagcatcgagctgagaatcaagtag

SEQ ID NO: 85537 - DNA, 1098 bp, synthetic construct
  misc_feature 1..1098: note = Description of Artificial Sequence: Synthetic coding sequence
  source 1..1098: mol_type = other DNA
atgctgccccccctgcccagcagactgggcctgctgctgctgctgctgctgtgccccgcccacgtgggcggcctgtggtgggccgtgggcagccccctggtgatggaccccaccagcatctgcagaaaggccagaagactggccggcagacaggccgagctgtgccaggccgagcccgaggtggtggccgagctggccagaggcgccagactgggcgtgagagagtgccagttccagttcagattcagaagatggaactgcagcagccacagcaaggccttcggcagaatcctgcagcaggacatcagagagaccgccttcgtgttcgccatcaccgccgccggcgccagccacgccgtgacccaggcctgcagcatgggcgagctgctgcagtgcggctgccaggcccccagaggcagagccccccccagacccagcggcctgcccggcacccccggcccccccggccccgccggcagccccgagggcagcgccgcctgggagtggggcggctgcggcgacgacgtggacttcggcgacgagaagagcagactgttcatggacgccagacacaagagaggcagaggcgacatcagagccctggtgcagctgcacaacaacgaggccggcagactggccgtgagaagccacaccagaaccgagtgcaagtgccacggcctgagcggcagctgcgccctgagaacctgctggcagaagctgccccccttcagagaggtgggcgccagactgctggagagattccacggcgccagcagagtgatgggcaccaacgacggcaaggccctgctgcccgccgtgagaaccctgaagccccccggcagagccgacctgctgtacgccgccgacagccccgacttctgcgcccccaacagaagaaccggcagccccggcaccagaggcagagcctgcaacagcagcgcccccgacctgagcggctgcgacctgctgtgctgcggcagaggccacagacaggagagcgtgcagctggaggagaactgcctgtgcagattccactggtgctgcgtggtgcagtgccacagatgcagagtgagaaaggagctgagcctgtgcctgtag

SEQ ID NO: 85538 - DNA, 987 bp, synthetic construct
  misc_feature 1..987: note = Description of Artificial Sequence: Synthetic coding sequence
  source 1..987: mol_type = other DNA
atgggcttctggatcctggccatcctgaccatcctgatgtacagcaccgccgccaagttcagcaagcagagctggggcctggagaacgaggccctgatcgtgagatgccccagacagggcaagcccagctacaccgtggactggtactacagccagaccaacaagagcatccccacccaggagagaaacagagtgttcgccagcggccagctgctgaagttcctgcccgccgccgtggccgacagcggcatctacacctgcatcgtgagaagccccaccttcaacagaaccggctacgccaacgtgaccatctacaagaagcagagcgactgcaacgtgcccgactacctgatgtacagcaccgtgagcggcagcgagaagaacagcaagatctactgccccaccatcgacctgtacaactggaccgcccccctggagtggttcaagaactgccaggccctgcagggcagcagatacagagcccacaagagcttcctggtgatcgacaacgtgatgaccgaggacgccggcgactacacctgcaagttcatccacaacgagaacggcgccaactacagcgtgaccgccaccagaagcttcaccgtgaaggacgagcagggcttcagcctgttccccgtgatcggcgcccccgcccagaacgagatcaaggaggtggagatcggcaagaacgccaacctgacctgcagcgcctgcttcggcaagggcacccagttcctggccgccgtgctgtggcagctgaacggcaccaagatcaccgacttcggcgagcccagaatccagcaggaggagggccagaaccagagcttcagcaacggcctggcctgcctggacatggtgctgagaatcgccgacgtgaaggaggaggacctgctgctgcagtacgactgcctggccctgaacctgcacggcctgagaagacacaccgtgagactgagcagaaagaaccccagcaaggagtgcttctag

SEQ ID NO: 85539 - DNA, 780 bp, synthetic construct
  misc_feature 1..780: note = Description of Artificial Sequence: Synthetic coding sequence
  source 1..780: mol_type = other DNA
atgggcttctggatcctggccatcctgaccatcctgatgtacagcaccgccgccaagttcagcaagcagagctggggcctggagaacgaggccctgatcgtgagatgccccagacagggcaagcccagctacaccgtggactggtactacagccagaccaacaagagcatccccacccaggagagaaacagagtgttcgccagcggccagctgctgaagttcctgcccgccgccgtggccgacagcggcatctacacctgcatcgtgagaagccccaccttcaacagaaccggctacgccaacgtgaccatctacaagaagcagagcgactgcaacgtgcccgactacctgatgtacagcaccgtgagcggcagcgagaagaacagcaagatctactgccccaccatcgacctgtacaactggaccgcccccctggagtggttcaagaactgccaggccctgcagggcagcagatacagagcccacaagagcttcctggtgatcgacaacgtgatgaccgaggacgccggcgactacacctgcaagttcatccacaacgagaacggcgccaactacagcgtgaccgccaccagaagcttcaccgtgaaggtgtggtgccagagcttctgcaagctgaagaagagcctgatcttcagcaacacccactggatccagagcctgatgagaggcttcgtgatggtgtactacggcgtgcacaagtgctgcagagtggtgttcaacctgtgcctgcagtacttccagcaccaccagtggccctag

SEQ ID NO: 85540 - DNA, 636 bp, synthetic construct
  misc_feature 1..636: note = Description of Artificial Sequence: Synthetic coding sequence
  source 1..636: mol_type = other DNA
atgtacagcaccgtgagcggcagcgagaagaacagcaagatctactgccccaccatcgacctgtacaactggaccgcccccctggagtggttcaagaactgccaggccctgcagggcagcagatacagagcccacaagagcttcctggtgatcgacaacgtgatgaccgaggacgccggcgactacacctgcaagttcatccacaacgagaacggcgccaactacagcgtgaccgccaccagaagcttcaccgtgaaggacgagcagggcttcagcctgttccccgtgatcggcgcccccgcccagaacgagatcaaggaggtggagatcggcaagaacgccaacctgacctgcagcgcctgcttcggcaagggcacccagttcctggccgccgtgctgtggcagctgaacggcaccaagatcaccgacttcggcgagcccagaatccagcaggaggagggccagaaccagagcttcagcaacggcctggcctgcctggacatggtgctgagaatcgccgacgtgaaggaggaggacctgctgctgcagtacgactgcctggccctgaacctgcacggcctgagaagacacaccgtgagactgagcagaaagaaccccagcaaggagtgcttctag

SEQ ID NO: 85541 - DNA, 945 bp, synthetic construct
  misc_feature 1..945: note = Description of Artificial Sequence: Synthetic coding sequence
  source 1..945: mol_type = other DNA
atgggcttctggatcctggccatcctgaccatcctgatgtacagcaccgccgccaagttcagcaagcagagctggggcctggagaacgaggccctgatcgtgagatgccccagacagggcaagcccagctacaccgtggactggtactacagccagaccaacaagagcatccccacccaggagagaaacagagtgttcgccagcggccagctgctgaagttcctgcccgccgccgtggccgacagcggcatctacacctgcatcgtgagaagccccaccttcaacagaaccggctacgccaacgtgaccatctacaagaagcagagcgactgcaacgtgcccgactacctgatgtacagcaccgtgagcggcagcgagaagaacagcaagatctactgccccaccatcgacctgtacaactggaccgcccccctggagtggttcaagaactgccaggccctgcagggcagcagatacagagcccacaagagcttcctggtgatcgacaacgtgatgaccgaggacgccggcgactacacctgcaagttcatccacaacgagaacggcgccaactacagcgtgaccgccaccagaagcttcaccgtgaaggacgagcagggcttcagcctgttccccgtgatcggcgcccccgcccagaacgagatcaaggaggtggagatcggcacccagttcctggccgccgtgctgtggcagctgaacggcaccaagatcaccgacttcggcgagcccagaatccagcaggaggagggccagaaccagagcttcagcaacggcctggcctgcctggacatggtgctgagaatcgccgacgtgaaggaggaggacctgctgctgcagtacgactgcctggccctgaacctgcacggcctgagaagacacaccgtgagactgagcagaaagaaccccagcaaggagtgcttctag

SEQ ID NO: 85542 - DNA, 117 bp, synthetic construct
  misc_feature 1..117: note = Description of Artificial Sequence: Synthetic coding sequence
  source 1..117: mol_type = other DNA
atgggcttctggatcctggccatcctgaccatcctgatgtacagcaccgccgccaagttcagcaagcagagctggggcctggagaacgaggccctgatcgtgagatgccccagatag

SEQ ID NO: 85543 - DNA, 1728 bp, synthetic construct
  misc_feature 1..1728: note = Description of Artificial Sequence: Synthetic coding sequence
  source 1..1728: mol_type = other DNA
atgtggagcctgctgctgtgcggcctgagcatcgccctgcccctgagcgtgaccgccgacggctgcaaggacatcttcatgaagaacgagatcctgagcgccagccagcccttcgccttcaactgcaccttcccccccatcaccagcggcgaggtgagcgtgacctggtacaagaacagcagcaagatccccgtgagcaagatcatccagagcagaatccaccaggacgagacctggatcctgttcctgcccatggagtggggcgacagcggcgtgtaccagtgcgtgatcaagggcagagacagctgccacagaatccacgtgaacctgaccgtgttcgagaagcactggtgcgacaccagcatcggcggcctgcccaacctgagcgacgagtacaagcagatcctgcacctgggcaaggacgacagcctgacctgccacctgcacttccccaagagctgcgtgctgggccccatcaagtggtacaaggactgcaacgagatcaagggcgagagattcaccgtgctggagaccagactgctggtgagcaacgtgagcgccgaggacagaggcaactacgcctgccaggccatcctgacccacagcggcaagcagtacgaggtgctgaacggcatcaccgtgagcatcaccgagagagccggctacggcggcagcgtgcccaagatcatctaccccaagaaccacagcatcgaggtgcagctgggcaccaccctgatcgtggactgcaacgtgaccgacaccaaggacaacaccaacctgagatgctggagagtgaacaacaccctggtggacgactactacgacgagagcaagagaatcagagagggcgtggagacccacgtgagcttcagagagcacaacctgtacaccgtgaacatcaccttcctggaggtgaagatggaggactacggcctgcccttcatgtgccacgccggcgtgagcaccgcctacatcatcctgcagctgcccgcccccgacttcagagcctacctgatcggcggcctgatcgccctggtggccgtggccgtgagcgtggtgtacatctacaacatcttcaagatcgacatcgtgctgtggtacagaagcgccttccacagcaccgagaccatcgtggacggcaagctgtacgacgcctacgtgctgtaccccaagccccacaaggagagccagagacacgccgtggacgccctggtgctgaacatcctgcccgaggtgctggagagacagtgcggctacaagctgttcatcttcggcagagacgagttccccggccaggccgtggccaacgtgatcgacgagaacgtgaagctgtgcagaagactgatcgtgatcgtggtgcccgagagcctgggcttcggcctgctgaagaacctgagcgaggagcagatcgccgtgtacagcgccctgatccaggacggcatgaaggtgatcctgatcgagctggagaagatcgaggactacaccgtgatgcccgagagcatccagtacatcaagcagaagcacggcgccatcagatggcacggcgacttcaccgagcagagccagtgcatgaagaccaagttctggaagaccgtgagataccacatgccccccagaagatgcagacccttcccccccgtgcagctgctgcagcacaccccctgctacagaaccgccggccccgagctgggcagcagaagaaagaagtgcaccctgaccaccggctag

SEQ ID NO: 85544 - DNA, 519 bp, synthetic construct
  misc_feature 1..519: note = Description of Artificial Sequence: Synthetic coding sequence
  source 1..519: mol_type = other DNA
atgtggagcctgctgctgtgcggcctgagcatcgccctgcccctgagcgtgaccgccgacggctgcaaggacatcttcatgaagaacgagatcctgagcgccagccagcccttcgccttcaactgcaccttcccccccatcaccagcggcgaggtgagcgtgacctggtacaagaacagcagcaagatccccgtgagcaagatcatccagagcagaatccaccaggacgagacctggatcctgttcctgcccatggagtggggcgacagcggcgtgtaccagtgcgtgatcaagggcagagacagctgccacagaatccacgtgaacctgaccgtgttcgagaagcactggtgcgacaccagcatcggcggcctgcccaacctgagcgacgagtacaagcagatcctgcacctgggcaaggacgacagcctgacctgccacctgcacttccccaagagctgcgtgctgggccccatcaagtggtacaaggactgcaacgagatcaagggcgagagatag

SEQ ID NO: 85545 - DNA, 1374 bp, synthetic construct
  misc_feature 1..1374: note = Description of Artificial Sequence: Synthetic coding sequence
  source 1..1374: mol_type = other DNA
atgaccggcctggtgagcctgagctacttccccctgagcaccagaagctgcgccctgcagagctgcagccccgtgtggggctgcggcccctgctgcagcgccggctgccccagccccttccactgcctgagccagcaggactgcaacgagatcaagggcgagagattcaccgtgctggagaccagactgctggtgagcaacgtgagcgccgaggacagaggcaactacgcctgccaggccatcctgacccacagcggcaagcagtacgaggtgctgaacggcatcaccgtgagcatcaagagagccggctacggcggcagcgtgcccaagatcatctaccccaagaaccacagcatcgaggtgcagctgggcaccaccctgatcgtggactgcaacgtgaccgacaccaaggacaacaccaacctgagatgctggagagtgaacaacaccctggtggacgactactacgacgagagcaagagaatcagagagggcgtggagacccacgtgagcttcagagagcacaacctgtacaccgtgaacatcaccttcctggaggtgaagatggaggactacggcctgcccttcatgtgccacgccggcgtgagcaccgcctacatcatcctgcagctgcccgcccccgacttcagagcctacctgatcggcggcctgatcgccctggtggccgtggccgtgagcgtggtgtacatctacaacatcttcaagatcgacatcgtgctgtggtacagaagcgccttccacagcaccgagaccatcgtggacggcaagctgtacgacgcctacgtgctgtaccccaagccccacaaggagagccagagacacgccgtggacgccctggtgctgaacatcctgcccgaggtgctggagagacagtgcggctacaagctgttcatcttcggcagagacgagttccccggccaggccgtggccaacgtgatcgacgagaacgtgaagctgtgcagaagactgatcgtgatcgtggtgcccgagagcctgggcttcggcctgctgaagaacctgagcgaggagcagatcgccgtgtacagcgccctgatccaggacggcatgaaggtgatcctgatcgagctggagaagatcgaggactacaccgtgatgcccgagagcatccagtacatcaagcagaagcacggcgccatcagatggcacggcgacttcaccgagcagagccagtgcatgaagaccaagttctggaagaccgtgagataccacatgccccccagaagatgcagacccttcccccccgtgcagctgctgcagcacaccccctgctacagaaccgccggccccgagctgggcagcagaagaaagaagtgcaccctgaccaccggctag

SEQ ID NO: 85546 - DNA, 1728 bp, synthetic construct; identical to SEQ ID NO: 85543
  misc_feature 1..1728: note = Description of Artificial Sequence: Synthetic coding sequence
  source 1..1728: mol_type = other DNA

SEQ ID NO: 85547 - DNA, 300 bp, synthetic construct
  misc_feature 1..300: note = Description of Artificial Sequence: Synthetic coding sequence
  source 1..300: mol_type = other DNA
atgcagcccagagtgctgctggtggtggccctgctggccctgctggccagcgccagagccagcgaggccgaggacgccagcctgctgagcttcatgcagggctacatgaagcacgccaccaagaccgccaaggacgccctgagcagcgtgcaggagagccaggtggcccagcaggccagaggctgggtgaccgacggcttcagcagcctgaaggactactggagcaccgtgaaggacaagttcagcgagttctgggacctggaccccgaggtgagacccaccagcgccgtggccgcctag

SEQ ID NO: 85548 - DNA, 1500 bp, synthetic construct
  misc_feature 1..1500: note = Description of Artificial Sequence: Synthetic coding sequence
  source 1..1500: mol_type = other DNA
atgagcagaaccgagctgcccagcccccccagcgtgtggttcgaggccgagttcttccaccacatcctgcactggacccccatccccaaccagagcgagagcacctgctacgaggtggccctgctgagatacggcatcgagagctggaacagcatcagcaactgcagccagaccctgagctacgacctgaccgccgtgaccctggacctgtaccacagcaacggctacagagccagagtgagagccgtggacggcagcagacacagcaactggaccgtgaccaacaccagattcagcgtggacgaggtgaccctgaccgtgggcagcgtgaacctggagatccacaacggcttcatcctgggcaagatccagctgcccagacccaagatggcccccgccaacgacacctacgagagcatcttcagccacttcagagagtacgagatcgccatcagaaaggtgcccggcaacttcaccttcacccacaagaaggtgaagcacgagaacttcagcctgctgaccagcggcgaggtgggcgagttctgcgtgcaggtgaagcccagcgtggccagcagaagcaacaagggcatgtggagcaaggaggagtgcatcagcctgaccagacagtacttcaccgtgaccaacgtgatcatcttcttcgccttcgtgctgctgctgagcggcgccctggcctactgcctggccctgcagctgtacgtgagaagaagaaagaagctgcccagcgtgctgctgttcaagaagcccagccccttcatcttcatcagccagagacccagccccgagacccaggacaccatccaccccctggacgaggaggccttcctgaaggtgagccccgagctgaagaacctggacctgcacggcagcaccgacagcggcttcggcagcaccaagcccagcctgcagaccgaggagccccagttcctgctgcccgacccccacccccaggccgacagaaccctgggcaacagagagccccccgtgctgggcgacagctgcagcagcggcagcagcaacagcaccgacagcggcatctgcctgcaggagcccagcctgagccccagcaccggccccacctgggagcagcaggtgggcagcaacagcagaggccaggacgacagcggcatcgacctggtgcagaacagcgagggcagagccggcgacacccagggcggcagcgccctgggccaccacagcccccccgagcccgaggtgcccggcgaggaggaccccgccgccgtggccttccagggctacctgagacagaccagatgcgccgaggagaaggccaccaagaccggctgcctggaggaggagagccccctgaccgacggcctgggccccaagttcggcagatgcctggtggacgaggccggcctgcacccccccgccctggccaagggctacctgaagcaggaccccctggagatgaccctggccagcagcggccccaacggcaccgtggagcccgcccactag

SEQ ID NO: 85549 - DNA, 1677 bp, synthetic construct
  misc_feature 1..1677: note = Description of Artificial Sequence: Synthetic coding sequence
  source 1..1677: mol_type = other DNA
atgagcagaaccgagctgcccagcccccccagcgtgtggttcgaggccgagttcttccaccacatcctgcactggacccccatccccaaccagagcgagagcacctgctacgaggtggccctgctgagatacggcatcgagagctggaacagcatcagcaactgcagccagaccctgagctacgacctgaccgccgtgaccctggacctgtaccacagcaacggctacagagccagagtgagagccgtggacggcagcagacacagcaactggaccgtgaccaacaccagattcagcgtggacgaggtgaccctgaccgtgggcagcgtgaacctggagatccacaacggcttcatcctgggcaagatccagctgcccagacccaagatggcccccgccaacgacacctacgagagcatcttcagccacttcagagagtacgagatcgccatcagaaaggtgcccggcaacttcaccttcacccacaagaaggtgaagcacgagaacttcagcctgctgaccagcggcgaggtgggcgagttctgcgtgcaggtgaagcccagcgtggccagcagaagcaacaagggcatgtggagcaaggaggagtgcatcagcctgaccagacagtacttcaccgtgaccaacgtgatcatcttcttcgccttcgtgctgctgctgagcggcgccctggcctactgcctggccctgcagctgtacgtgagaagaagaaagaagctgcccagcgtgctgctgttcaagaagcccagccccttcatcttcatcagccagagacccagccccgagacccaggacaccatccaccccctggacgaggaggccttcctgaaggtgagccccgagctgaagaacctggacctgcacggcagcaccgacagcggcttcggcagcaccaagcccagcctgcagaccgaggagccccagttcctgctgcccgacccccacccccaggccgacagaaccctgggcaacagagagccccccgtgctgggcgacagctgcagcagcggcagcagcaacagcaccgacagcggcatctgcctgcaggagcccagcctgagccccagcaccggccccacctgggagcagcaggtgggcagcaacagcagaggccaggacgacagcggcatcgacctggtgcagaacagcgagggcagagccggcgacacccagggcggcagcgccctgggccaccacagcccccccgagcccgaggtgcccggcgaggaggaccccgccgccgtggccttccagggctacctgagacagaccagatgcgccgaggagaaggccaccaagaccggctgcctggaggaggagagccccctgaccgacggcctgggccccaagttcggcagatgcctggtggacgaggccggcctgcacccccccgccctggccaagggctacctgaagcaggaccccctggagatgaccctggccagcagcggcgcccccaccggccagtggaaccagcccaccgaggagtggagcctgctggccctgagcagctgcagcgacctgggcatcagcgactggagcttcgcccacgacctggcccccctgggctgcgtggccgcccccggcggcctgctgggcagcttcaacagcgacctggtgaccctgcccctgatcagcagcctgcagagcagcgagtag

SEQ ID NO: 85550 - DNA, 1290 bp, synthetic construct
  misc_feature 1..1290: note = Description of Artificial Sequence: Synthetic coding sequence
  source 1..1290: mol_type = other DNA
atggcccccgccaacgacacctacgagagcatcttcagccacttcagagagtacgagatcgccatcagaaaggtgcccggcaacttcaccttcacccacaagaaggtgaagcacgagaacttcagcctgctgaccagcggcgaggtgggcgagttctgcgtgcaggtgaagcccagcgtggccagcagaagcaacaagggcatgtggagcaaggaggagtgcatcagcctgaccagacagtacttcaccgtgaccaacgtgatcatcttcttcgccttcgtgctgctgctgagcggcgccctggcctactgcctggccctgcagctgtacgtgagaagaagaaagaagctgcccagcgtgctgctgttcaagaagcccagccccttcatcttcatcagccagagacccagccccgagacccaggacaccatccaccccctggacgaggaggccttcctgaaggtgagccccgagctgaagaacctggacctgcacggcagcaccgacagcggcttcggcagcaccaagcccagcctgcagaccgaggagccccagttcctgctgcccgacccccacccccaggccgacagaaccctgggcaacagagagccccccgtgctgggcgacagctgcagcagcggcagcagcaacagcaccgacagcggcatctgcctgcaggagcccagcctgagccccagcaccggccccacctgggagcagcaggtgggcagcaacagcagaggccaggacgacagcggcatcgacctggtgcagaacagcgagggcagagccggcgacacccagggcggcagcgccctgggccaccacagcccccccgagcccgaggtgcccggcgaggaggaccccgccgccgtggccttccagggctacctgagacagaccagatgcgccgaggagaaggccaccaagaccggctgcctggaggaggagagccccctgaccgacggcctgggccccaagttcggcagatgcctggtggacgaggccggcctgcacccccccgccctggccaagggctacctgaagcaggaccccctggagatgaccctggccagcagcggcgcccccaccggccagtggaaccagcccaccgaggagtggagcctgctggccctgagcagctgcagcgacctgggcatcagcgactggagcttcgcccacgacctggcccccctgggctgcgtggccgcccccggcggcctgctgggcagcttcaacagcgacctggtgaccctgcccctgatcagcagcctgcagagcagcgagtag

SEQ ID NO: 85551 - DNA, 1269 bp, synthetic construct
  misc_feature 1..1269: note = Description of Artificial Sequence: Synthetic coding sequence
  source 1..1269: mol_type = other DNA
atgagcagcagctgcagcggcctgagcagagtgctggtggccgtggccaccgccctggtgagcgccagcagcccctgcccccaggcctggggcccccccggcgtgcagtacggccagcccggcagaagcgtgaagctgtgctgccccggcgtgaccgccggcgaccccgtgagctggttcagagacggcgagcccaagctgctgcagggccccgacagcggcctgggccacgagctggtgctggcccaggccgacagcaccgacgagggcacctacatctgccagaccctggacggcgccctgggcggcaccgtgaccctgcagctgggctacccccccgccagacccgtggtgagctgccaggccgccgactacgagaacttcagctgcacctggagccccagccagatcagcggcctgcccaccagatacctgaccagctacagaaagaagaccgtgctgggcgccgacagccagagaagaagccccagcaccggcccctggccctgcccccaggaccccctgggcgccgccagatgcgtggtgcacggcgccgagttctggagccagtacagaatcaacgtgaccgaggtgaaccccctgggcgccagcaccagactgctggacgtgagcctgcagagcatcctgagacccgaccccccccagggcctgagagtggagagcgtgcccggctaccccagaagactgagagccagctggacctaccccgccagctggccctgccagccccacttcctgctgaagttcagactgcagtacagacccgcccagcaccccgcctggagcaccgtggagcccgccggcctggaggaggtgatcaccgacgccgtggccggcctgccccacgccgtgagagtgagcgccagagacttcctggacgccggcacctggagcacctggagccccgaggcctggggcacccccagcaccggcaccatccccaaggagatccccgcctggggccagctgcacacccagcccgaggtggagccccaggtggacagccccgccccccccagacccagcctgcagccccaccccagactgctggaccacagagacagcgtggagcaggtggccgtgctggccagcctgggcatcctgagcttcctgggcctggtggccggcgccctggccctgggcctgtggctgagactgagaagaggcggcaaggacggcagccccaagcccggcttcctggccagcgtgatccccgtggacagaagacccggcgcccccaacctgtag

SEQ ID NO: 85552 - DNA, 1173 bp, synthetic construct
  misc_feature 1..1173: note = Description of Artificial Sequence: Synthetic coding sequence
  source 1..1173: mol_type = other DNA
atgagcagcagctgcagcggcctgagcagagtgctggtggccgtggccaccgccctggtgagcgccagcagcccctgcccccaggcctggggcccccccggcgtgcagtacggccagcccggcagaagcgtgaagctgtgctgccccggcgtgaccgccggcgaccccgtgagctggttcagagacggcgagcccaagctgctgcagggccccgacagcggcctgggccacgagctggtgctggcccaggccgacagcaccgacgagggcacctacatctgccagaccctggacggcgccctgggcggcaccgtgaccctgcagctgggctacccccccgccagacccgtggtgagctgccaggccgccgactacgagaacttcagctgcacctggagccccagccagatcagcggcctgcccaccagatacctgaccagctacagaaagaagaccgtgctgggcgccgacagccagagaagaagccccagcaccggcccctggccctgcccccaggaccccctgggcgccgccagatgcgtggtgcacggcgccgagttctggagccagtacagaatcaacgtgaccgaggtgaaccccctgggcgccagcaccagactgctggacgtgagcctgcagagcatcctgagacccgaccccccccagggcctgagagtggagagcgtgcccggctaccccagaagactgagagccagctggacctaccccgccagctggccctgccagccccacttcctgctgaagttcagactgcagtacagacccgcccagcaccccgcctggagcaccgtggagcccgccggcctggaggaggtgatcaccgacgccgtggccggcctgccccacgccgtgagagtgagcgccagagacttcctggacgccggcacctggagcacctggagccccgaggcctggggcacccccagcaccggcaccatccccaaggagatccccgcctggggccagctgcacacccagcccgaggtggagccccaggtggacagccccgccccccccagacccagcctgcagccccaccccagactgctggaccacagagacagcgtggagcaggtggccgtgctggccagcctgggcatcctgagcttcctgggcctggtggccggcgccctggccctgggcctgtggtag

SEQ ID NO: 85553 - DNA, 1269 bp, synthetic construct; identical to SEQ ID NO: 85551
  misc_feature 1..1269: note = Description of Artificial Sequence: Synthetic coding sequence
  source 1..1269: mol_type = other DNA

SEQ ID NO: 85554 - DNA, 1269 bp, synthetic construct; identical to SEQ ID NO: 85551
  misc_feature 1..1269: note = Description of Artificial Sequence: Synthetic coding sequence
  source 1..1269: mol_type = other DNA

SEQ ID NO: 85555 - DNA, 813 bp, synthetic construct
  misc_feature 1..813: note = Description of Artificial Sequence: Synthetic coding sequence
  source 1..813: mol_type = other DNA
atgagcagcagctgcagcggcctgagcagagtgctggtggccgtggccaccgccctggtgagcgccagcagcccctgcccccaggcctggggcccccccggcgtgcagtacggccagcccggcagaagcgtgaagctgtgctgccccggcgtgaccgccggcgaccccgtgagctggttcagagacggcgagcccaagctgctgcagggccccgacagcggcctgggccacgagctggtgctggcccaggccgacagcaccgacgagggcacctacatctgccagaccctggacggcgccctgggcggcaccgtgaccctgcagctgggctacccccccgccagacccgtggtgagctgccaggccgccgactacgagaacttcagctgcacctggagccccagccagatcagcggcctgcccaccagatacctgaccagctacagaaagaagaccgtgctgggcgccgacagccagagaagaagccccagcaccggcccctggccctgcccccaggaccccctgggcgccgccagatgcgtggtgcacggcgccgagttctggagccagtacagaatcaacgtgaccgaggtgaaccccctgggcgccagcaccagactgctggacgtgagcctgcagagcatcctgagacccgaccccccccagggcctgagagtggagagcgtgcccggctaccccagaagactgagagccagctggacctaccccgccagctggccctgccagccccacttcctgctgaagttcagactgcagtacagacccgcccagcaccccgcctggagcacctag

SEQ ID NO: 85556 - DNA, 504 bp, synthetic construct
  misc_feature 1..504: note = Description of Artificial Sequence: Synthetic coding sequence
  source 1..504: mol_type = other DNA
atgagcagcagctgcagcggcctgagcagagtgctggtggccgtggccaccgccctggtgagcgccagcagcccctgcccccaggcctggggcccccccggcgtgcagtacggccagcccggcagaagcgtgaagctgtgctgccccggcgtgaccgccggcgaccccgtgagctggttcagagacggcgagcccaagctgctgcagggccccgacagcggcctgggccacgagctggtgctggcccaggccgacagcaccgacgagggcacctacatctgccagaccctggacggcgccctgggcggcaccgtgaccctgcagctgggctacccccccgccagacccgtggtgagctgccaggccgccgactacgagaacttcagctgcacctggagccccagccagatcagcggcctgcccaccagatacctgaccagctacagaaagaagaccgtgctgggcgccgacagccagagaagaagccccagcaccggcccctag

SEQ ID NO: 85557 - DNA, 420 bp, synthetic construct
  misc_feature 1..420: note = Description of Artificial Sequence: Synthetic coding sequence
  source 1..420: mol_type = other DNA
atgagcagcagctgcagcggcctgagcagagtgctggtggccgtggccaccgccctggtgagcgccagcagcccctgcccccaggcctggggcccccccggcgtgcagtacggccagcccggcagaagcgtgaagctgtgctgccccggcgtgaccgccggcgaccccgtgagctggttcagagacggcgagcccaagctgctgcagggccccgacagcggcctgggccacgagctggtgctggcccaggccgacagcaccgacgagggcacctacatctgccagaccctggacggcgccctgggcggcaccgtgaccctgcagctgggctacccccccgccagacccgtggtgagctgccaggccgccgactacgagaacttcagctgcacctggagccccagccagatcagcggctag

SEQ ID NO: 85558 - DNA, 1989 bp, synthetic construct
  misc_feature 1..1989: note = Description of Artificial Sequence: Synthetic coding sequence
  source 1..1989: mol_type = other DNA
atggagcccctggtgacctgggtggtgcccctgctgttcctgttcctgctgagcagacagggcgccgcctgcagaaccagcgagtgctgcttccaggaccccccctaccccgacgccgacagcggcagcgccagcggccccagagacctgagatgctacagaatcagcagcgacagatacgagtgcagctggcagtacgagggccccaccgccggcgtgagccacttcctgagatgctgcctgagcagcggcagatgctgctacttcgccgccggcagcgccaccagactgcagttcagcgaccaggccggcgtgagcgtgctgtacaccgtgaccctgtgggtggagagctgggccagaaaccagaccgagaagagccccgaggtgaccctgcagctgtacaacagcgtgaagtacgagccccccctgggcgacatcaaggtgagcaagctggccggccagctgagaatggagtgggagacccccgacaaccaggtgggcgccgaggtgcagttcagacacagaacccccagcagcccctggaagctgggcgactgcggcccccaggacgacgacaccgagagctgcctgtgccccctggagatgaacgtggcccaggagttccagctgagaagaagacagctgggcagccagggcagcagctggagcaagtggagcagccccgtgtgcgtgccccccgagaaccccccccagccccaggtgagattcagcgtggagcagctgggccaggacggcagaagaagactgaccctgaaggagcagcccacccagctggagctgcccgagggctgccagggcctggcccccggcaccgaggtgacctacagactgcagctgcacatgctgagctgcccctgcaaggccaaggccaccagaaccctgcacctgggcaagatgccctacctgagcggcgccgcctacaacgtggccgtgatcagcagcaaccagttcggccccggcctgaaccagacctggcacatccccgccgacacccacaccgagcccgtggccctgaacatcagcgtgggcaccaacggcaccaccatgtactggcccgccagagcccagagcatgacctactgcatcgagtggcagcccgtgggccaggacggcggcctggccacctgcagcctgaccgccccccaggaccccgaccccgccggcatggccacctacagctggagcagagagagcggcgccatgggccaggagaagtgctactacatcaccatcttcgccagcgcccaccccgagaagctgaccctgtggagcaccgtgctgagcacctaccacttcggcggcaacgccagcgccgccggcaccccccaccacgtgagcgtgaagaaccacagcctggacagcgtgagcgtggactgggcccccagcctgctgagcacctgccccggcgtgctgaaggagtacgtggtgagatgcagagacgaggacagcaagcaggtgagcgagcaccccgtgcagcccaccgagacccaggtgaccctgagcggcctgagagccggcgtggcctacaccgtgcaggtgagagccgacaccgcctggctgagaggcgtgtggagccagccccagagattcagcatcgaggtgcaggtgagcgactggctgatcttcttcgccagcctgggcagcttcctgagcatcctgctggtgggcgtgctgggctacctgggcctgaacagagccgccagacacctgtgcccccccctgcccaccccctgcgccagcagcgccatcgagttccccggcggcaaggagacctggcagtggatcaaccccgtggacttccaggaggaggccagcctgcaggaggccctggtggtggagatgagctgggacaagggcgagagaaccgagcccctggagaagaccgagctgcccgagggcgcccccgagctggccctggacaccgagctgagcctggaggacggcgacagatgcaaggccaagatgtag

SEQ ID NO: 85559 - DNA, 1146 bp, synthetic construct
  misc_feature 1..1146: note = Description of Artificial Sequence: Synthetic coding sequence
  source 1..1146: mol_type = other DNA
atggagcccctggtgacctgggtggtgcccctgctgttcctgttcctgctgagcagacagggcgccgcctgcagaaccagcgagtgctgcttccaggaccccccctaccccgacgccgacagcggcagcgccagcggccccagagacctgagatgctacagaatcagcagcgacagatacgagtgcagctggcagtacgagggccccaccgccggcgtgagccacttcctgagatgctgcctgagcagcggcagatgctgctacttcgccgccggcagcgccaccagactgcagttcagcgaccaggccggcgtgagcgtgctgtacaccgtgaccctgtgggtggagagctgggccagaaaccagaccgagaagagccccgaggtgaccctgcagctgtacaacagcgtgaagtacgagccccccctgggcgacatcaaggtgagcaagctggccggccagctgagaatggagtgggagacccccgacaaccaggtgggcgccgaggtgcagttcagacacagaacccccagcagcccctggaagctgggcgactgcggcccccaggacgacgacaccgagagctgcctgtgccccctggagatgaacgtggcccaggagttccagctgagaagaagacagctgggcagccagggcagcagctggagcaagtggagcagccccgtgtgcgtgccccccgagaaccccccccagccccaggtgagattcagcgtggagcagctgggccaggacggcagaagaagactgaccctgaaggagcagcccacccagctggagctgcccgagggctgccagggcctggcccccggcaccgaggtgacctacagactgcagctgcacatgctgagctgcccctgcaaggccaaggccaccagaaccctgcacctgggcaagatgccctacctgagcggcgccgcctacaacgtggccgtgatcagcagcaaccagttcggccccggcctgaaccagacctggcacatccccgccgacacccacaccgacggcatgatcagcgcccactgcaacctgagactgcccgacagcagagacagccccgccagcgccagcagagtggccggcatcaccggcatctgccaccacaccagactgatcctgtacttctag

SEQ ID NO: 85560 - DNA, 1989 bp, synthetic construct; identical to SEQ ID NO: 85558
  misc_feature 1..1989: note = Description of Artificial Sequence: Synthetic coding sequence
  source 1..1989: mol_type = other DNA

SEQ ID NO: 85561 - DNA, 2589 bp, synthetic construct
  misc_feature 1..2589: note = Description of Artificial Sequence: Synthetic coding sequence
  source 1..2589: mol_type = other DNA
atggcccacaccttcagaggctgcagcctggccttcatgttcatcatcacctggctgctgatcaaggccaagatcgacgcctgcaagagaggcgacgtgaccgtgaagcccagccacgtgatcctgctgggcagcaccgtgaacatcacctgcagcctgaagcccagacagggctgcttccactacagcagaagaaacaagctgatcctgtacaagttcgacagaagaatcaacttccaccacggccacagcctgaacagccaggtgaccggcctgcccctgggcaccaccctgttcgtgtgcaagctggcctgcatcaacagcgacgagatccagatctgcggcgccgagatcttcgtgggcgtggcccccgagcagccccagaacctgagctgcatccagaagggcgagcagggcaccgtggcctgcacctgggagagaggcagagacacccacctgtacaccgagtacaccctgcagctgagcggccccaagaacctgacctggcagaagcagtgcaaggacatctactgcgactacctggacttcggcatcaacctgacccccgagagccccgagagcaacttcaccgccaaggtgaccgccgtgaacagcctgggcagcagcagcagcctgcccagcaccttcaccttcctggacatcgtgagacccctgcccccctgggacatcagaatcaagttccagaaggccagcgtgagcagatgcaccctgtactggagagacgagggcctggtgctgctgaacagactgagatacagacccagcaacagcagactgtggaacatggtgaacgtgaccaaggccaagggcagacacgacctgctggacctgaagcccttcaccgagtacgagttccagatcagcagcaagctgcacctgtacaagggcagctggagcgactggagcgagagcctgagagcccagacccccgaggaggagcccaccggcatgctggacgtgtggtacatgaagagacacatcgactacagcagacagcagatcagcctgttctggaagaacctgagcgtgagcgaggccagaggcaagatcctgcactaccaggtgaccctgcaggagctgaccggcggcaaggccatgacccagaacatcaccggccacaccagctggaccaccgtgatccccagaaccggcaactgggccgtggccgtgagcgccgccaacagcaagggcagcagcctgcccaccagaatcaacatcatgaacctgtgcgaggccggcctgctggcccccagacaggtgagcgccaacagcgagggcatggacaacatcctggtgacctggcagccccccagaaaggaccccagcgccgtgcaggagtacgtggtggagtggagagagctgcaccccggcggcgacacccaggtgcccctgaactggctgagaagcagaccctacaacgtgagcgccctgatcagcgagaacatcaagagctacatctgctacgagatcagagtgtacgccctgagcggcgaccagggcggctgcagcagcatcctgggcaacagcaagcacaaggcccccctgagcggcccccacatcaacgccatcaccgaggagaagggcagcatcctgatcagctggaacagcatccccgtgcaggagcagatgggctgcctgctgcactacagaatctactggaaggagagagacagcaacagccagccccagctgtgcgagatcccctacagagtgagccagaacagccaccccatcaacagcctgcagcccagagtgacctacgtgctgtggatgaccgccctgaccgccgccggcgagagcagccacggcaacgagagagagttctgcctgcagggcaaggccaactggatggccttcgtggcccccagcatctgcatcgccatcatcatggtgggcatcttcagcacccactacttccagcagaaggtgttcgtgctgctggccgccctgagaccccagtggtgcagcagagagatccccgaccccgccaacagcacctgcgccaagaagtaccccatcgccgaggagaagacccagctgcccctggacagactgctgatcgactggcccacccccgaggaccccgagcccctggtgatcagcgaggtgctgcaccaggtgacccccgtgttcagacaccccccctgcagcaactggccccagagagagaagggcatccagggccaccaggccagcgagaaggacatgatgcacagcgccagcagcccccccccccccagagccctgcaggccgagagcagacagctggtggacctgtacaaggtgctggagagcagaggcagcgaccccaagcccgagaaccccgcctgcccctggaccgtgctgcccgccggcgacctgcccacccacgacggctacctgcccagcaacatcgacgacctgcccagccacgaggcccccctggccgacagcctggaggagctggagccccagcacatcagcctgagcgtgttccccagcagcagcctgcaccccctgaccttcagctgcggcgacaagctgaccctggaccagctgaagatgagatgcgacagcctgatgctgtag

SEQ ID NO: 85562 - DNA, 1980 bp, synthetic construct
  misc_feature 1..1980: note = Description of Artificial Sequence: Synthetic coding sequence
  source 1..1980: mol_type = other DNA
atggcccacaccttcagaggctgcagcctggccttcatgttcatcatcacctggctgctgatcaaggccaagatcgacgcctgcaagagaggcgacgtgaccgtgaagcccagccacgtgatcctgctgggcagcaccgtgaacatcacctgcagcctgaagcccagacagggctgcttccactacagcagaagaaacaagctgatcctgtacaagttcgacagaagaatcaacttccaccacggccacagcctgaacagccaggtgaccggcctgcccctgggcaccaccctgttcgtgtgcaagctggcctgcatcaacagcgacgagatccagatctgcggcgccgagatcttcgtgggcgtggcccccgagcagccccagaacctgagctgcatccagaagggcgagcagggcaccgtggcctgcacctgggagagaggcagagacacccacctgtacaccgagtacaccctgcagctgagcggccccaagaacctgacctggcagaagcagtgcaaggacatctactgcgactacctggacttcggcatcaacctgacccccgagagccccgagagcaacttcaccgccaaggtgaccgccgtgaacagcctgggcagcagcagcagcctgcccagcaccttcaccttcctggacatcgtgagacccctgcccccctgggacatcagaatcaagttccagaaggccagcgtgagcagatgcaccctgtactggagagacgagggcctggtgctgctgaacagactgagatacagacccagcaacagcagactgtggaacatggtgaacgtgaccaaggccaagggcagacacgacctgctggacctgaagcccttcaccgagtacgagttccagatcagcagcaagctgcacctgtacaagggcagctggagcgactggagcgagagcctgagagcccagacccccgaggaggagcccaccggcatgctggacgtgtggtacatgaagagacacatcgactacagcagacagcagatcagcctgttctggaagaacctgagcgtgagcgaggccagaggcaagatcctgcactaccaggtgaccctgcaggagctgaccggcggcaaggccatgacccagaacatcaccggccacaccagctggaccaccgtgatccccagaaccggcaactgggccgtggccgtgagcgccgccaacagcaagggcagcagcctgcccaccagaatcaacatcatgaacctgtgcgaggccggcctgctggcccccagacaggtgagcgccaacagcgagggcatggacaacatcctggtgacctggcagccccccagaaaggaccccagcgccgtgcaggagtacgtggtggagtggagagagctgcaccccggcggcgacacccaggtgcccctgaactggctgagaagcagaccctacaacgtgagcgccctgatcagcgagaacatcaagagctacatctgctacgagatcagagtgtacgccctgagcggcgaccagggcggctgcagcagcatcctgggcaacagcaagcacaaggcccccctgagcggcccccacatcaacgccatcaccgaggagaagggcagcatcctgatcagctggaacagcatccccgtgcaggagcagatgggctgcctgctgcactacagaatctactggaaggagagagacagcaacagccagccccagctgtgcgagatcccctacagagtgagccagaacagccaccccatcaacagcctgcagcccagagtgacctacgtgctgtggatgaccgccctgaccgccgccggcgagagcagccacggcaacgagagagagttctgcctgcagggcaaggccaactggatggccttcgtggcccccagcatctgcatcgccatcatcatggtgggcatcttcagcacccactacttccagcagaagagaagacacagctgcccctggaccggcagctag

SEQ ID NO: 85563 - DNA, 693 bp, synthetic construct
  misc_feature 1..693: note = Description of Artificial Sequence: Synthetic coding sequence
  source 1..693: mol_type = other DNA
tgacagaagggcgagcagggcaccgtggcctgcacctgggagagaggcagagacacccacctgtacaccgagtacaccctgcagctgagcggccccaagaacctgacctggcagaagcagtgcaaggacatctactgcgactacctggacttcggcatcaacctgacccccgagagccccgagagcaacttcaccgccaaggtgaccgccgtgaacagcctgggcagcagcagcagcctgcccagcaccttcaccttcctggacatcgtgagacccctgcccccctgggacatcagaatcaagttccagaaggccagcgtgagcagatgcaccctgtactggagagacgagggcctggtgctgctgaacagactgagatacagacccagcaacagcagactgtggaacatggtgaacgtgaccaaggccaagggcagacacgacctgctggacctgaagcccttcaccgagtacgagttccagatcagcagcaagctgcacctgtacaagggcagctggagcgactggagcgagagcctgagagcccagacccccgaggaggagcccaccggcatgctggacgtgtggtacatgaagagacacatcgactacagcagacagcagatcagcctgttctggaaggtgagcttcaagagacagctgaagacccagggcaacaagaccgagggctag

SEQ ID NO: 85564 - DNA, 1980 bp, synthetic construct; identical to SEQ ID NO: 85562
  misc_feature 1..1980: note = Description of Artificial Sequence: Synthetic coding sequence
  source 1..1980: mol_type = other DNA

SEQ ID NO: 85565 - DNA, 2331 bp, synthetic construct
  misc_feature 1..2331: note = Description of Artificial Sequence: Synthetic coding sequence
  source 1..2331: mol_type = other DNA
atggcccacaccttcagaggctgcagcctggccttcatgttcatcatcacctggctgctgatcaaggccaagatcgacgcctgcaagagaggcgacgtgaccgtgaagcccagccacgtgatcctgctgggcagcaccgtgaacatcacctgcagcctgaagcccagacagggctgcttccactacagcagaagaaacaagctgatcctgtacaagttcgacagaagaatcaacttccaccacggccacagcctgaacagccaggtgaccggcctgcccctgggcaccaccctgttcgtgtgcaagctggcctgcatcaacagcgacgagatccagatctgcggcgccgagatcttcgtgggcgtggcccccgagcagccccagaacctgagctgcatccagaagggcgagcagggcaccgtggcctgcacctgggagagaggcagagacacccacctgtacaccgagtacaccctgcagctgagcggccccaagaacctgacctggcagaagcagtgcaaggacatctactgcgactacctggacttcggcatcaacctgacccccgagagccccgagagcaacttcaccgccaaggtgaccgccgtgaacagcctgggcagcagcagcagcctgcccagcaccttcaccttcctggacatcgtgagacccctgcccccctgggacatcagaatcaagttccagaaggccagcgtgagcagatgcaccctgtactggagagacgagggcctggtgctgctgaacagactgagatacagacccagcaacagcagactgtggaacatggtgaacgtgaccaaggccaagggcagacacgacctgctggacctgaagcccttcaccgagtacgagttccagatcagcagcaagctgcacctgtacaagggcagctggagcgactggagcgagagcctgagagcccagacccccgaggaggagcccaccggcatgctggacgtgtggtacatgaagagacacatcgactacagcagacagcagatcagcctgttctggaagaacctgagcgtgagcgaggccagaggcaagatcctgcactaccaggtgaccctgcaggagctgaccggcggcaaggccatgacccagaacatcaccggccacaccagctggaccaccgtgatccccagaaccggcaactgggccgtggccgtgagcgccgccaacagcaagggcagcagcctgcccaccagaatcaacatcatgaacctgtgcgaggccggcctgctggcccccagacaggtgagcgccaacagcgagggcatggacaacatcctggtgacctggcagccccccagaaaggaccccagcgccgtgcaggagtacgtggtggagtggagagagctgcaccccggcggcgacacccaggtgcccctgaactggctgagaagcagaccctacaacgtgagcgccctgatcagcgagatcccctacagagtgagccagaacagccaccccatcaacagcctgcagcccagagtgacctacgtgctgtggatgaccgccctgaccgccgccggcgagagcagccacggcaacgagagagagttctgcctgcagggcaaggccaactggatggccttcgtggcccccagcatctgcatcgccatcatcatggtgggcatcttcagcacccactacttccagcagaaggtgttcgtgctgctggccgccctgagaccccagtggtgcagcagagagatccccgaccccgccaacagcacctgcgccaagaagtaccccatcgccgaggagaagacccagctgcccctggacagactgctgatcgactggcccacccccgaggaccccgagcccctggtgatcagcgaggtgctgcaccaggtgacccccgtgttcagacaccccccctgcagcaactggccccagagagagaagggcatccagggccaccaggccagcgagaaggacatgatgcacagcgccagcagcccccccccccccagagccctgcaggccgagagcagacagctggtggacctgtacaaggtgctggagagcagaggcagcgaccccaagcccgagaaccccgcctgcccctggaccgtgctgcccgccggcgacctgcccacccacgacggctacctgcccagcaacatcgacgacctgcccagccacgaggcccccctggccgacagcctggaggagctggagccccagcacatcagcctgagcgtgttccccagcagcagcctgcaccccctgaccttcagctgcggcgacaagctgaccctggaccagctgaagatgagatgcgacagcctgatgctgtag

SEQ ID NO: 85566 - DNA, 681 bp, synthetic construct
  misc_feature 1..681: note = Description of Artificial Sequence: Synthetic coding sequence
  source 1..681: mol_type = other DNA
atgagcagccccaccgccagcagcaccacccccagatgcggcaccagcgccggccccgccagccccacctggagatgcagagccaccgccctgcacctgcaccaccccgtggaccagctgccccaccaggtgctgcagcccaccaccggccagagacagcccggcaccggcctgccctggcacagcacccccgcccagctggccctggccggcctgagacaggcccagccccacccccagcagcagagactgcaccagcccggcctgagaggcgtggacgcccacggcagcgccgcccacgtgccccaggccgtgccccaggccgtgagagcccacccccccggccagctgctgagctgggccgccgccgtgtgcctgctgtgccagcaccacctgcagctgcccggcaagaagagaaacagcaccctgtacatcaccatgctgctgatcgtgcccgtgatcgtggccggcgccatcatcgtgctgctgctgtacctgaagagactgaagatcatcatcttcccccccatccccgaccccggcaagatcttcaaggagatgttcggcgaccagaacgacgacaccctgcactggaagaagtacgacatctacgagaagcagaccaaggaggagaccgacagcgtggtgctgatcgagaacctgaagaaggccagccagtag

SEQ ID NO: 85567 - DNA, 840 bp, synthetic construct
  misc_feature 1..840: note = Description of Artificial Sequence: Synthetic coding sequence
  source 1..840: mol_type = other DNA
atggagtggcccgccagactgtgcggcctgtgggccctgctgctgtgcgccggcggcggcggcggcggcggcggcgccgcccccaccgagacccagccccccgtgaccaacctgagcgtgagcgtggagaacctgtgcaccgtgatctggacctggaacccccccgagggcgccagcagcaactgcagcctgtggtacttcagccacttcggcgacaagcaggacaagaagatcgcccccgagaccagaagaagcatcgaggtgcccctgaacgagagaatctgcctgcaggtgggcagccagtgcagcaccaacgagagcgagaagcccagcatcctggtggagaagtgcatcagcccccccgagggcgaccccgagagcgccgtgaccgagctgcagtgcatctggcacaacctgagctacatgaagtgcagctggctgcccggcagaaacaccagccccgacaccaactacaccctgtactactggcacagaagcctggagaagatccaccagtgcgagaacatcttcagagagggccagtacttcggctgcagcttcgacctgaccaaggtgaaggacagcagcttcgagcagcacagcgtgcagatcatggtgaaggacaacgccggcaagatcaagcccagcttcaacatcgtgcccctgaccagcagagtgaagcccgaccccccccacatcaagaacctgagcttccacaacgacgacctgtacgtgcagtgggagaacccccagaacttcatcagcagatgcctgttctacgaggtggaggtgaacaacagccagaccgagacccacaacgtgttctacgtgagattctag

SEQ ID NO: 85568 - DNA, 1284 bp, synthetic construct
  misc_feature 1..1284: note = Description of Artificial Sequence: Synthetic coding sequence
  source 1..1284: mol_type = other DNA
atggagtggcccgccagactgtgcggcctgtgggccctgctgctgtgcgccggcggcggcggcggcggcggcggcgccgcccccaccgagacccagccccccgtgaccaacctgagcgtgagcgtggagaacctgtgcaccgtgatctggacctggaacccccccgagggcgccagcagcaactgcagcctgtggtacttcagccacttcggcgacaagcaggacaagaagatcgcccccgagaccagaagaagcatcgaggtgcccctgaacgagagaatctgcctgcaggtgggcagccagtgcagcaccaacgagagcgagaagcccagcatcctggtggagaagtgcatcagcccccccgagggcgaccccgagagcgccgtgaccgagctgcagtgcatctggcacaacctgagctacatgaagtgcagctggctgcccggcagaaacaccagccccgacaccaactacaccctgtactactggcacagaagcctggagaagatccaccagtgcgagaacatcttcagagagggccagtacttcggctgcagcttcgacctgaccaaggtgaaggacagcagcttcgagcagcacagcgtgcagatcatggtgaaggacaacgccggcaagatcaagcccagcttcaacatcgtgcccctgaccagcagagtgaagcccgaccccccccacatcaagaacctgagcttccacaacgacgacctgtacgtgcagtgggagaacccccagaacttcatcagcagatgcctgttctacgaggtggaggtgaacaacagccagaccgagacccacaacgtgttctacgtgcaggaggccaagtgcgagaaccccgagttcgagagaaacgtggagaacaccagctgcttcatggtgcccggcgtgctgcccgacaccctgaacaccgtgagaatcagagtgaagaccaacaagctgtgctacgaggacgacaagctgtggagcaactggagccaggagatgagcatcggcaagaagagaaacagcaccctgtacatcaccatgctgctgatcgtgcccgtgatcgtggccggcgccatcatcgtgctgctgctgtacctgaagagactgaagatcatcatcttcccccccatccccgaccccggcaagatcttcaaggagatgttcggcgaccagaacgacgacaccctgcactggaagaagtacgacatctacgagaagcagaccaaggaggagaccgacagcgtggtgctgatcgagaacctgaagaaggccagccagtag

SEQ ID NO: 85569 - DNA, 1143 bp, synthetic construct
  misc_feature 1..1143: note = Description of Artificial Sequence: Synthetic coding sequence
  source 1..1143: mol_type = other DNA
atggccttcgtgtgcctggccatcggctgcctgtacaccttcctgatcagcaccaccttcggctgcaccagcagcagcgacaccgagatcaaggtgaaccccccccaggacttcgagatcgtggaccccggctacctgggctacctgtacctgcagtggcagccccccctgagcctggaccacttcaaggagtgcaccgtggagtacgagctgaagtacagaaacatcggcagcgagacctggaagaccatcatcaccaagaacctgcactacaaggacggcttcgacctgaacaagggcatcgaggccaagatccacaccctgctgccctggcagtgcaccaacggcagcgaggtgcagagcagctgggccgagaccacctactggatcagcccccagggcatccccgagaccaaggtgcaggacatggactgcgtgtactacaactggcagtacctgctgtgcagctggaagcccggcatcggcgtgctgctggacaccaactacaacctgttctactggtacgagggcctggaccacgccctgcagtgcgtggactacatcaaggccgacggccagaacatcggctgcagattcccctacctggaggccagcgactacaaggacttctacatctgcgtgaacggcagcagcgagaacaagcccatcagaagcagctacttcaccttccagctgcagaacatcgtgaagcccctgccccccgtgtacctgaccttcaccagagagagcagctgcgagatcaagctgaagtggagcatccccctgggccccatccccgccagatgcttcgactacgagatcgagatcagagaggacgacaccaccctggtgaccgccaccgtggagaacgagacctacaccctgaagaccaccaacgagaccagacagctgtgcttcgtggtgagaagcaaggtgaacatctactgcagcgacgacggcatctggagcgagtggagcgacaagcagtgctgggagggcgaggacctgagcaagaagaccctgctgagattctggctgcccttcggcttcatcctgatcctggtgatcttcgtgaccggcctgctgctgagaaagcccaacacctaccccaagatgatccccgagttcttctgcgacacctag

SEQ ID NO: 85570 - DNA, 1143 bp, synthetic construct; identical to SEQ ID NO: 85569
  misc_feature 1..1143: note = Description of Artificial Sequence: Synthetic coding sequence
  source 1..1143: mol_type = other DNA

SEQ ID NO: 85571 - DNA, 465 bp, synthetic construct
  misc_feature 1..465: note = Description of Artificial Sequence: Synthetic coding sequence
  source 1..465: mol_type = other DNA
atggcccccagaagagccagaggctgcagaaccctgggcctgcccgccctgctgctgctgctgctgctgagaccccccgccaccagagagcccgccgccagcagccccagcagcaacaacaccgccgccaccaccgccgccatcgtgcccggcagccagctgatgcccagcaagagccccagcaccggcaccaccgagatcagcagccacgagagcagccacggcacccccagccagaccaccgccaagaactgggagctgaccgccagcgccagccaccagccccccggcgtgtacccccagggccacagcgacaccaccgtggccatcagcaccagcaccgtgctgctgtgcggcctgagcgccgtgagcctgctggcctgctacctgaagagcagagccagcgtgtgcagctgccaccccagaagcgccggccacacctgcagcgtgggcagcgtgtgctag

SEQ ID NO: 85572 - DNA, 804 bp, synthetic construct
  misc_feature 1..804: note = Description of Artificial Sequence: Synthetic coding sequence
  source 1..804: mol_type = other DNA
atggcccccagaagagccagaggctgcagaaccctgggcctgcccgccctgctgctgctgctgctgctgagaccccccgccaccagaggcatcacctgccccccccccatgagcgtggagcacgccgacatctgggtgaagagctacagcctgtacagcagagagagatacatctgcaacagcggcttcaagagaaaggccggcaccagcagcctgaccgagtgcgtgctgaacaaggccaccaacgtggcccactggaccacccccagcctgaagtgcatcagagaccccgccctggtgcaccagagacccgccccccccagcaccgtgaccaccgccggcgtgaccccccagcccgagagcctgagccccagcggcaaggagcccgccgccagcagccccagcagcaacaacaccgccgccaccaccgccgccatcgtgcccggcagccagctgatgcccagcaagagccccagcaccggcaccaccgagatcagcagccacgagagcagccacggcacccccagccagaccaccgccaagaactgggagctgaccgccagcgccagccaccagccccccggcgtgtacccccagggccacagcgacaccaccgtggccatcagcaccagcaccgtgctgctgtgcggcctgagcgccgtgagcctgctggcctgctacctgaagagcagacagaccccccccctggccagcgtggagatggaggccatggaggccctgcccgtgacctggggcaccagcagcagagacgaggacctggagaactgcagccaccacctgtag

SEQ ID NO: 85573 - DNA, 612 bp, synthetic construct
  misc_feature 1..612: note = Description of Artificial Sequence: Synthetic coding sequence
  source 1..612: mol_type = other DNA
atgagcgtggagcacgccgacatctgggtgaagagctacagcctgtacagcagagagagatacatctgcaacagcggcttcaagagaaaggccggcaccagcagcctgaccgagtgcgtgctgaacaaggccaccaacgtggcccactggaccacccccagcctgaagtgcatcagagaccccgccctggtgcaccagagacccgccccccccagcaccgtgaccaccgccggcgtgaccccccagcccgagagcctgagccccagcggcaaggagcccgccgccagcagccccagcagcaacaacaccgccgccaccaccgccgccatcgtgcccggcagccagctgatgcccagcaagagccccagcaccggcaccaccgagatcagcagccacgagagcagccacggcacccccagccagaccaccgccaagaactgggagctgaccgccagcgccagccaccagccccccggcgtgtacccccagggccacagcgacaccaccgtggccatcagcaccagcaccgtgctgctgtgcggcctgagcgccgtgagcctgctggcctgctacctgaagagcagcggcgccgtgctgagctacagcggctag

SEQ ID NO: 85574 - DNA, 696 bp, synthetic construct
  misc_feature 1..696: note = Description of Artificial Sequence: Synthetic coding sequence
  source 1..696: mol_type = other DNA
atgagcgtggagcacgccgacatctgggtgaagagctacagcctgtacagcagagagagatacatctgcaacagcggcttcaagagaaaggccggcaccagcagcctgaccgagtgcgtgctgaacaaggccaccaacgtggcccactggaccacccccagcctgaagtgcatcagagaccccgccctggtgcaccagagacccgccccccccagcaccgtgaccaccgccggcgtgaccccccagcccgagagcctgagccccagcggcaaggagcccgccgccagcagccccagcagcaacaacaccgccgccaccaccgccgccatcgtgcccggcagccagctgatgcccagcaagagccccagcaccggcaccaccgagatcagcagccacgagagcagccacggcacccccagccagaccaccgccaagaactgggagctgaccgccagcgccagccaccagccccccggcgtgtacccccagggccacagcgacaccaccgtggccatcagcaccagcaccgtgctgctgtgcggcctgagcgccgtgagcctgctggcctgctacctgaagagcagacagaccccccccctggccagcgtggagatggaggccatggaggccctgcccgtgacctggggcaccagcagcagagacgaggacctggagaactgcagccaccacctgtag

SEQ ID NO: 85575 - DNA, 510 bp, synthetic construct
  misc_feature 1..510: note = Description of Artificial Sequence: Synthetic coding sequence
  source 1..510: mol_type = other DNA
atggcccccagaagagccagaggctgcagaaccctgggcctgcccgccctgctgctgctgctgctgctgagaccccccgccaccagagagcccgccgccagcagccccagcagcaacaacaccgccgccaccaccgccgccatcgtgcccggcagccagctgatgcccagcaagagccccagcaccggcaccaccgagatcagcagccacgagagcagccacggcacccccagccagaccaccgccaagaactgggagctgaccgccagcgccagccaccagccccccggcgtgtacccccagggccacagcgacaccaccgtggccatcagcaccagcaccgtgctgctgtgcggcctgagcgccgtgagcctgctggcctgctacctgaagagcagacagaccccccccctggccagcgtggagatggaggccatggaggccctgcccgtgacctggggcaccagcagcagagacgaggacctggagaactgcagccaccacctgtag

SEQ ID NO: 85576 - DNA, 609 bp, synthetic construct
  misc_feature 1..609: note = Description of Artificial Sequence: Synthetic coding sequence
  source 1..609: mol_type = other DNA
atggcccccagaagagccagaggctgcagaaccctgggcctgcccgccctgctgctgctgctgctgctgagaccccccgccaccagaggcgaccccgccctggtgcaccagagacccgccccccccagcaccgtgaccaccgccggcgtgaccccccagcccgagagcctgagccccagcggcaaggagcccgccgccagcagccccagcagcaacaacaccgccgccaccaccgccgccatcgtgcccggcagccagctgatgcccagcaagagccccagcaccggcaccaccgagatcagcagccacgagagcagccacggcacccccagccagaccaccgccaagaactgggagctgaccgccagcgccagccaccagccccccggcgtgtacccccagggccacagcgacaccaccgtggccatcagcaccagcaccgtgctgctgtgcggcctgagcgccgtgagcctgctggcctgctacctgaagagcagacagaccccccccctggccagcgtggagatggaggccatggaggccctgcccgtgacctggggcaccagcagcagagacgaggacctggagaactgcagccaccacctgtag

SEQ ID NO: 85577 - DNA, 759 bp, synthetic construct
  misc_feature 1..759: note = Description of Artificial Sequence: Synthetic coding sequence
  source 1..759: mol_type = other DNA
atggcccccagaagagccagaggctgcagaaccctgggcctgcccgccctgctgctgctgctgctgctgagaccccccgccaccagaggcatcacctgccccccccccatgagcgtggagcacgccgacatctgggtgaagagctacagcctgtacagcagagagagatacatctgcaacagcggcttcaagagaaaggccggcaccagcagcctgaccgagtgcgtgctgaacaaggccaccaacgtggcccactggaccacccccagcctgaagtgcatcagagaccccgccctggtgcaccagagacccgccccccccagcaccgtgaccaccgccggcgtgaccccccagcccgagagcctgagccccagcggcaaggagcccgccgccagcagccccagcagcaacaacaccgccgccaccaccgccgccatcgtgcccggcagccagctgatgcccagcaagagccccagcaccggcaccaccgagatcagcagccacgagagcagccacggcacccccagccagaccaccgccaagaactgggagctgaccgccagcgccagccaccagccccccggcgtgtacccccagggccacagcgacaccaccgtggccatcagcaccagcaccgtgctgctgtgcggcctgagcgccgtgagcctgctggcctgctacctgaagagcagagccagcgtgtgcagctgccaccccagaagcgccggccacacctgcagcgtgggcagcgtgtgctag

SEQ ID NO: 85578 - DNA, 564 bp, synthetic construct
  misc_feature 1..564: note = Description of Artificial Sequence: Synthetic coding sequence
  source 1..564: mol_type = other DNA
atggcccccagaagagccagaggctgcagaaccctgggcctgcccgccctgctgctgctgctgctgctgagaccccccgccaccagaggcgaccccgccctggtgcaccagagacccgccccccccagcaccgtgaccaccgccggcgtgaccccccagcccgagagcctgagccccagcggcaaggagcccgccgccagcagccccagcagcaacaacaccgccgccaccaccgccgccatcgtgcccggcagccagctgatgcccagcaagagccccagcaccggcaccaccgagatcagcagccacgagagcagccacggcacccccagccagaccaccgccaagaactgggagctgaccgccagcgccagccaccagccccccggcgtgtacccccagggccacagcgacaccaccgtggccatcagcaccagcaccgtgctgctgtgcggcctgagcgccgtgagcctgctggcctgctacctgaagagcagagccagcgtgtgcagctgccaccccagaagcgccggccacacctgcagcgtgggcagcgtgtgctag

SEQ ID NO: 85579 - DNA, 705 bp, synthetic construct
  misc_feature 1..705: note = Description of Artificial Sequence: Synthetic coding sequence
  source 1..705: mol_type = other DNA
atggcccccagaagagccagaggctgcagaaccctgggcctgcccgccctgctgctgctgctgctgctgagaccccccgccaccagaggcatcacctgccccccccccatgagcgtggagcacgccgacatctgggtgaagagctacagcctgtacagcagagagagatacatctgcaacagcggcttcaagagaaaggccggcaccagcagcctgaccgagtgcgtgctgaacaaggccaccaacgtggcccactggaccacccccagcctgaagtgcatcaagcccgccgccagcagccccagcagcaacaacaccgccgccaccaccgccgccatcgtgcccggcagccagctgatgcccagcaagagccccagcaccggcaccaccgagatcagcagccacgagagcagccacggcacccccagccagaccaccgccaagaactgggagctgaccgccagcgccagccaccagccccccggcgtgtacccccagggccacagcgacaccaccgtggccatcagcaccagcaccgtgctgctgtgcggcctgagcgccgtgagcctgctggcctgctacctgaagagcagacagaccccccccctggccagcgtggagatggaggccatggaggccctgcccgtgacctggggcaccagcagcagagacgaggacctggagaactgcagccaccacctgtag

SEQ ID NO: 85580 - DNA, 660 bp, synthetic construct
  misc_feature 1..660: note = Description of Artificial Sequence: Synthetic coding sequence
  source 1..660: mol_type = other DNA
atggcccccagaagagccagaggctgcagaaccctgggcctgcccgccctgctgctgctgctgctgctgagaccccccgccaccagaggcatcacctgccccccccccatgagcgtggagcacgccgacatctgggtgaagagctacagcctgtacagcagagagagatacatctgcaacagcggcttcaagagaaaggccggcaccagcagcctgaccgagtgcgtgctgaacaaggccaccaacgtggcccactggaccacccccagcctgaagtgcatcaagcccgccgccagcagccccagcagcaacaacaccgccgccaccaccgccgccatcgtgcccggcagccagctgatgcccagcaagagccccagcaccggcaccaccgagatcagcagccacgagagcagccacggcacccccagccagaccaccgccaagaactgggagctgaccgccagcgccagccaccagccccccggcgtgtacccccagggccacagcgacaccaccgtggccatcagcaccagcaccgtgctgctgtgcggcctgagcgccgtgagcctgctggcctgctacctgaagagcagagccagcgtgtgcagctgccaccccagaagcgccggccacacctgcagcgtgggcagcgtgtgctag

SEQ ID NO: 85581 - DNA, 2601 bp, synthetic construct
  misc_feature 1..2601: note = Description of Artificial Sequence: Synthetic coding sequence
  source 1..2601: mol_type = other DNA
atgggcgccgccagaagcccccccagcgccgtgcccggccccctgctgggcctgctgctgctgctgctgggcgtgctggcccccggcggcgccagcctgagactgctggaccacagagccctggtgtgcagccagcccggcctgaactgcaccgtgaagaacagcacctgcctggacgacagctggatccaccccagaaacctgacccccagcagccccaaggacctgcagatccagctgcacttcgcccacacccagcagggcgacctgttccccgtggcccacatcgagtggaccctgcagaccgacgccagcatcctgtacctggagggcgccgagctgagcgtgctgcagctgaacaccaacgagagactgtgcgtgagattcgagttcctgagcaagctgagacaccaccacagaagatggagattcaccttcagccacttcgtggtggaccccgaccaggagtacgaggtgaccgtgcaccacctgcccaagcccatccccgacggcgaccccaaccaccagagcaagaacttcctggtgcccgactgcgagcacgccagaatgaaggtgaccaccccctgcatgagcagcggcagcctgtgggaccccaacatcaccgtggagaccctggaggcccaccagctgagagtgagcttcaccctgtggaacgagagcacccactaccagatcctgctgaccagcttcccccacatggagaaccacagctgcttcgagcacatgcaccacatccccgcccccagacccgaggagttccaccagagaagcaacgtgaccctgaccctgagaaacctgaagggctgctgcagacaccaggtgcagatccagcccttcttcagcagctgcctgaacgactgcctgagacacagcgccaccgtgagctgccccgagatgcccgacacccccgagcccatccccgactacatgcccctgtgggtgtactggttcatcaccggcatcagcatcctgctggtgggcagcgtgatcctgctgatcgtgtgcatgacctggagactggccggccccggcagcgagaagtacagcgacgacaccaagtacaccgacggcctgcccgccgccgacctgatccccccccccctgaagcccagaaaggtgtggatcatctacagcgccgaccaccccctgtacgtggacgtggtgctgaagttcgcccagttcctgctgaccgcctgcggcaccgaggtggccctggacctgctggaggagcaggccatcagcgaggccggcgtgatgacctgggtgggcagacagaagcaggagatggtggagagcaacagcaagatcatcgtgctgtgcagcagaggcaccagagccaagtggcaggccctgctgggcagaggcgcccccgtgagactgagatgcgaccacggcaagcccgtgggcgacctgttcaccgccgccatgaacatgatcctgcccgacttcaagagacccgcctgcttcggcacctacgtggtgtgctacttcagcgaggtgagctgcgacggcgacgtgcccgacctgttcggcgccgcccccagataccccctgatggacagattcgaggaggtgtacttcagaatccaggacctggagatgttccagcccggcagaatgcacagagtgggcgagctgagcggcgacaactacctgagaagccccggcggcagacagctgagagccgccctggacagattcagagactggcaggtgagatgccccgactggttcgagtgcgagaacctgtacagcgccgacgaccaggacgcccccagcctggacgaggaggtgttcgaggagcccctgctgccccccggcaccggcatcgtgaagagagcccccctggtgagagagcccggcagccaggcctgcctggccatcgaccccctggtgggcgaggagggcggcgccgccgtggccaagctggagccccacctgcagcccagaggccagcccgccccccagcccctgcacaccctggtgctggccgccgaggagggcgccctggtggccgccgtggagcccggccccctggccgacggcgccgccgtgagactggccctggccggcgagggcgaggcctgccccctgctgggcagccccggcgccggcagaaacagcgtgctgttcctgcccgtggaccccgaggacagccccctgggcagcagcacccccatggccagccccgacctgctgcccgaggacgtgagagagcacctggagggcctgatgctgagcctgttcgagcagagcctgagctgccaggcccagggcggctgcagcagacccgccatggtgctgaccgacccccacaccccctacgaggaggagcagagacagagcgtgcagagcgaccagggctacatcagcagaagcagcccccagccccccgagggcctgaccgagatggaggaggaggaggaggaggagcaggaccccggcaagcccgccctgcccctgagccccgaggacctggagagcctgagaagcctgcagagacagctgctgttcagacagctgcagaagaacagcggctgggacaccatgggcagcgagagcgagggccccagcgcctag

SEQ ID NO: 85582 - DNA, 2445 bp, synthetic construct
  misc_feature 1..2445: note = Description of Artificial Sequence: Synthetic coding sequence
  source 1..2445: mol_type = other DNA
atgggcgccgccagaagcccccccagcgccgtgcccggccccctgctgggcctgctgctgctgctgctgggcgtgctggcccccggcggcgccagcctgagactgctggaccacagagccctggtgtgcagccagcccggcctgaactgcaccgtgaagaacagcacctgcctggacgacagctggatccaccccagaaacctgacccccagcagccccaaggacctgcagatccagctgcacttcgcccacacccagcagggcgacctgttccccgtggcccacatcgagtggaccctgcagaccgacgccagcatcctgtacctggagggcgccgagctgagcgtgctgcagctgaacaccaacgagagactgtgcgtgagattcgagttcctgagcaagctgagacaccaccacagaagatggagattcaccttcagccacttcgtggtggaccccgaccaggagtacgaggtgaccgtgcaccacctgcccaagcccatccccgacggcgaccccaaccaccagagcaagaacttcctggtgcccgactgcgagcacgccagaatgaaggtgaccaccccctgcatgagcagcggcagcctgtgggaccccaacatcaccgtggagaccctggaggcccaccagctgagagtgagcttcaccctgtggaacgagagcacccactaccagatcctgctgaccagcttcccccacatggagaaccacagctgcttcgagcacatgcaccacatccccgcccccagacccgaggagttccaccagagaagcaacgtgaccctgaccctgagaaacctgaagggctgctgcagacaccaggtgcagatccagcccttcttcagcagctgcctgaacgactgcctgagacacagcgccaccgtgagctgccccgagatgcccgacacccccgacggcctgcccgccgccgacctgatccccccccccctgaagcccagaaaggtgtggatcatctacagcgccgaccaccccctgtacgtggacgtggtgctgaagttcgcccagttcctgctgaccgcctgcggcaccgaggtggccctggacctgctggaggagcaggccatcagcgaggccggcgtgatgacctgggtgggcagacagaagcaggagatggtggagagcaacagcaagatcatcgtgctgtgcagcagaggcaccagagccaagtggcaggccctgctgggcagaggcgcccccgtgagactgagatgcgaccacggcaagcccgtgggcgacctgttcaccgccgccatgaacatgatcctgcccgacttcaagagacccgcctgcttcggcacctacgtggtgtgctacttcagcgaggtgagctgcgacggcgacgtgcccgacctgttcggcgccgcccccagataccccctgatggacagattcgaggaggtgtacttcagaatccaggacctggagatgttccagcccggcagaatgcacagagtgggcgagctgagcggcgacaactacctgagaagccccggcggcagacagctgagagccgccctggacagattcagagactggcaggtgagatgccccgactggttcgagtgcgagaacctgtacagcgccgacgaccaggacgcccccagcctggacgaggaggtgttcgaggagcccctgctgccccccggcaccggcatcgtgaagagagcccccctggtgagagagcccggcagccaggcctgcctggccatcgaccccctggtgggcgaggagggcggcgccgccgtggccaagctggagccccacctgcagcccagaggccagcccgccccccagcccctgcacaccctggtgctggccgccgaggagggcgccctggtggccgccgtggagcccggccccctggccgacggcgccgccgtgagactggccctggccggcgagggcgaggcctgccccctgctgggcagccccggcgccggcagaaacagcgtgctgttcctgcccgtggaccccgaggacagccccctgggcagcagcacccccatggccagccccgacctgctgcccgaggacgtgagagagcacctggagggcctgatgctgagcctgttcgagcagagcctgagctgccaggcccagggcggctgcagcagacccgccatggtgctgaccgacccccacaccccctacgaggaggagcagagacagagcgtgcagagcgaccagggctacatcagcagaagcagcccccagccccccgagggcctgaccgagatggaggaggaggaggaggaggagcaggaccccggcaagcccgccctgcccctgagccccgaggacctggagagcctgagaagcctgcagagacagctgctgttcagacagctgcagaagaacagcggctgggacaccatgggcagcgagagcgagggccccagcgcctag

SEQ ID NO: 85583 - DNA, 1509 bp, synthetic construct
  misc_feature 1..1509: note = Description of Artificial Sequence: Synthetic coding sequence
  source 1..1509: mol_type = other DNA
atgagcctggtgctgctgagcctggccgccctgtgcagaagcgccgtgcccagagagcccaccgtgcagtgcggcagcgagaccggccccagccccgagtggatgctgcagcacgacctgatccccggcgacctgagagacctgagagtggagcccgtgaccaccagcgtggccaccggcgactacagcatcctgatgaacgtgagctgggtgctgagagccgacgccagcatcagactgctgaaggccaccaagatctgcgtgaccggcaagagcaacttccagagctacagctgcgtgagatgcaactacaccgaggccttccagacccagaccagacccagcggcggcaagtggaccttcagctacatcggcttccccgtggagctgaacaccgtgtacttcatcggcgcccacaacatccccaacgccaacatgaacgaggacggccccagcatgagcgtgaacttcaccagccccggctgcctggaccacatcatgaagtacaagaagaagtgcgtgaaggccggcagcctgtgggaccccaacatcaccgcctgcaagaagaacgaggagaccgtggaggtgaacttcaccaccacccccctgggcaacagatacatggccctgatccagcacagcaccatcatcggcttcagccaggtgttcgagccccaccagaagaagcagaccagagccagcgtggtgatccccgtgaccggcgacagcgagggcgccaccgtgcagctgaccccctacttccccacctgcggcagcgactgcatcagacacaagggcaccgtggtgctgtgcccccagaccggcgtgcccttccccctggacaacaacaagagcaagcccggcggctggctgcccctgctgctgctgagcctgctggtggccacctgggtgctggtggccggcatctacctgatgtggagacacgagagaatcaagaagaccagcttcagcaccaccaccctgctgccccccatcaaggtgctggtggtgtaccccagcgagatctgcttccaccacaccatctgctacttcaccgagttcctgcagaaccactgcagaagcgaggtgatcctggagaagtggcagaagaagaagatcgccgagatgggccccgtgcagtggctggccacccagaagaaggccgccgacaaggtggtgttcctgctgagcaacgacgtgaacagcgtgtgcgacggcacctgcggcaagagcgagggcagccccagcgagaacagccaggacctgttccccctggccttcaacctgttctgcagcgacctgagaagccagatccacctgcacaagtacgtggtggtgtacttcagagagatcgacaccaaggacgactacaacgccctgagcgtgtgccccaagtaccacctgatgaaggacgccaccgccttctgcgccgagctgctgcacgtgaagcagcaggtgagcgccggcaagagaagccaggcctgccacgacggctgctgcagcctgtag

SEQ ID NO: 85584 - DNA, 2376 bp, synthetic construct
  misc_feature 1..2376: note = Description of Artificial Sequence: Synthetic coding sequence
  source 1..2376: mol_type = other DNA
atgcccgtgccctggttcctgctgagcctggccctgggcagaagccccgtggtgctgagcctggagagactggtgggcccccaggacgccacccactgcagccccgtgagcctggagccctggggcgacgaggagagactgagagtgcagttcctggcccagcagagcctgagcctggcccccgtgaccgccgccaccgccagaaccgccctgagcggcctgagcggcgccgacggcagaagagaggagagaggcagaggcaagagctgggtgtgcctgagcctgggcggcagcggcaacaccgagccccagaagaagggcctgagctgcagactgtgggacagcgacatcctgtgcctgcccggcgacatcgtgcccgcccccggccccgtgctggcccccacccacctgcagaccgagctggtgctgagatgccagaaggagaccgactgcgacctgtgcctgagagtggccgtgcacctggccgtgcacggccactgggaggagcccgaggacgaggagaagttcggcggcgccgccgacagcggcgtggaggagcccagaaacgccagcctgcaggcccaggtggtgctgagcttccaggcctaccccaccgccagatgcgtgctgctggaggtgcaggtgcccgccgccctggtgcagttcggccagagcgtgggcagcgtggtgtacgactgcttcgaggccgccctgggcagcgaggtgagaatctggagctacacccagcccagatacgagaaggagctgaaccacacccagcagctgcccgactgcagaggcctggaggtgtggaacagcatccccagctgctgggccctgccctggctgaacgtgagcgccgacggcgacaacgtgcacctggtgctgaacgtgagcgaggagcagcacttcggcctgagcctgtactggaaccaggtgcagggcccccccaagcccagatggcacaagaacctgaccggcccccagatcatcaccctgaaccacaccgacctggtgccctgcctgtgcatccaggtgtggcccctggagcccgacagcgtgagaaccaacatctgccccttcagagaggaccccagagcccaccagaacctgtggcaggccgccagactgcagctgctgaccctgcagagctggctgctggacgccccctgcagcctgcccgccgaggccgccctgtgctggagagcccccggcggcgacccctgccagcccctggtgccccccctgagctgggagaacgtgaccgtggacaaggtgctggagttccccctgctgaagggccaccccaacctgtgcgtgcaggtgaacagcagcgagaagctgcagctgcaggagtgcctgtgggccgacagcctgggccccctgaaggacgacgtgctgctgctggagaccagaggcccccaggacaacagaagcctgtgcgccctggagcccagcggctgcaccagcctgcccagcaaggccagcaccagagccgccagactgggcgagtacctgctgcaggacctgcagagcggccagtgcctgcagctgtgggacgacgacctgggcgccctgtgggcctgccccatggacaagtacatccacaagagatgggccctggtgtggctggcctgcctgctgttcgccgccgccctgagcctgatcctgctgctgaagaaggaccacgccaagggctggctgagactgctgaagcaggacgtgagaagcggcgccgccgccagaggcagagccgccctgctgctgtacagcgccgacgacagcggcttcgagagactggtgggcgccctggccagcgccctgtgccagctgcccctgagagtggccgtggacctgtggagcagaagagagctgagcgcccagggccccgtggcctggttccacgcccagagaagacagaccctgcaggagggcggcgtggtggtgctgctgttcagccccggcgccgtggccctgtgcagcgagtggctgcaggacggcgtgagcggccccggcgcccacggcccccacgacgccttcagagccagcctgagctgcgtgctgcccgacttcctgcagggcagagcccccggcagctacgtgggcgcctgcttcgacagactgctgcaccccgacgccgtgcccgccctgttcagaaccgtgcccgtgttcaccctgcccagccagctgcccgacttcctgggcgccctgcagcagcccagagcccccagaagcggcagactgcaggagagagccgagcaggtgagcagagccctgcagcccgccctggacagctacttccacccccccggcacccccgcccccggcagaggcgtgggccccggcgccggccccggcgccggcgacggcacctag

SEQ ID NO: 85585 - DNA, 2118 bp, synthetic construct
  misc_feature 1..2118: note = Description of Artificial Sequence: Synthetic coding sequence
  source 1..2118: mol_type = other DNA
atgcccgtgccctggttcctgctgagcctggccctgggcagaagccccgtggtgctgagcctggagagactggtgggcccccaggacgccacccactgcagccccggcctgagctgcagactgtgggacagcgacatcctgtgcctgcccggcgacatcgtgcccgcccccggccccgtgctggcccccacccacctgcagaccgagctggtgctgagatgccagaaggagaccgactgcgacctgtgcctgagagtggccgtgcacctggccgtgcacggccactgggaggagcccgaggacgaggagaagttcggcggcgccgccgacagcggcgtggaggagcccagaaacgccagcctgcaggcccaggtggtgctgagcttccaggcctaccccaccgccagatgcgtgctgctggaggtgcaggtgcccgccgccctggtgcagttcggccagagcgtgggcagcgtggtgtacgactgcttcgaggccgccctgggcagcgaggtgagaatctggagctacacccagcccagatacgagaaggagctgaaccacacccagcagctgcccgccctgccctggctgaacgtgagcgccgacggcgacaacgtgcacctggtgctgaacgtgagcgaggagcagcacttcggcctgagcctgtactggaaccaggtgcagggcccccccaagcccagatggcacaagaacctgaccggcccccagatcatcaccctgaaccacaccgacctggtgccctgcctgtgcatccaggtgtggcccctggagcccgacagcgtgagaaccaacatctgccccttcagagaggaccccagagcccaccagaacctgtggcaggccgccagactgcagctgctgaccctgcagagctggctgctggacgccccctgcagcctgcccgccgaggccgccctgtgctggagagcccccggcggcgacccctgccagcccctggtgccccccctgagctgggagaacgtgaccgtggacaaggtgctggagttccccctgctgaagggccaccccaacctgtgcgtgcaggtgaacagcagcgagaagctgcagctgcaggagtgcctgtgggccgacagcctgggccccctgaaggacgacgtgctgctgctggagaccagaggcccccaggacaacagaagcctgtgcgccctggagcccagcggctgcaccagcctgcccagcaaggccagcaccagagccgccagactgggcgagtacctgctgcaggacctgcagagcggccagtgcctgcagctgtgggacgacgacctgggcgccctgtgggcctgccccatggacaagtacatccacaagagatgggccctggtgtggctggcctgcctgctgttcgccgccgccctgagcctgatcctgctgctgaagaaggaccacgccaagggctggctgagactgctgaagcaggacgtgagaagcggcgccgccgccagaggcagagccgccctgctgctgtacagcgccgacgacagcggcttcgagagactggtgggcgccctggccagcgccctgtgccagctgcccctgagagtggccgtggacctgtggagcagaagagagctgagcgcccagggccccgtggcctggttccacgcccagagaagacagaccctgcaggagggcggcgtggtggtgctgctgttcagccccggcgccgtggccctgtgcagcgagtggctgcaggacggcgtgagcggccccggcgcccacggcccccacgacgccttcagagccagcctgagctgcgtgctgcccgacttcctgcagggcagagcccccggcagctacgtgggcgcctgcttcgacagactgctgcaccccgacgccgtgcccgccctgttcagaaccgtgcccgtgttcaccctgcccagccagctgcccgacttcctgggcgccctgcagcagcccagagcccccagaagcggcagactgcaggagagagccgagcaggtgagcagagccctgcagcccgccctggacagctacttccacccccccggcacccccgcccccggcagaggcgtgggccccggcgccggccccggcgccggcgacggcacctag

SEQ ID NO: 85586 - DNA, 2163 bp, synthetic construct
  misc_feature 1..2163: note = Description of Artificial Sequence: Synthetic coding sequence
  source 1..2163: mol_type = other DNA
atgcccgtgccctggttcctgctgagcctggccctgggcagaagccccgtggtgctgagcctggagagactggtgggcccccaggacgccacccactgcagccccggcctgagctgcagactgtgggacagcgacatcctgtgcctgcccggcgacatcgtgcccgcccccggccccgtgctggcccccacccacctgcagaccgagctggtgctgagatgccagaaggagaccgactgcgacctgtgcctgagagtggccgtgcacctggccgtgcacggccactgggaggagcccgaggacgaggagaagttcggcggcgccgccgacagcggcgtggaggagcccagaaacgccagcctgcaggcccaggtggtgctgagcttccaggcctaccccaccgccagatgcgtgctgctggaggtgcaggtgcccgccgccctggtgcagttcggccagagcgtgggcagcgtggtgtacgactgcttcgaggccgccctgggcagcgaggtgagaatctggagctacacccagcccagatacgagaaggagctgaaccacacccagcagctgcccgactgcagaggcctggaggtgtggaacagcatccccagctgctgggccctgccctggctgaacgtgagcgccgacggcgacaacgtgcacctggtgctgaacgtgagcgaggagcagcacttcggcctgagcctgtactggaaccaggtgcagggcccccccaagcccagatggcacaagaacctgaccggcccccagatcatcaccctgaaccacaccgacctggtgccctgcctgtgcatccaggtgtggcccctggagcccgacagcgtgagaaccaacatctgccccttcagagaggaccccagagcccaccagaacctgtggcaggccgccagactgcagctgctgaccctgcagagctggctgctggacgccccctgcagcctgcccgccgaggccgccctgtgctggagagcccccggcggcgacccctgccagcccctggtgccccccctgagctgggagaacgtgaccgtggacaaggtgctggagttccccctgctgaagggccaccccaacctgtgcgtgcaggtgaacagcagcgagaagctgcagctgcaggagtgcctgtgggccgacagcctgggccccctgaaggacgacgtgctgctgctggagaccagaggcccccaggacaacagaagcctgtgcgccctggagcccagcggctgcaccagcctgcccagcaaggccagcaccagagccgccagactgggcgagtacctgctgcaggacctgcagagcggccagtgcctgcagctgtgggacgacgacctgggcgccctgtgggcctgccccatggacaagtacatccacaagagatgggccctggtgtggctggcctgcctgctgttcgccgccgccctgagcctgatcctgctgctgaagaaggaccacgccaagggctggctgagactgctgaagcaggacgtgagaagcggcgccgccgccagaggcagagccgccctgctgctgtacagcgccgacgacagcggcttcgagagactggtgggcgccctggccagcgccctgtgccagctgcccctgagagtggccgtggacctgtggagcagaagagagctgagcgcccagggccccgtggcctggttccacgcccagagaagacagaccctgcaggagggcggcgtggtggtgctgctgttcagccccggcgccgtggccctgtgcagcgagtggctgcaggacggcgtgagcggccccggcgcccacggcccccacgacgccttcagagccagcctgagctgcgtgctgcccgacttcctgcagggcagagcccccggcagctacgtgggcgcctgcttcgacagactgctgcaccccgacgccgtgcccgccctgttcagaaccgtgcccgtgttcaccctgcccagccagctgcccgacttcctgggcgccctgcagcagcccagagcccccagaagcggcagactgcaggagagagccgagcaggtgagcagagccctgcagcccgccctggacagctacttccacccccccggcacccccgcccccggcagaggcgtgggccccggcgccggccccggcgccggcgacggcacctag

SEQ ID NO: 85587 - DNA, 1641 bp, synthetic construct
  misc_feature 1..1641: note = Description of Artificial Sequence: Synthetic coding sequence
  source 1..1641: mol_type = other DNA
atggcctaccccaccgccagatgcgtgctgctggaggtgcaggtgcccgccgccctggtgcagttcggccagagcgtgggcagcgtggtgtacgactgcttcgaggccgccctgggcagcgaggtgagaatctggagctacacccagcccagatacgagaaggagctgaaccacacccagcagctgcccgccctgccctggctgaacgtgagcgccgacggcgacaacgtgcacctggtgctgaacgtgagcgaggagcagcacttcggcctgagcctgtactggaaccaggtgcagggcccccccaagcccagatggcacaagaacctgaccggcccccagatcatcaccctgaaccacaccgacctggtgccctgcctgtgcatccaggtgtggcccctggagcccgacagcgtgagaaccaacatctgccccttcagagaggaccccagagcccaccagaacctgtggcaggccgccagactgcagctgctgaccctgcagagctggctgctggacgccccctgcagcctgcccgccgaggccgccctgtgctggagagcccccggcggcgacccctgccagcccctggtgccccccctgagctgggagaacgtgaccgtggacgtgaacagcagcgagaagctgcagctgcaggagtgcctgtgggccgacagcctgggccccctgaaggacgacgtgctgctgctggagaccagaggcccccaggacaacagaagcctgtgcgccctggagcccagcggctgcaccagcctgcccagcaaggccagcaccagagccgccagactgggcgagtacctgctgcaggacctgcagagcggccagtgcctgcagctgtgggacgacgacctgggcgccctgtgggcctgccccatggacaagtacatccacaagagatgggccctggtgtggctggcctgcctgctgttcgccgccgccctgagcctgatcctgctgctgaagaaggaccacgccaaggccgccgccagaggcagagccgccctgctgctgtacagcgccgacgacagcggcttcgagagactggtgggcgccctggccagcgccctgtgccagctgcccctgagagtggccgtggacctgtggagcagaagagagctgagcgcccagggccccgtggcctggttccacgcccagagaagacagaccctgcaggagggcggcgtggtggtgctgctgttcagccccggcgccgtggccctgtgcagcgagtggctgcaggacggcgtgagcggccccggcgcccacggcccccacgacgccttcagagccagcctgagctgcgtgctgcccgacttcctgcagggcagagcccccggcagctacgtgggcgcctgcttcgacagactgctgcaccccgacgccgtgcccgccctgttcagaaccgtgcccgtgttcaccctgcccagccagctgcccgacttcctgggcgccctgcagcagcccagagcccccagaagcggcagactgcaggagagagccgagcaggtgagcagagccctgcagcccgccctggacagctacttccacccccccggcacccccgcccccggcagaggcgtgggccccggcgccggccccggcgccggcgacggcacctag

SEQ ID NO: 85588 - DNA, 2124 bp, synthetic construct
  misc_feature 1..2124: note = Description of Artificial Sequence: Synthetic coding sequence
  source 1..2124: mol_type = other DNA
atgcccgtgccctggttcctgctgagcctggccctgggcagaagccccgtggtgctgagcctggagagactggtgggcccccaggacgccacccactgcagccccggcctgagctgcagactgtgggacagcgacatcctgtgcctgcccggcgacatcgtgcccgcccccggccccgtgctggcccccacccacctgcagaccgagctggtgctgagatgccagaaggagaccgactgcgacctgtgcctgagagtggccgtgcacctggccgtgcacggccactgggaggagcccgaggacgaggagaagttcggcggcgccgccgacagcggcgtggaggagcccagaaacgccagcctgcaggcccaggtggtgctgagcttccaggcctaccccaccgccagatgcgtgctgctggaggtgcaggtgcccgccgccctggtgcagttcggccagagcgtgggcagcgtggtgtacgactgcttcgaggccgccctgggcagcgaggtgagaatctggagctacacccagcccagatacgagaaggagctgaaccacacccagcagctgcccgactgcagaggcctggaggtgtggaacagcatccccagctgctgggccctgccctggctgaacgtgagcgccgacggcgacaacgtgcacctggtgctgaacgtgagcgaggagcagcacttcggcctgagcctgtactggaaccaggtgcagggcccccccaagcccagatggcacaagaacctgaccggcccccagatcatcaccctgaaccacaccgacctggtgccctgcctgtgcatccaggtgtggcccctggagcccgacagcgtgagaaccaacatctgccccttcagagaggaccccagagcccaccagaacctgtggcaggccgccagactgcagctgctgaccctgcagagctggctgctggacgccccctgcagcctgcccgccgaggccgccctgtgctggagagcccccggcggcgacccctgccagcccctggtgccccccctgagctgggagaacgtgaccgtggacaaggtgctggagttccccctgctgaagggccaccccaacctgtgcgtgcaggtgaacagcagcgagaagctgcagctgcaggagtgcctgtgggccgacagcctgggccccctgaaggacgacgtgctgctgctggagaccagaggcccccaggacaacagaagcctgtgcgccctggagcccagcggctgcaccagcctgcccagcaaggccagcaccagagccgccagactgggcgagtacctgctgcaggacctgcagagcggccagtgcctgcagctgtgggacgacgacctgggcgccctgtgggcctgccccatggacaagtacatccacaagagatgggccctggtgtggctggcctgcctgctgttcgccgccgccctgagcctgatcctgctgctgaagaaggaccacgccaaggccgccgccagaggcagagccgccctgctgctgtacagcgccgacgacagcggcttcgagagactggtgggcgccctggccagcgccctgtgccagctgcccctgagagtggccgtggacctgtggagcagaagagagctgagcgcccagggccccgtggcctggttccacgcccagagaagacagaccctgcaggagggcggcgtggtggtgctgctgttcagccccggcgccgtggccctgtgcagcgagtggctgcaggacggcgtgagcggccccggcgcccacggcccccacgacgccttcagagccagcctgagctgcgtgctgcccgacttcctgcagggcagagcccccggcagctacgtgggcgcctgcttcgacagactgctgcaccccgacgccgtgcccgccctgttcagaaccgtgcccgtgttcaccctgcccagccagctgcccgacttcctgggcgccctgcagcagcccagagcccccagaagcggcagactgcaggagagagccgagcaggtgagcagagccctgcagcccgccctggacagctacttccacccccccggcacccccgcccccggcagaggcgtgggccccggcgccggccccggcgccggcgacggcacctag

SEQ ID NO: 85589 - DNA, 213 bp, synthetic construct
  misc_feature 1..213: note = Description of Artificial Sequence: Synthetic coding sequence
  source 1..213: mol_type = other DNA
atgcccgtgccctggttcctgctgagcctggccctgggcagaagccccgtggtgctgagcctggagagactggtgggcccccaggacgccacccactgcagccccggcctgagctgcagactgtgggtgacctacagcgcctgcctgggcaccagctgcctgctgagagccccctgctggagactgagaacctgcagacagagctggtgctag

SEQ ID NO: 85590 - DNA, 2067 bp, synthetic construct
  misc_feature 1..2067: note = Description of Artificial Sequence: Synthetic coding sequence
  source 1..2067: mol_type = other DNA
atgcccgtgccctggttcctgctgagcctggccctgggcagaagccccgtggtgctgagcctggagagactggtgggcccccaggacgccacccactgcagccccggcctgagctgcagactgtgggacagcgacatcctgtgcctgcccggcgacatcgtgcccgcccccggccccgtgctggcccccacccacctgcagaccgagctggtgctgagatgccagaaggagaccgactgcgacctgtgcctgagagtggccgtgcacctggccgtgcacggccactgggaggagcccgaggacgaggagaagttcggcggcgccgccgacagcggcgtggaggagcccagaaacgccagcctgcaggcccaggtggtgctgagcttccaggcctaccccaccgccagatgcgtgctgctggaggtgcaggtgcccgccgccctggtgcagttcggccagagcgtgggcagcgtggtgtacgactgcttcgaggccgccctgggcagcgaggtgagaatctggagctacacccagcccagatacgagaaggagctgaaccacacccagcagctgcccgccctgccctggctgaacgtgagcgccgacggcgacaacgtgcacctggtgctgaacgtgagcgaggagcagcacttcggcctgagcctgtactggaaccaggtgcagggcccccccaagcccagatggcacaagaacctgaccggcccccagatcatcaccctgaaccacaccgacctggtgccctgcctgtgcatccaggtgtggcccctggagcccgacagcgtgagaaccaacatctgccccttcagagaggaccccagagcccaccagaacctgtggcaggccgccagactgcagctgctgaccctgcagagctggctgctggacgccccctgcagcctgcccgccgaggccgccctgtgctggagagcccccggcggcgacccctgccagcccctggtgccccccctgagctgggagaacgtgaccgtggacgtgaacagcagcgagaagctgcagctgcaggagtgcctgtgggccgacagcctgggccccctgaaggacgacgtgctgctgctggagaccagaggcccccaggacaacagaagcctgtgcgccctggagcccagcggctgcaccagcctgcccagcaaggccagcaccagagccgccagactgggcgagtacctgctgcaggacctgcagagcggccagtgcctgcagctgtgggacgacgacctgggcgccctgtgggcctgccccatggacaagtacatccacaagagatgggccctggtgtggctggcctgcctgctgttcgccgccgccctgagcctgatcctgctgctgaagaaggaccacgccaagggctggctgagactgctgaagcaggacgtgagaagcggcgccgccgccagaggcagagccgccctgctgctgtacagcgccgacgacagcggcttcgagagactggtgggcgccctggccagcgccctgtgccagctgcccctgagagtggccgtggacctgtggagcagaagagagctgagcgcccagggccccgtggcctggttccacgcccagagaagacagaccctgcaggagggcggcgtggtggtgctgctgttcagccccggcgccgtggccctgtgcagcgagtggctgcaggacggcgtgagcggccccggcgcccacggcccccacgacgccttcagagccagcctgagctgcgtgctgcccgacttcctgcagggcagagcccccggcagctacgtgggcgcctgcttcgacagactgctgcaccccgacgccgtgcccgccctgttcagaaccgtgcccgtgttcaccctgcccagccagctgcccgacttcctgggcgccctgcagcagcccagagcccccagaagcggcagactgcaggagagagccgagcaggtgagcagagccctgcagcccgccctggacagctacttccacccccccggcacccccgcccccggcagaggcgtgggccccggcgccggccccggcgccggcgacggcacctag

SEQ ID NO: 85591 - DNA, 2220 bp, synthetic construct
  misc_feature 1..2220: note = Description of Artificial Sequence: Synthetic coding sequence
  source 1..2220: mol_type = other DNA
atggccccctggctgcagctgtgcagcgtgttcttcaccgtgaacgcctgcctgaacggcagccagctggccgtggccgccggcggcagcggcagagccagaggcgccgacacctgcggctggagaggcgtgggccccgccagcagaaacagcggcctgtacaacatcaccttcaagtacgacaactgcaccacctacctgaaccccgtgggcaagcacgtgatcgccgacgcccagaacatcaccatcagccagtacgcctgccacgaccaggtggccgtgaccatcctgtggagccccggcgccctgggcatcgagttcctgaagggcttcagagtgatcctggaggagctgaagagcgagggcagacagtgccagcagctgatcctgaaggaccccaagcagctgaacagcagcttcaagagaaccggcatggagagccagcccttcctgaacatgaagttcgagaccgactacttcgtgaaggtggtgcccttccccagcatcaagaacgagagcaactaccaccccttcttcttcagaaccagagcctgcgacctgctgctgcagcccgacaacctggcctgcaagcccttctggaagcccagaaacctgaacatcagccagcacggcagcgacatgcaggtgagcttcgaccacgccccccacaacttcggcttcagattcttctacctgcactacaagctgaagcacgagggccccttcaagagaaagacctgcaagcaggagcagaccaccgagaccaccagctgcctgctgcagaacgtgagccccggcgactacatcatcgagctggtggacgacaccaacaccaccagaaaggtgatgcactacgccctgaagcccgtgcacagcccctgggccggccccatcagagccgtggccatcaccgtgcccctggtggtgatcagcgccttcgccaccctgttcaccgtgatgtgcagaaagaagcagcaggagaacatctacagccacctggacgaggagagcagcgagagcagcacctacaccgccgccctgcccagagagagactgagacccagacccaaggtgttcctgtgctacagcagcaaggacggccagaaccacatgaacgtggtgcagtgcttcgcctacttcctgcaggacttctgcggctgcgaggtggccctggacctgtgggaggacttcagcctgtgcagagagggccagagagagtgggtgatccagaagatccacgagagccagttcatcatcgtggtgtgcagcaagggcatgaagtacttcgtggacaagaagaactacaagcacaagggcggcggcagaggcagcggcaagggcgagctgttcctggtggccgtgagcgccatcgccgagaagctgagacaggccaagcagagcagcagcgccgccctgagcaagttcatcgccgtgtacttcgactacagctgcgagggcgacgtgcccggcatcctggacctgagcaccaagtacagactgatggacaacctgccccagctgtgcagccacctgcacagcagagaccacggcctgcaggagcccggccagcacaccagacagggcagcagaagaaactacttcagaagcaagagcggcagaagcctgtacgtggccatctgcaacatgcaccagttcatcgacgaggagcccgactggttcgagaagcagttcgtgcccttccaccccccccccctgagatacagagagcccgtgctggagaagttcgacagcggcctggtgctgaacgacgtgatgtgcaagcccggccccgagagcgacttctgcctgaaggtggaggccgccgtgctgggcgccaccggccccgccgacagccagcacgagagccagcacggcggcctggaccaggacggcgaggccagacccgccctggacggcagcgccgccctgcagcccctgctgcacaccgtgaaggccggcagccccagcgacatgcccagagacagcggcatctacgacagcagcgtgcccagcagcgagctgagcctgcccctgatggagggcctgagcaccgaccagaccgagaccagcagcctgaccgagagcgtgagcagcagcagcggcctgggcgaggaggagccccccgccctgcccagcaagctgctgagcagcggcagctgcaaggccgacctgggctgcagaagctacaccgacgagctgcacgccgtggcccccctgtag

SEQ ID NO: 85592 - DNA, 1788 bp, synthetic construct
  misc_feature 1..1788: note = Description of Artificial Sequence: Synthetic coding sequence
  source 1..1788: mol_type = other DNA
atggagagccagcccttcctgaacatgaagttcgagaccgactacttcgtgaaggtggtgcccttccccagcatcaagaacgagagcaactaccaccccttcttcttcagaaccagagcctgcgacctgctgctgcagcccgacaacctggcctgcaagcccttctggaagcccagaaacctgaacatcagccagcacggcagcgacatgcaggtgagcttcgaccacgccccccacaacttcggcttcagattcttctacctgcactacaagctgaagcacgagggccccttcaagagaaagacctgcaagcaggagcagaccaccgagaccaccagctgcctgctgcagaacgtgagccccggcgactacatcatcgagctggtggacgacaccaacaccaccagaaaggtgatgcactacgccctgaagcccgtgcacagcccctgggccggccccatcagagccgtggccatcaccgtgcccctggtggtgatcagcgccttcgccaccctgttcaccgtgatgtgcagaaagaagcagcaggagaacatctacagccacctggacgaggagagcagcgagagcagcacctacaccgccgccctgcccagagagagactgagacccagacccaaggtgttcctgtgctacagcagcaaggacggccagaaccacatgaacgtggtgcagtgcttcgcctacttcctgcaggacttctgcggctgcgaggtggccctggacctgtgggaggacttcagcctgtgcagagagggccagagagagtgggtgatccagaagatccacgagagccagttcatcatcgtggtgtgcagcaagggcatgaagtacttcgtggacaagaagaactacaagcacaagggcggcggcagaggcagcggcaagggcgagctgttcctggtggccgtgagcgccatcgccgagaagctgagacaggccaagcagagcagcagcgccgccctgagcaagttcatcgccgtgtacttcgactacagctgcgagggcgacgtgcccggcatcctggacctgagcaccaagtacagactgatggacaacctgccccagctgtgcagccacctgcacagcagagaccacggcctgcaggagcccggccagcacaccagacagggcagcagaagaaactacttcagaagcaagagcggcagaagcctgtacgtggccatctgcaacatgcaccagttcatcgacgaggagcccgactggttcgagaagcagttcgtgcccttccaccccccccccctgagatacagagagcccgtgctggagaagttcgacagcggcctggtgctgaacgacgtgatgtgcaagcccggccccgagagcgacttctgcctgaaggtggaggccgccgtgctgggcgccaccggccccgccgacagccagcacgagagccagcacggcggcctggaccaggacggcgaggccagacccgccctggacggcagcgccgccctgcagcccctgctgcacaccgtgaaggccggcagccccagcgacatgcccagagacagcggcatctacgacagcagcgtgcccagcagcgagctgagcctgcccctgatggagggcctgagcaccgaccagaccgagaccagcagcctgaccgagagcgtgagcagcagcagcggcctgggcgaggaggagccccccgccctgcccagcaagctgctgagcagcggcagctgcaaggccgacctgggctgcagaagctacaccgacgagctgcacgccgtggcccccctgtag

SEQ ID NO: 85593 - DNA, 2148 bp, synthetic construct
  misc_feature 1..2148: note = Description of Artificial Sequence: Synthetic coding sequence
  source 1..2148: mol_type = other DNA
atgcccagagccagcgccagcggcgtgcccgccctgttcgtgagcggcgagcagggcgtgggccccgccagcagaaacagcggcctgtacaacatcaccttcaagtacgacaactgcaccacctacctgaaccccgtgggcaagcacgtgatcgccgacgcccagaacatcaccatcagccagtacgcctgccacgaccaggtggccgtgaccatcctgtggagccccggcgccctgggcatcgagttcctgaagggcttcagagtgatcctggaggagctgaagagcgagggcagacagtgccagcagctgatcctgaaggaccccaagcagctgaacagcagcttcaagagaaccggcatggagagccagcccttcctgaacatgaagttcgagaccgactacttcgtgaaggtggtgcccttccccagcatcaagaacgagagcaactaccaccccttcttcttcagaaccagagcctgcgacctgctgctgcagcccgacaacctggcctgcaagcccttctggaagcccagaaacctgaacatcagccagcacggcagcgacatgcaggtgagcttcgaccacgccccccacaacttcggcttcagattcttctacctgcactacaagctgaagcacgagggccccttcaagagaaagacctgcaagcaggagcagaccaccgagaccaccagctgcctgctgcagaacgtgagccccggcgactacatcatcgagctggtggacgacaccaacaccaccagaaaggtgatgcactacgccctgaagcccgtgcacagcccctgggccggccccatcagagccgtggccatcaccgtgcccctggtggtgatcagcgccttcgccaccctgttcaccgtgatgtgcagaaagaagcagcaggagaacatctacagccacctggacgaggagagcagcgagagcagcacctacaccgccgccctgcccagagagagactgagacccagacccaaggtgttcctgtgctacagcagcaaggacggccagaaccacatgaacgtggtgcagtgcttcgcctacttcctgcaggacttctgcggctgcgaggtggccctggacctgtgggaggacttcagcctgtgcagagagggccagagagagtgggtgatccagaagatccacgagagccagttcatcatcgtggtgtgcagcaagggcatgaagtacttcgtggacaagaagaactacaagcacaagggcggcggcagaggcagcggcaagggcgagctgttcctggtggccgtgagcgccatcgccgagaagctgagacaggccaagcagagcagcagcgccgccctgagcaagttcatcgccgtgtacttcgactacagctgcgagggcgacgtgcccggcatcctggacctgagcaccaagtacagactgatggacaacctgccccagctgtgcagccacctgcacagcagagaccacggcctgcaggagcccggccagcacaccagacagggcagcagaagaaactacttcagaagcaagagcggcagaagcctgtacgtggccatctgcaacatgcaccagttcatcgacgaggagcccgactggttcgagaagcagttcgtgcccttccaccccccccccctgagatacagagagcccgtgctggagaagttcgacagcggcctggtgctgaacgacgtgatgtgcaagcccggccccgagagcgacttctgcctgaaggtggaggccgccgtgctgggcgccaccggccccgccgacagccagcacgagagccagcacggcggcctggaccaggacggcgaggccagacccgccctggacggcagcgccgccctgcagcccctgctgcacaccgtgaaggccggcagccccagcgacatgcccagagacagcggcatctacgacagcagcgtgcccagcagcgagctgagcctgcccctgatggagggcctgagcaccgaccagaccgagaccagcagcctgaccgagagcgtgagcagcagcagcggcctgggcgaggaggagccccccgccctgcccagcaagctgctgagcagcggcagctgcaaggccgacctgggctgcagaagctacaccgacgagctgcacgccgtggcccccctgtag

SEQ ID NO: 85594 - DNA, 1788 bp, synthetic construct; identical to SEQ ID NO: 85592
  misc_feature 1..1788: note = Description of Artificial Sequence: Synthetic coding sequence
  source 1..1788: mol_type = other DNA

SEQ ID NO: 85595 - DNA, 222 bp, synthetic construct
  misc_feature 1..222: note = Description of Artificial Sequence: Synthetic coding sequence
  source 1..222: mol_type = other DNA
atggagagccagcccttcctgaacatgaagttcgagaccgactacttcgtgaaggtggtgcccttccccagcatcaagaacgagagcaactaccaccccttcttcttcagaaccagagcctgcgacctgctgctgcagcccgacaacctggcctgcaagcccttctggaagcccagaaacctgaacatcagccagcacggcagcgacatgcaggtgagctag

SEQ ID NO: 85596 - DNA, 1671 bp, synthetic construct
  misc_feature 1..1671: note = Description of Artificial Sequence: Synthetic coding sequence
  source 1..1671: mol_type = other DNA
atgggcttctggatcctggccatcctgaccatcctgatgtacagcaccgccgccaagttcagcaagcagagctggggcctggagaacgaggccctgatcgtgagatgccccagacagggcaagcccagctacaccgtggactggtactacagccagaccaacaagagcatccccacccaggagagaaacagagtgttcgccagcggccagctgctgaagttcctgcccgccgccgtggccgacagcggcatctacacctgcatcgtgagaagccccaccttcaacagaaccggctacgccaacgtgaccatctacaagaagcagagcgactgcaacgtgcccgactacctgatgtacagcaccgtgagcggcagcgagaagaacagcaagatctactgccccaccatcgacctgtacaactggaccgcccccctggagtggttcaagaactgccaggccctgcagggcagcagatacagagcccacaagagcttcctggtgatcgacaacgtgatgaccgaggacgccggcgactacacctgcaagttcatccacaacgagaacggcgccaactacagcgtgaccgccaccagaagcttcaccgtgaaggacgagcagggcttcagcctgttccccgtgatcggcgcccccgcccagaacgagatcaaggaggtggagatcggcaagaacgccaacctgacctgcagcgcctgcttcggcaagggcacccagttcctggccgccgtgctgtggcagctgaacggcaccaagatcaccgacttcggcgagcccagaatccagcaggaggagggccagaaccagagcttcagcaacggcctggcctgcctggacatggtgctgagaatcgccgacgtgaaggaggaggacctgctgctgcagtacgactgcctggccctgaacctgcacggcctgagaagacacaccgtgagactgagcagaaagaaccccatcgaccaccacagcatctactgcatcatcgccgtgtgcagcgtgttcctgatgctgatcaacgtgctggtgatcatcctgaagatgttctggatcgaggccaccctgctgtggagagacatcgccaagccctacaagaccagaaacgacggcaagctgtacgacgcctacgtggtgtaccccagaaactacaagagcagcaccgacggcgccagcagagtggagcacttcgtgcaccagatcctgcccgacgtgctggagaacaagtgcggctacaccctgtgcatctacggcagagacatgctgcccggcgaggacgtggtgaccgccgtggagaccaacatcagaaagagcagaagacacatcttcatcctgaccccccagatcacccacaacaaggagttcgcctacgagcaggaggtggccctgcactgcgccctgatccagaacgacgccaaggtgatcctgatcgagatggaggccctgagcgagctggacatgctgcaggccgaggccctgcaggacagcctgcagcacctgatgaaggtgcagggcaccatcaagtggagagaggaccacatcgccaacaagagaagcctgaacagcaagttctggaagcacgtgagataccagatgcccgtgcccagcaagatccccagaaaggccagcagcctgacccccctggccgcccagaagcagtag

SEQ ID NO: 85597 - DNA, 513 bp, synthetic construct
  misc_feature 1..513: note = Description of Artificial Sequence: Synthetic coding sequence
  source 1..513: mol_type = other DNA
atgaactgcagagagctgcccctgaccctgtgggtgctgatcagcgtgagcaccgccgagagctgcaccagcagaccccacatcaccgtggtggagggcgagcccttctacctgaagcactgcagctgcagcctggcccacgagatcgagaccaccaccaagagctggtacaagagcagcggcagccaggagcacgtggagctgaaccccagaagcagcagcagaatcgccctgcacgactgcgtgctggagttctggcccgtggagctgaacgacaccggcagctacttcttccagatgaagaactacacccagaagtggaagctgaacgtgatcagaagaaacaagcacagctgcttcaccgagagacaggtgaccagcaagatcgtggaggtgaagaagttcttccagatcacctgcgagaacagctactaccagaccctggtgaacagcaccagcctgtacaagatcggcccccccatctgcagaaagaccagcagcggcctgcactag

SEQ ID NO: 85598 - DNA, 1626 bp, synthetic construct
  misc_feature 1..1626: note = Description of Artificial Sequence: Synthetic coding sequence
  source 1..1626: mol_type = other DNA
atgaactgcagagagctgcccctgaccctgtgggtgctgatcagcgtgagcaccgccgagagctgcaccagcagaccccacatcaccgtggtggagggcgagcccttctacctgaagcactgcagctgcagcctggcccacgagatcgagaccaccaccaagagctggtacaagagcagcggcagccaggagcacgtggagctgaaccccagaagcagcagcagaatcgccctgcacgactgcgtgctggagttctggcccgtggagctgaacgacaccggcagctacttcttccagatgaagaactacacccagaagtggaagctgaacgtgatcagaagaaacaagcacagctgcttcaccgagagacaggtgaccagcaagatcgtggaggtgaagaagttcttccagatcacctgcgagaacagctactaccagaccctggtgaacagcaccagcctgtacaagaactgcaagaagctgctgctggagaacaacaagaaccccaccatcaagaagaacgccgagttcgaggaccagggctactacagctgcgtgcacttcctgcaccacaacggcaagctgttcaacatcaccaagaccttcaacatcaccatcgtggaggacagaagcaacatcgtgcccgtgctgctgggccccaagctgaaccacgtggccgtggagctgggcaagaacgtgagactgaactgcagcgccctgctgaacgaggaggacgtgatctactggatgttcggcgaggagaacggcagcgaccccaacatccacgaggagaaggagatgagaatcatgacccccgagggcaagtggcacgccagcaaggtgctgagaatcgagaacatcggcgagagcaacctgaacgtgctgtacaactgcaccgtggccagcaccggcggcaccgacaccaagagcttcatcctggtgagaaaggccgacatggccgacatccccggccacgtgttcaccagaggcatgatcatcgccgtgctgatcctggtggccgtggtgtgcctggtgaccgtgtgcgtgatctacagagtggacctggtgctgttctacagacacctgaccagaagagacgagaccctgaccgacggcaagacctacgacgccttcgtgagctacctgaaggagtgcagacccgagaacggcgaggagcacaccttcgccgtggagatcctgcccagagtgctggagaagcacttcggctacaagctgtgcatcttcgagagagacgtggtgcccggcggcgccgtggtggacgagatccacagcctgatcgagaagagcagaagactgatcatcgtgctgagcaagagctacatgagcaacgaggtgagatacgagctggagagcggcctgcacgaggccctggtggagagaaagatcaagatcatcctgatcgagttcacccccgtgaccgacttcaccttcctgccccagagcctgaagctgctgaagagccacagagtgctgaagtggaaggccgacaagagcctgagctacaacagcagattctggaagaacctgctgtacctgatgcccgccaagaccgtgaagcccggcagagacgagcccgaggtgctgcccgtgctgagcgagagctag

SEQ ID NO: 85599 - DNA, 1626 bp, synthetic construct; identical to SEQ ID NO: 85598
  misc_feature 1..1626: note = Description of Artificial Sequence: Synthetic coding sequence
  source 1..1626: mol_type = other DNA

SEQ ID NO: 85600 - DNA, 1800 bp, synthetic construct
  misc_feature 1..1800: note = Description of Artificial Sequence: Synthetic coding sequence
  source 1..1800: mol_type = other DNA
atgctgtgcctgggctggatcttcctgtggctggtggccggcgagagaatcaagggcttcaacatcagcggctgcagcaccaagaagctgctgtggacctacagcaccagaagcgaggaggagttcgtgctgttctgcgacctgcccgagccccagaagagccacttctgccacagaaacagactgagccccaagcaggtgcccgagcacctgcccttcatgggcagcaacgacctgagcgacgtgcagtggtaccagcagcccagcaacggcgaccccctggaggacatcagaaagagctacccccacatcatccaggacaagtgcaccctgcacttcctgacccccggcgtgaacaacagcggcagctacatctgcagacccaagatgatcaagagcccctacgacgtggcctgctgcgtgaagatgatcctggaggtgaagccccagaccaacgccagctgcgagtacagcgccagccacaagcaggacctgctgctgggcagcaccggcagcatcagctgccccagcctgagctgccagagcgacgcccagagccccgccgtgacctggtacaagaacggcaagctgctgagcgtggagagaagcaacagaatcgtggtggacgaggtgtacgactaccaccagggcacctacgtgtgcgactacacccagagcgacaccgtgagcagctggaccgtgagagccgtggtgcaggtgagaaccatcgtgggcgacaccaagctgaagcccgacatcctggaccccgtggaggacaccctggaggtggagctgggcaagcccctgaccatcagctgcaaggccagattcggcttcgagagagtgttcaaccccgtgatcaagtggtacatcaaggacagcgacctggagtgggaggtgagcgtgcccgaggccaagagcatcaagagcaccctgaaggacgagatcatcgagagaaacatcatcctggagaaggtgacccagagagacctgagaagaaagttcgtgtgcttcgtgcagaacagcatcggcaacaccacccagagcgtgcagctgaaggagaagagaggcgtggtgctgctgtacatcctgctgggcaccatcggcaccctggtggccgtgctggccgccagcgccctgctgtacagacactggatcgagatcgtgctgctgtacagaacctaccagagcaaggaccagaccctgggcgacaagaaggacttcgacgccttcgtgagctacgccaagtggagcagcttccccagcgaggccaccagcagcctgagcgaggagcacctggccctgagcctgttccccgacgtgctggagaacaagtacggctacagcctgtgcctgctggagagagacgtggcccccggcggcgtgtacgccgaggacatcgtgagcatcatcaagagaagcagaagaggcatcttcatcctgagccccaactacgtgaacggccccagcatcttcgagctgcaggccgccgtgaacctggccctggacgaccagaccctgaagctgatcctgatcaagttctgctacttccaggagcccgagagcctgccccacctggtgaagaaggccctgagagtgctgcccaccgtgacctggagaggcctgaagagcgtgccccccaacagcagattctgggccaagatgagataccacatgcccgtgaagaacagccagggcttcacctggaaccagctgagaatcaccagcagaatcttccagtggaagggcctgagcagaaccgagaccaccggcagaagcagccagcccaaggagtggtag

SEQ ID NO: 85601 - DNA, 1374 bp, synthetic construct
  misc_feature 1..1374: note = Description of Artificial Sequence: Synthetic coding sequence
  source 1..1374: mol_type = other DNA
atgatcctggaggtgaagccccagaccaacgccagctgcgagtacagcgccagccacaagcaggacctgctgctgggcagcaccggcagcatcagctgccccagcctgagctgccagagcgacgcccagagccccgccgtgacctggtacaagaacggcaagctgctgagcgtggagagaagcaacagaatcgtggtggacgaggtgtacgactaccaccagggcacctacgtgtgcgactacacccagagcgacaccgtgagcagctggaccgtgagagccgtggtgcaggtgagaaccatcgtgggcgacaccaagctgaagcccgacatcctggaccccgtggaggacaccctggaggtggagctgggcaagcccctgaccatcagctgcaaggccagattcggcttcgagagagtgttcaaccccgtgatcaagtggtacatcaaggacagcgacctggagtgggaggtgagcgtgcccgaggccaagagcatcaagagcaccctgaaggacgagatcatcgagagaaacatcatcctggagaaggtgacccagagagacctgagaagaaagttcgtgtgcttcgtgcagaacagcatcggcaacaccacccagagcgtgcagctgaaggagaagagaggcgtggtgctgctgtacatcctgctgggcaccatcggcaccctggtggccgtgctggccgccagcgccctgctgtacagacactggatcgagatcgtgctgctgtacagaacctaccagagcaaggaccagaccctgggcgacaagaaggacttcgacgccttcgtgagctacgccaagtggagcagcttccccagcgaggccaccagcagcctgagcgaggagcacctggccctgagcctgttccccgacgtgctggagaacaagtacggctacagcctgtgcctgctggagagagacgtggcccccggcggcgtgtacgccgaggacatcgtgagcatcatcaagagaagcagaagaggcatcttcatcctgagccccaactacgtgaacggccccagcatcttcgagctgcaggccgccgtgaacctggccctggacgaccagaccctgaagctgatcctgatcaagttctgctacttccaggagcccgagagcctgccccacctggtgaagaaggccctgagagtgctgcccaccgtgacctggagaggcctgaagagcgtgccccccaacagcagattctgggccaagatgagataccacatgcccgtgaagaacagccagggcttcacctggaaccagctgagaatcaccagcagaatcttccagtggaagggcctgagcagaaccgagaccaccggcagaagcagccagcccaaggagtggtag

SEQ ID NO: 85602 - DNA, 135 bp, synthetic construct
  misc_feature 1..135: note = Description of Artificial Sequence: Synthetic coding sequence
  source 1..135: mol_type = other DNA
atgctgtgcctgggctggatcttcctgtggctggtggccggcgagagaatcaagggcttcaacatcagcggctgcagcaccaagaagctgctgtggacctacagcaccagaagcgaggaggagttcgtgctgtag

SEQ ID NO: 85603 - DNA, 534 bp, synthetic construct
  misc_feature 1..534: note = Description of Artificial Sequence: Synthetic coding sequence
  source 1..534: mol_type = other DNA
atgaagctgcagtgcgtgagcctgtggctgctgggcaccatcctgatcctgtgcagcgtggacaaccacggcctgagaagatgcctgatcagcaccgacatgcaccacatcgaggagagcttccaggagatcaagagagccatccaggccaaggacaccttccccaacgtgaccatcctgagcaccctggagaccctgcagatcatcaagcccctggacgtgtgctgcgtgaccaagaacctgctggccttctacgtggacagagtgttcaaggaccaccaggagcccaaccccaagatcctgagaaagatcagcagcatcgccaacagcttcctgtacatgcagaagaccctgagacagtgccaggagcagagacagtgccactgcagacaggaggccaccaacgccaccagagtgatccacgacaactacgaccagctggaggtgcacgccgccgccatcaagagcctgggcgagctggacgtgttcctggcctggatcaacaagaaccacgaggtgatgttcagcgcctag

SEQ ID NO: 85604 - DNA, 648 bp, synthetic construct
  misc_feature 1..648: note = Description of Artificial Sequence: Synthetic coding sequence
  source 1..648: mol_type = other DNA
atgtgcaccgagggcgccttcccccacagaagcgcctgcagcctgcccctgacccacgtgcacacccacatccacgtgtgcgtgcccgtgctgtggggcagcgtgcccagaggcatgaagctgcagtgcgtgagcctgtggctgctgggcaccatcctgatcctgtgcagcgtggacaaccacggcctgagaagatgcctgatcagcaccgacatgcaccacatcgaggagagcttccaggagatcaagagagccatccaggccaaggacaccttccccaacgtgaccatcctgagcaccctggagaccctgcagatcatcaagcccctggacgtgtgctgcgtgaccaagaacctgctggccttctacgtggacagagtgttcaaggaccaccaggagcccaaccccaagatcctgagaaagatcagcagcatcgccaacagcttcctgtacatgcagaagaccctgagacagtgccaggagcagagacagtgccactgcagacaggaggccaccaacgccaccagagtgatccacgacaactacgaccagctggaggtgcacgccgccgccatcaagagcctgggcgagctggacgtgttcctggcctggatcaacaagaaccacgaggtgatgttcagcgcctag

SEQ ID NO: 85605 - DNA, 792 bp, synthetic construct
  misc_feature 1..792: note = Description of Artificial Sequence: Synthetic coding sequence
  source 1..792: mol_type = other DNA
atggacagctacctgctgatgtggggcctgctgaccttcatcatggtgcccggctgccaggccgagctgtgcgacgacgacccccccgagatcccccacgccaccttcaaggccatggcctacaaggagggcaccatgctgaactgcgagtgcaagagaggcttcagaagaatcaagagcggcagcctgtacatgctgtgcaccggcaacagcagccacagcagctgggacaaccagtgccagtgcaccagcagcgccaccagaaacaccaccaagcaggtgaccccccagcccgaggagcagaaggagagaaagaccaccgagatgcagagccccatgcagcccgtggaccaggccagcctgcccggccactgcagagagccccccccctgggagaacgaggccaccgagagaatctaccacttcgtggtgggccagatggtgtactaccagtgcgtgcagggctacagagccctgcacagaggccccgccgagagcgtgtgcaagatgacccacggcaagaccagatggacccagccccagctgatctgcaccggcgaggagaagccccaggccagccccgagggcagacccgagagcgagaccagctgcctggtgaccaccaccgacttccagatccagaccgagatggccgccaccatggagaccagcatcttcaccaccgagtaccaggtggccgtggccggctgcgtgttcctgctgatcagcgtgctgctgctgagcggcctgacctggcagagaagacagagaaagagcagaagaaccatctag

SEQ ID NO: 85606 - DNA, 603 bp, synthetic construct
  misc_feature 1..603: note = Description of Artificial Sequence: Synthetic coding sequence
  source 1..603: mol_type = other DNA
atggacagctacctgctgatgtggggcctgctgaccttcatcatggtgcccggctgccaggccgagctgtgcgacgacgacccccccgagatcccccacgccaccttcaaggccatggcctacaaggagggcaccatgctgaactgcgagtgcaagagaggcttcagaagaatcaagagcggcagcctgtacatgctgtgcaccggcaacagcagccacagcagctgggacaaccagtgccagtgcaccagcagcgccaccagaaacaccaccaagcaggtgaccccccagcccgaggagcagaaggagagaaagaccaccgagatgcagagccccatgcagcccgtggaccaggccagcctgcccggcgaggagaagccccaggccagccccgagggcagacccgagagcgagaccagctgcctggtgaccaccaccgacttccagatccagaccgagatggccgccaccatggagaccagcatcttcaccaccgagtaccaggtggccgtggccggctgcgtgttcctgctgatcagcgtgctgctgctgagcggcctgacctggcagagaagacagagaaagagcagaagaaccatctag

SEQ ID NO: 85607 - DNA, 819 bp, synthetic construct
  misc_feature 1..819: note = Description of Artificial Sequence: Synthetic coding sequence
  source 1..819: mol_type = other DNA
atggacagctacctgctgatgtggggcctgctgaccttcatcatggtgcccggctgccaggccgagctgtgcgacgacgacccccccgagatcccccacgccaccttcaaggccatggcctacaaggagggcaccatgctgaactgcgagtgcaagagaggcttcagaagaatcaagagcggcagcctgtacatgctgtgcaccggcaacagcagccacagcagctgggacaaccagtgccagtgcaccagcagcgccaccagaaacaccaccaagcaggtgaccccccagcccgaggagcagaaggagagaaagaccaccgagatgcagagccccatgcagcccgtggaccaggccagcctgcccggccactgcagagagccccccccctgggagaacgaggccaccgagagaatctaccacttcgtggtgggccagatggtgtactaccagtgcgtgcagggctacagagccctgcacagaggccccgccgagagcgtgtgcaagatgacccacggcaagaccagatggacccagccccagctgatctgcaccggcgagatggagaccagccagttccccggcgaggagaagccccaggccagccccgagggcagacccgagagcgagaccagctgcctggtgaccaccaccgacttccagatccagaccgagatggccgccaccatggagaccagcatcttcaccaccgagtaccaggtggccgtggccggctgcgtgttcctgctgatcagcgtgctgctgctgagcggcctgacctggcagagaagacagagaaagagcagaagaaccatctag

SEQ ID NO: 85608 - DNA, 489 bp, synthetic construct
  misc_feature 1..489: note = Description of Artificial Sequence: Synthetic coding sequence
  source 1..489: mol_type = other DNA
atggtgcccggctgccaggccgagctgtgcgacgacgacccccccgagatcccccacgccaccttcaaggccatggcctacaaggagggcaccatgctgaactgcgagtgcaagagaggcttcagaagaatcaagagcggcagcctgtacatgctgtgcaccggcaacagcagccacagcagctgggacaaccagtgccagtgcaccagcagcgccaccagaaacaccaccaagcaggtgaccccccagcccgaggagcagaaggagagaaagaccaccgagatgcagagccccatgcagcccgtggaccaggccagcctgcccgacttccagatccagaccgagatggccgccaccatggagaccagcatcttcaccaccgagtaccaggtggccgtggccggctgcgtgttcctgctgatcagcgtgctgctgctgagcggcctgacctggcagagaagacagagaaagagcagaagaaccatctag

SEQ ID NO: 85609 - DNA, 330 bp, synthetic construct
  misc_feature 1..330: note = Description of Artificial Sequence: Synthetic coding sequence
  source 1..330: mol_type = other DNA
tgaatcccccacgccaccttcaaggccatggcctacaaggagggcaccatgctgaactgcgagtgcaagagaggcttcagaagaatcaagagcggcagcctgtacatgctgtgcaccggcaacagcagccacagcagctgggacaaccagtgccagtgcaccagcagcgccaccagaaacaccaccaagcaggtgaccccccagcccgaggagcagaaggagagaaagaccaccgagatgcagagccccatgcagcccgtggaccaggccagcctgcccgacttccagatccagaccgagatggccgccaccatggagaccagcatctag

SEQ ID NO: 85610 - DNA, 1110 bp, synthetic construct
  misc_feature 1..1110: note = Description of Artificial Sequence: Synthetic coding sequence
  source 1..1110: mol_type = other DNA
atggaccccagaaaggtgaacgagctgagagccttcgtgaagatgtgcaagcaggaccccagcgtgctgcacaccgaggagatgagattcctgagagagtgggtggagagcatgggcggcaaggtgccccccgccacccagaaggccaagagcgaggagaacaccaaggaggagaagcccgacagcaagaaggtggaggaggacctgaaggccgacgagcccagcagcgaggagagcgacctggagatcgacaaggagggcgtgatcgagcccgacaccgacgccccccaggagatgggcgacgagaacgccgagatcaccgaggagatgatggaccaggccaacgacaagaaggtggccgccatcgaggccctgaacgacggcgagctgcagaaggccatcgacctgttcaccgacgccatcaagctgaaccccagactggccatcctgtacgccaagagagccagcgtgttcgtgaagctgcagaagcccaacgccgccatcagagactgcgacagagccatcgagatcaaccccgacagcgcccagccctacaagtggagaggcaaggcccacagactgctgggccactgggaggaggccgcccacgacctggccctggcctgcaagctggactacgacgaggacgccagcgccatgctgaaggaggtgcagcccagagcccagaagatcgccgagcacagaagaaagtacgagagaaagagagaggagagagagatcaaggagagaatcgagagagtgaagaaggccagagaggagcacgagagagcccagagagaggaggaggccagaagacagagcggcgcccagtacggcagcttccccggcggcttccccggcggcatgcccggcaacttccccggcggcatgcccggcatgggcggcggcatgcccggcatggccggcatgcccggcctgaacgagatcctgagcgaccccgaggtgctggccgccatgcaggaccccgaggtgatggtggccttccaggacgtggcccagaaccccgccaacatgagcaagtaccagagcaaccccaaggtgatgaacctgatcagcaagctgagcgccaagttcggcggccaggcctag

SEQ ID NO: 85611 - DNA, 441 bp, synthetic construct
  misc_feature 1..441: note = Description of Artificial Sequence: Synthetic coding sequence
  source 1..441: mol_type = other DNA
atggccgcccccgccctgagctggagactgcccctgctgatcctgctgctgcccctggccaccagctgggccagcgccgccgtgaacggcaccagccagttcacctgcttctacaacagcagagccaacatcagctgcgtgtggagccaggacggcgccctgcaggacaccagctgccaggtgcacgcctggcccgacagaagaagatggaaccagacctgcgagctgctgcccgtgagccaggccagctgggcctgcaacctgatcctgggcgcccccgacagccagaagctgaccaccgtggacatcgtgaccctgagagtgctgtgcagagagggcgtgagatggagagtgatggccatccaggacttcaagcccttcgagaacctgagactgatggcccccatcagcctgcaggtggtgcacgtggagacccactag

SEQ ID NO: 85612 - DNA, 267 bp, synthetic construct
  misc_feature 1..267: note = Description of Artificial Sequence: Synthetic coding sequence
  source 1..267: mol_type = other DNA
atggccgcccccgccctgagctggagactgcccctgctgatcctgctgctgcccctggccaccagctgggccagcgccgccgtgaacggcaccagccagttcacctgcttctacaacagcagagccaacatcagctgcgtgtggagccaggacggcgccctgcaggacaccagctgccaggtgcacgcctggcccgacagaagaagatggaaccagacctgcgagctgctgcccgtgagccaggccagctgggcctgcaacctgtag

SEQ ID NO: 85613 - DNA, 567 bp, synthetic construct
  misc_feature 1..567: note = Description of Artificial Sequence: Synthetic coding sequence
  source 1..567: mol_type = other DNA
atggccgcccccgccctgagctggagactgcccctgctgatcctgctgctgcccctggccaccagctgggccagcgccgccgtgaacggcaccagccagttcacctgcttctacaacagcagagccaacatcagctgcgtgtggagccaggacggcgccctgcaggacaccagctgccaggtgcacgcctggcccgacagaagaagatggaaccagacctgcgagctgctgcccgtgagccaggccagctgggcctgcaacctgatcctgggcgcccccgacagccagaagctgaccaccgtggacatcgtgaccctgagagtgctgtgcagagagggcgtgagatggagagtgatggccatccaggacttcaagcccttcgagaacctgagactgatggcccccatcagcctgcaggtggtgcacgtggagacccacagatgcaacatcagctgggagatcagccaggccagccactacttcgagagacacctggagttcgaggccagaaccctgagccccggccacacctgggaggaggcccccctgctgaccctgaagcagtag

SEQ ID NO: 85614 - DNA, 297 bp, synthetic construct
  misc_feature 1..297: note = Description of Artificial Sequence: Synthetic coding sequence
  source 1..297: mol_type = other DNA
atggagccccccaaccccctgggcgagcagtacttcaagagaaccatgcccagaatccccaccctgaagaacctggaggacctggtgaccgagtaccacggcaacttcagcgcctggagcggcgtgagcaagggcctggccgagagcctgcagcccgactacagcgagagactgtgcctggtgagcgagatcccccccaagggcggcgccctgggcgagggccccggcgccagcccctgcaaccagcacagcccctactgggcccccccctgctacaccctgaagcccgagacctag

SEQ ID NO: 85615 - DNA, 474 bp, synthetic construct
  misc_feature 1..474: note = Description of Artificial Sequence: Synthetic coding sequence
  source 1..474: mol_type = other DNA
atgctgaagcccagcctgcccttcaccagcctgctgttcctgcagctgcccctgctgggcgtgggcctgaacaccaccatcctgacccccaacggcaacgaggacaccaccgccgacttcttcctgaccaccatgcccaccgacagcctgagcgtgagcaccctgcccctgcccgaggtgcagtgcttcgtgttcaacgtggagtacatgaactgcacctggaacagcagcagcgagccccagcccaccaacctgaccctgcactactggtacaagaacagcgacaacgacaaggtgcagaagtgcagccactacctgttcagcgaggagatcaccagcggctgccagctgcagaagaaggagatccacctgtaccagaccttcgtggtgcagctgcaggaccccagagagcccagaagacaggccacccagatgctgaagctgcagaacctgggcaccatcagcggcctgtag

SEQ ID NO: 85616 - DNA, 1110 bp, synthetic construct
  misc_feature 1..1110: note = Description of Artificial Sequence: Synthetic coding sequence
  source 1..1110: mol_type = other DNA
atgctgaagcccagcctgcccttcaccagcctgctgttcctgcagctgcccctgctgggcgtgggcctgaacaccaccatcctgacccccaacggcaacgaggacaccaccgccgacttcttcctgaccaccatgcccaccgacagcctgagcgtgagcaccctgcccctgcccgaggtgcagtgcttcgtgttcaacgtggagtacatgaactgcacctggaacagcagcagcgagccccagcccaccaacctgaccctgcactactggtacaagaacagcgacaacgacaaggtgcagaagtgcagccactacctgttcagcgaggagatcaccagcggctgccagctgcagaagaaggagatccacctgtaccagaccttcgtggtgcagctgcaggaccccagagagcccagaagacaggccacccagatgctgaagctgcagaacctggtgatcccctgggcccccgagaacctgaccctgcacaagctgagcgagagccagctggagctgaactggaacaacagattcctgaaccactgcctggagcacctggtgcagtacagaaccgactgggaccacagctggaccgagcagagcgtggactacagacacaagttcagcctgcccagcgtggacggccagaagagatacaccttcagagtgagaagcagattcaaccccctgtgcggcagcgcccagcactggagcgagtggagccaccccatccactggggcagcaacaccagcaaggagaaccccttcctgttcgccctggaggccgtggtgatcagcgtgggcagcatgggcctgatcatcagcctgctgtgcgtgtacttctggctggagagaaccatgcccagaatccccaccctgaagaacctggaggacctggtgaccgagtaccacggcaacttcagcgcctggagcggcgtgagcaagggcctggccgagagcctgcagcccgactacagcgagagactgtgcctggtgagcgagatcccccccaagggcggcgccctgggcgagggccccggcgccagcccctgcaaccagcacagcccctactgggcccccccctgctacaccctgaagcccgagacctag

SEQ ID NO: 85617 - DNA, 540 bp, synthetic construct
  misc_feature 1..540: note = Description of Artificial Sequence: Synthetic coding sequence
  source 1..540: mol_type = other DNA
atgggcatgaagaccccccagctggagcagagcgtggactacagacacaagttcagcctgcccagcgtggacggccagaagagatacaccttcagagtgagaagcagattcaaccccctgtgcggcagcgcccagcactggagcgagtggagccaccccatccactggggcagcaacaccagcaaggagaaccccttcctgttcgccctggaggccgtggtgatcagcgtgggcagcatgggcctgatcatcagcctgctgtgcgtgtacttctggctggagagaaccatgcccagaatccccaccctgaagaacctggaggacctggtgaccgagtaccacggcaacttcagcgcctggagcggcgtgagcaagggcctggccgagagcctgcagcccgactacagcgagagactgtgcctggtgagcgagatcccccccaagggcggcgccctgggcgagggccccggcgccagcccctgcaaccagcacagcccctactgggcccccccctgctacaccctgaagcccgagacctag

SEQ ID NO: 85618 - DNA, 1662 bp, synthetic construct
  misc_feature 1..1662: note = Description of Artificial Sequence: Synthetic coding sequence
  source 1..1662: mol_type = other DNA
atgagagcccccggcagacccgccctgagacccctgcccctgccccccctgctgctgctgctgctggccgccccctggggcagagccgtgccctgcgtgagcggcggcctgcccaagcccgccaacatcaccttcctgagcatcaacatgaagaacgtgctgcagtggaccccccccgagggcctgcagggcgtgaaggtgacctacaccgtgcagtacttcatctacggccagaagaagtggctgaacaagagcgagtgcagaaacatcaacagaacctactgcgacctgagcgccgagaccagcgactacgagcaccagtactacgccaaggtgaaggccatctggggcaccaagtgcagcaagtgggccgagagcggcagattctaccccttcctggagacccagatcggcccccccgaggtggccctgaccaccgacgagaagagcatcagcgtggtgctgaccgcccccgagaagtggaagagaaaccccgaggacctgcccgtgagcatgcagcagatctacagcaacctgaagtacaacgtgagcgtgctgaacaccaagagcaacagaacctggagccagtgcgtgaccaaccacaccctggtgctgacctggctggagcccaacaccctgtactgcgtgcacgtggagagcttcgtgcccggcccccccagaagagcccagcccagcgagaagcagtgcgccagaaccctgaaggaccagagcagcgagttcaaggccaagatcatcttctggtacgtgctgcccgtgagcatcaccgtgttcctgttcagcgtgatgggctacagcatctacagatacatccacgtgggcaaggagaagcaccccgccaacctgatcctgatctacggcaacgagttcgacaagagattcttcgtgcccgccgagaagatcgtgatcaacttcatcaccctgaacatcagcgacgacagcaagatcagccaccaggacatgagcctgctgggcaagagcagcgacgtgagcagcctgaacgacccccagcccagcggcaacctgagacccccccaggaggaggaggaggtgaagcacctgggctacgccagccacctgatggagatcttctgcgacagcgaggagaacaccgagggcaccagcctgacccagcaggagagcctgagcagaaccatcccccccgacaagaccgtgatcgagtacgagtacgacgtgagaaccaccgacatctgcgccggccccgaggagcaggagctgagcctgcaggaggaggtgagcacccagggcaccctgctggagagccaggccgccctggccgtgctgggcccccagaccctgcagtacagctacaccccccagctgcaggacctggaccccctggcccaggagcacaccgacagcgaggagggccccgaggaggagcccagcaccaccctggtggactgggacccccagaccggcagactgtgcatccccagcctgagcagcttcgaccaggacagcgagggctgcgagcccagcgagggcgacggcctgggcgaggagggcctgctgagcagactgtacgaggagcccgcccccgacagaccccccggcgagaacgagacctacctgatgcagttcatggaggagtggggcctgtacgtgcagatggagaactag

SEQ ID NO: 85619 - DNA, 630 bp, synthetic construct
  misc_feature 1..630: note = Description of Artificial Sequence: Synthetic coding sequence
  source 1..630: mol_type = other DNA
atgagagcccccggcagacccgccctgagacccctgcccctgccccccctgctgctgctgctgctggccgccccctggggcagagccgtgccctgcgtgagcggcggcctgcccaagcccgccaacatcaccttcctgagcatcaacatgaagaacgtgctgcagtggaccccccccgagggcctgcagggcgtgaaggtgacctacaccgtgcagtacttcatctacggccagaagaagtggctgaacaagagcgagtgcagaaacatcaacagaacctactgcgacctgagcgccgagaccagcgactacgagcaccagtactacgccaaggtgaaggccatctggggcaccaagtgcagcaagtgggccgagagcggcagattctaccccttcctggagacccagatcggcccccccgaggtggccctgaccaccgacgagaagagcatcagcgtggtgctgaccgcccccgagaagtggaagagaaaccccgaggacctgcccgtgagcatgcagcagatctacagcaacctgaagtacaacgtgagcgtgctgaacaccaagagcaacagaaccgtgagcctgaagtggaacggcgcctacatccacgtgcccctgtgcagctag

SEQ ID NO: 85620 - DNA, 1329 bp, synthetic construct
  misc_feature 1..1329: note = Description of Artificial Sequence: Synthetic coding sequence
  source 1..1329: mol_type = other DNA
atgagctacaacggcctgcaccagagagtgttcaaggagctgaagctgctgaccctgtgcagcatcagcagccagatcggcccccccgaggtggccctgaccaccgacgagaagagcatcagcgtggtgctgaccgcccccgagaagtggaagagaaaccccgaggacctgcccgtgagcatgcagcagatctacagcaacctgaagtacaacgtgagcgtgctgaacaccaagagcaacagaacctggagccagtgcgtgaccaaccacaccctggtgctgacctggctggagcccaacaccctgtactgcgtgcacgtggagagcttcgtgcccggcccccccagaagagcccagcccagcgagaagcagtgcgccagaaccctgaaggaccagagcagcgagttcaaggccaagatcatcttctggtacgtgctgcccgtgagcatcaccgtgttcctgttcagcgtgatgggctacagcatctacagatacatccacgtgggcaaggagaagcaccccgccaacctgatcctgatctacggcaacgagttcgacaagagattcttcgtgcccgccgagaagatcgtgatcaacttcatcaccctgaacatcagcgacgacagcaagatcagccaccaggacatgagcctgctgggcaagagcagcgacgtgagcagcctgaacgacccccagcccagcggcaacctgagacccccccaggaggaggaggaggtgaagcacctgggctacgccagccacctgatggagatcttctgcgacagcgaggagaacaccgagggcaccagcctgacccagcaggagagcctgagcagaaccatcccccccgacaagaccgtgatcgagtacgagtacgacgtgagaaccaccgacatctgcgccggccccgaggagcaggagctgagcctgcaggaggaggtgagcacccagggcaccctgctggagagccaggccgccctggccgtgctgggcccccagaccctgcagtacagctacaccccccagctgcaggacctggaccccctggcccaggagcacaccgacagcgaggagggccccgaggaggagcccagcaccaccctggtggactgggacccccagaccggcagactgtgcatccccagcctgagcagcttcgaccaggacagcgagggctgcgagcccagcgagggcgacggcctgggcgaggagggcctgctgagcagactgtacgaggagcccgcccccgacagaccccccggcgagaacgagacctacctgatgcagttcatggaggagtggggcctgtacgtgcagatggagaactag

SEQ ID NO: 85621 - DNA, 1515 bp, synthetic construct
  misc_feature 1..1515: note = Description of Artificial Sequence: Synthetic coding sequence
  source 1..1515: mol_type = other DNA
atgaagaacgtgctgcagtggaccccccccgagggcctgcagggcgtgaaggtgacctacaccgtgcagtacttcatctacggccagaagaagtggctgaacaagagcgagtgcagaaacatcaacagaacctactgcgacctgagcgccgagaccagcgactacgagcaccagtactacgccaaggtgaaggccatctggggcaccaagtgcagcaagtgggccgagagcggcagattctaccccttcctggagacccagatcggcccccccgaggtggccctgaccaccgacgagaagagcatcagcgtggtgctgaccgcccccgagaagtggaagagaaaccccgaggacctgcccgtgagcatgcagcagatctacagcaacctgaagtacaacgtgagcgtgctgaacaccaagagcaacagaacctggagccagtgcgtgaccaaccacaccctggtgctgacctggctggagcccaacaccctgtactgcgtgcacgtggagagcttcgtgcccggcccccccagaagagcccagcccagcgagaagcagtgcgccagaaccctgaaggaccagagcagcgagttcaaggccaagatcatcttctggtacgtgctgcccgtgagcatcaccgtgttcctgttcagcgtgatgggctacagcatctacagatacatccacgtgggcaaggagaagcaccccgccaacctgatcctgatctacggcaacgagttcgacaagagattcttcgtgcccgccgagaagatcgtgatcaacttcatcaccctgaacatcagcgacgacagcaagatcagccaccaggacatgagcctgctgggcaagagcagcgacgtgagcagcctgaacgacccccagcccagcggcaacctgagacccccccaggaggaggaggaggtgaagcacctgggctacgccagccacctgatggagatcttctgcgacagcgaggagaacaccgagggcaccagcctgacccagcaggagagcctgagcagaaccatcccccccgacaagaccgtgatcgagtacgagtacgacgtgagaaccaccgacatctgcgccggccccgaggagcaggagctgagcctgcaggaggaggtgagcacccagggcaccctgctggagagccaggccgccctggccgtgctgggcccccagaccctgcagtacagctacaccccccagctgcaggacctggaccccctggcccaggagcacaccgacagcgaggagggccccgaggaggagcccagcaccaccctggtggactgggacccccagaccggcagactgtgcatccccagcctgagcagcttcgaccaggacagcgagggctgcgagcccagcgagggcgacggcctgggcgaggagggcctgctgagcagactgtacgaggagcccgcccccgacagaccccccggcgagaacgagacctacctgatgcagttcatggaggagtggggcctgtacgtgcagatggagaactag

SEQ ID NO: 85622 - DNA, 1617 bp, synthetic construct
  misc_feature 1..1617: note = Description of Artificial Sequence: Synthetic coding sequence
  source 1..1617: mol_type = other DNA
atgcccagaggctgggccgcccccctgctgctgctgctgctgcagggcggctggggctgccccgacctggtgtgctacaccgactacctgcagaccgtgatctgcatcctggagatgtggaacctgcaccccagcaccctgaccctgacctggcaggaccagtacgaggagctgaaggacgaggccaccagctgcagcctgcacagaagcgcccacaacgccacccacgccacctacacctgccacatggacgtgttccacttcatggccgacgacatcttcagcgtgaacatcaccgaccagagcggcaactacagccaggagtgcggcagcttcctgctggccgagagcatcaagcccgccccccccttcaacgtgaccgtgaccttcagcggccagtacaacatcagctggagaagcgactacgaggaccccgccttctacatgctgaagggcaagctgcagtacgagctgcagtacagaaacagaggcgacccctgggccgtgagccccagaagaaagctgatcagcgtggacagcagaagcgtgagcctgctgcccctggagttcagaaaggacagcagctacgagctgcaggtgagagccggccccatgcccggcagcagctaccagggcacctggagcgagtggagcgaccccgtgatcttccagacccagagcgaggagctgaaggagggctggaacccccacctgctgctgctgctgctgctggtgatcgtgttcatccccgccttctggagcctgaagacccaccccctgtggagactgtggaagaagatctgggccgtgcccagccccgagagattcttcatgcccctgtacaagggctgcagcggcgacttcaagaagtgggtgggcgcccccttcaccggcagcagcctggagctgggcccctggagccccgaggtgcccagcaccctggaggtgtacagctgccacccccccagaagccccgccaagagactgcagctgaccgagctgcaggagcccgccgagctggtggagagcgacggcgtgcccaagcccagcttctggcccaccgcccagaacagcggcggcagcgcctacagcgaggagagagacagaccctacggcctggtgagcatcgacaccgtgaccgtgctggacgccgagggcccctgcacctggccctgcagctgcgaggacgacggctaccccgccctggacctggacgccggcctggagcccagccccggcctggaggaccccctgctggacgccggcaccaccgtgctgagctgcggctgcgtgagcgccggcagccccggcctgggcggccccctgggcagcctgctggacagactgaagccccccctggccgacggcgaggactgggccggcggcctgccctggggcggcagaagccccggcggcgtgagcgagagcgaggccggcagccccctggccggcctggacatggacaccttcgacagcggcttcgtgggcagcgactgcagcagccccgtggagtgcgacttcaccagccccggcgacgagggcccccccagaagctacctgagacagtgggtggtgatccccccccccctgagcagccccggcccccaggccagctag

SEQ ID NO: 85623 - DNA, 1617 bp, synthetic construct; identical to SEQ ID NO: 85622
  misc_feature 1..1617: note = Description of Artificial Sequence: Synthetic coding sequence
  source 1..1617: mol_type = other DNA

SEQ ID NO: 85624 - DNA, 1617 bp, synthetic construct; identical to SEQ ID NO: 85622
  misc_feature 1..1617: note = Description of Artificial Sequence: Synthetic coding sequence
  source 1..1617: mol_type = other DNA

SEQ ID NO: 85625 - DNA, 792 bp, synthetic construct
  misc_feature 1..792: note = Description of Artificial Sequence: Synthetic coding sequence
  source 1..792: mol_type = other DNA
atgatgcccaagcactgcttcctgggcttcctgatcagcttcttcctgaccggcgtggccggcacccagagcacccacgagagcctgaagccccagagagtgcagttccagagcagaaacttccacaacatcctgcagtggcagcccggcagagccctgaccggcaacagcagcgtgtacttcgtgcagtacaagatcatgttcagctgcagcatgaagagcagccaccagaagcccagcggctgctggcagcacatcagctgcaacttccccggctgcagaaccctggccaagtacggccagagacagtggaagaacaaggaggactgctggggcacccaggagctgagctgcgacctgaccagcgagaccagcgacatccaggagccctactacggcagagtgagagccgccagcgccggcagctacagcgagtggagcatgacccccagattcaccccctggtgggagaccaagatcgacccccccgtgatgaacatcacccaggtgaacggcagcctgctggtgatcctgcacgcccccaacctgccctacagataccagaaggagaagaacgtgagcatcgaggactactacgagctgctgtacagagtgttcatcatcaacaacagcctggagaaggagcagaaggtgtacgagggcgcccacagagccgtggagatcgaggccctgaccccccacagcagctactgcgtggtggccgagatctaccagcccatgctggacagaagaagccagagaagcgaggagagatgcgtggagatcccctag

SEQ ID NO: 85626 - DNA, 393 bp, synthetic construct
  misc_feature 1..393: note = Description of Artificial Sequence: Synthetic coding sequence
  source 1..393: mol_type = other DNA
atgatgcccaagcactgcttcctgggcttcctgatcagcttcttcctgaccggcgtggccggcacccagagcacccacgagagcctgaagccccagagagtgcagttccagagcagaaacttccacaacatcctgcagtggcagcccggcagagccctgaccggcaacagcagcgtgtacttcgtgcagtacaagatctacggccagagacagtggaagaacaaggaggactgctggggcacccaggagctgagctgcgacctgaccagcgagaccagcgacatccaggagccctactacggcagagtgagagccgccagcgccggcagctacagcgagtggagcatgacccccagattcaccccctggtgggagagagccaagggcctgtag

SEQ ID NO: 85627 - DNA, 696 bp, synthetic construct
  misc_feature 1..696: note = Description of Artificial Sequence: Synthetic coding sequence
  source 1..696: mol_type = other DNA
atgatgcccaagcactgcttcctgggcttcctgatcagcttcttcctgaccggcgtggccggcacccagagcacccacgagagcctgaagccccagagagtgcagttccagagcagaaacttccacaacatcctgcagtggcagcccggcagagccctgaccggcaacagcagcgtgtacttcgtgcagtacaagatctacggccagagacagtggaagaacaaggaggactgctggggcacccaggagctgagctgcgacctgaccagcgagaccagcgacatccaggagccctactacggcagagtgagagccgccagcgccggcagctacagcgagtggagcatgacccccagattcaccccctggtgggagaccaagatcgacccccccgtgatgaacatcacccaggtgaacggcagcctgctggtgatcctgcacgcccccaacctgccctacagataccagaaggagaagaacgtgagcatcgaggactactacgagctgctgtacagagtgttcatcatcaacaacagcctggagaaggagcagaaggtgtacgagggcgcccacagagccgtggagatcgaggccctgaccccccacagcagctactgcgtggtggccgagatctaccagcccatgctggacagaagaagccagagaagcgaggagagatgcgtggagatcccctag

SEQ ID NO: 85628 - DNA, 1563 bp, synthetic construct
  misc_feature 1..1563: note = Description of Artificial Sequence: Synthetic coding sequence
  source 1..1563: mol_type = other DNA
atggccggccccgagagatggggccccctgctgctgtgcctgctgcaggccgcccccggcagacccagactggcccccccccagaacgtgaccctgctgagccagaacttcagcgtgtacctgacctggctgcccggcctgggcaacccccaggacgtgacctacttcgtggcctaccagagcagccccaccagaagaagatggagagaggtggaggagtgcgccggcaccaaggagctgctgtgcagcatgatgtgcctgaagaagcaggacctgtacaacaagttcaagggcagagtgagaaccgtgagccccagcagcaagagcccctgggtggagagcgagtacctggactacctgttcgaggtggagcccgccccccccgtgctggtgctgacccagaccgaggagatcctgagcgccaacgccacctaccagctgcccccctgcatgccccccctggacctgaagtacgaggtggccttctggaaggagggcgccggcaacaagaccctgttccccgtgaccccccacggccagcccgtgcagatcaccctgcagcccgccgccagcgagcaccactgcctgagcgccagaaccatctacaccttcagcgtgcccaagtacagcaagttcagcaagcccacctgcttcctgctggaggtgcccgaggccaactgggccttcctggtgctgcccagcctgctgatcctgctgctggtgatcgccgccggcggcgtgatctggaagaccctgatgggcaacccctggttccagagagccaagatgcccagagccctggacttcagcggccacacccaccccgtggccaccttccagcccagcagacccgagagcgtgaacgacctgttcctgtgcccccagaaggagctgaccagaggcgtgagacccacccccagagtgagagcccccgccacccagcagaccagatggaagaaggacctggccgaggacgaggaggaggaggacgaggaggacaccgaggacggcgtgagcttccagccctacatcgagccccccagcttcctgggccaggagcaccaggcccccggccacagcgaggccggcggcgtggacagcggcagacccagagcccccctggtgcccagcgagggcagcagcgcctgggacagcagcgacagaagctgggccagcaccgtggacagcagctgggacagagccggcagcagcggctacctggccgagaagggccccggccagggccccggcggcgacggccaccaggagagcctgcccccccccgagttcagcaaggacagcggcttcctggaggagctgcccgaggacaacctgagcagctgggccacctggggcaccctgccccccgagcccaacctggtgcccggcggcccccccgtgagcctgcagaccctgaccttctgctgggagagcagccccgaggaggaggaggaggccagagagagcgagatcgaggacagcgacgccggcagctggggcgccgagagcacccagagaaccgaggacagaggcagaaccctgggccactacatggccagatag

SEQ ID NO: 85629 - DNA, 735 bp, synthetic construct
  misc_feature 1..735: note = Description of Artificial Sequence: Synthetic coding sequence
  source 1..735: mol_type = other DNA
atggccggccccgagagatggggccccctgctgctgtgcctgctgcaggccgcccccggcagacccagactggcccccccccagaacgtgaccctgctgagccagaacttcagcgtgtacctgacctggctgcccggcctgggcaacccccaggacgtgacctacttcgtggcctaccagagcagccccaccagaagaagatggagagaggtggaggagtgcgccggcaccaaggagctgctgtgcagcatgatgtgcctgaagaagcaggacctgtacaacaagttcaagggcagagtgagaaccgtgagccccagcagcaagagcccctgggtggagagcgagtacctggactacctgttcgaggtggagcccgccccccccgtgctggtgctgacccagaccgaggagatcctgagcgccaacgccacctaccagctgcccccctgcatgccccccctggacctgaagtacgaggtggccttctggaaggagggcgccggcaacaagaccctgttccccgtgaccccccacggccagcccgtgcagatcaccctgcagcccgccgccagcgagcaccactgcctgagcgccagaaccatctacaccttcagcgtgcccaagtacagcaagttcagcaagcccacctgcttcctgctggaggtgcccggcctgttctggacccacaccccctgcggcaacctgagcgcccagcagaccagagtgagagagtag

SEQ ID NO: 85630 - DNA, 636 bp, synthetic construct
  misc_feature 1..636: note = Description of Artificial Sequence: Synthetic coding sequence
  source 1..636: mol_type = other DNA
atggccggccccgagagatggggccccctgctgctgtgcctgctgcaggccgcccccggcagacccagactggcccccccccagaacgtgaccctgctgagccagaacttcagcgtgtacctgacctggctgcccggcctgggcaacccccaggacgtgacctacttcgtggcctaccagagcagccccaccagaagaagatggagagaggtggaggagtgcgccggcaccaaggagctgctgtgcagcatgatgtgcctgaagaagcaggacctgtacaacaagttcaagggcagagtgagaaccgtgagccccagcagcaagagcccctgggtggagagcgagtacctggactacctgttcgaggtggagcccgccccccccgtgctggtgctgacccagaccgaggagatcctgagcgccaacgccacctaccagctgcccccctgcatgccccccctggacctgaagtacgaggtggccttctggaaggagggcgccggcaacaaggtgggcagcagcttccccgcccccagactgggccccctgctgcaccccttcctgctgagattcttcagccccagccagcccgcccccgcccccctgctgcaggaggtgttccccgtgcacagctag

SEQ ID NO: 85631 - DNA, 558 bp, synthetic construct
  misc_feature 1..558: note = Description of Artificial Sequence: Synthetic coding sequence
  source 1..558: mol_type = other DNA
atgatgtgcctgaagaagcaggacctgtacaacaagttcaagggcagagtgagaaccgtgagccccagcagcaagagcccctgggtggagagcgagtacctggactacctgttcgaggtggagcccgccccccccgtgctggtgctgacccagaccgaggagatcctgagcgccaacgccacctaccagctgcccccctgcatgccccccctggacctgaagtacgaggtggccttctggaaggagggcgccggcaacaagaccctgttccccgtgaccccccacggccagcccgtgcagatcaccctgcagcccgccgccagcgagcaccactgcctgagcgccagaaccatctacaccttcagcgtgcccaagtacagcaagttcagcaagcccacctgcttcctgctggaggtgcccgaggccaactgggccttcctggtgctgcccagcctgctgatcctgctgctggtgatcgccgccggcggcgtgatctggaagaccctgatgggcaacccctggttccagagagccaagatgcccagagccctggtgtag

SEQ ID NO: 85632 - DNA, 1476 bp, synthetic construct
  misc_feature 1..1476: note = Description of Artificial Sequence: Synthetic coding sequence
  source 1..1476: mol_type = other DNA
atggccggccccgagagatggggccccctgctgctgtgcctgctgcaggccgcccccggcagacccagactggcccccccccagaacgtgaccctgctgagccagaacttcagcgtgtacctgacctggctgcccggcctgggcaacccccaggacgtgacctacttcgtggcctaccagagcagccccaccagaagaagatggagagaggtggaggagtgcgccggcaccaaggagctgctgtgcagcatgatgtgcctgaagaagcaggacctgtacaacaagttcaagggcagagtgagaaccgtgagccccagcagcaagagcccctgggtggagagcgagtacctggactacctgttcgaggtggagcccgccccccccgtgctggtgctgacccagaccgaggagatcctgagcgccaacgccacctaccagctgcccccctgcatgccccccctggacctgaagtacgaggtggccttctggaaggagggcgccggcaacaagaccctgttccccgtgaccccccacggccagcccgtgcagatcaccctgcagcccgccgccagcgagcaccactgcctgagcgccagaaccatctacaccttcagcgtgcccaagtacagcaagttcagcaagcccacctgcttcctgctggaggtgcccgaggccaactgggccttcctggtgctgcccagcctgctgatcctgctgctggtgatcgccgccggcggcgtgatctggaagaccctgatgggcaacccctggttccagagagccaagatgcccagagccctggagctgaccagaggcgtgagacccacccccagagtgagagcccccgccacccagcagaccagatggaagaaggacctggccgaggacgaggaggaggaggacgaggaggacaccgaggacggcgtgagcttccagccctacatcgagccccccagcttcctgggccaggagcaccaggcccccggccacagcgaggccggcggcgtggacagcggcagacccagagcccccctggtgcccagcgagggcagcagcgcctgggacagcagcgacagaagctgggccagcaccgtggacagcagctgggacagagccggcagcagcggctacctggccgagaagggccccggccagggccccggcggcgacggccaccaggagagcctgcccccccccgagttcagcaaggacagcggcttcctggaggagctgcccgaggacaacctgagcagctgggccacctggggcaccctgccccccgagcccaacctggtgcccggcggcccccccgtgagcctgcagaccctgaccttctgctgggagagcagccccgaggaggaggaggaggccagagagagcgagatcgaggacagcgacgccggcagctggggcgccgagagcacccagagaaccgaggacagaggcagaaccctgggccactacatggccagatag

SEQ ID NO: 85633 - DNA, 459 bp, synthetic construct
  misc_feature 1..459: note = Description of Artificial Sequence: Synthetic coding sequence
  source 1..459: mol_type = other DNA
atgagcagactgcccgtgctgctgctgctgcagctgctggtgagacccggcctgcaggcccccatgacccagaccacccccctgaagaccagctgggtgaactgcagcaacatgatcgacgagatcatcacccacctgaagcagccccccctgcccctgctggacttcaacaacctgaacggcgaggaccaggacatcctgatggagaacaacctgagaagacccaacctggaggccttcaacagagccgtgaagagcctgcagaacgccagcgccatcgagagcatcctgaagaacctgctgccctgcctgcccctggccaccgccgcccccaccagacaccccatccacatcaaggacggcgactggaacgagttcagaagaaagctgaccttctacctgaagaccctggagaacgcccaggcccagcagaccaccctgagcctggccatcttctag

SEQ ID NO: 85634 - DNA, 1137 bp, synthetic construct
  misc_feature 1..1137: note = Description of Artificial Sequence: Synthetic coding sequence
  source 1..1137: mol_type = other DNA
atggtgctgctgtggctgaccctgctgctgatcgccctgccctgcctgctgcagaccaaggaggaccccaacccccccatcaccaacctgagaatgaaggccaaggcccagcagctgacctgggacctgaacagaaacgtgaccgacatcgagtgcgtgaaggacgccgactacagcatgcccgccgtgaacaacagctactgccagttcggcgccatcagcctgtgcgaggtgaccaactacaccgtgagagtggccaacccccccttcagcacctggatcctgttccccgagaacagcggcaagccctgggccggcgccgagaacctgacctgctggatccacgacgtggacttcctgagctgcagctgggccgtgggccccggcgcccccgccgacgtgcagtacgacctgtacctgaacgtggccaacagaagacagcagtacgagtgcctgcactacaagaccgacgcccagggcaccagaatcggctgcagattcgacgacatcagcagactgagcagcggcagccagagcagccacatcctggtgagaggcagaagcgccgccttcggcatcccctgcaccgacaagttcgtggtgttcagccagatcgagatcctgaccccccccaacatgaccgccaagtgcaacaagacccacagcttcatgcactggaagatgagaagccacttcaacagaaagttcagatacgagctgcagatccagaagagaatgcagcccgtgatcaccgagcaggtgagagacagaaccagcttccagctgctgaaccccggcacctacaccgtgcagatcagagccagagagagagtgtacgagttcctgagcgcctggagcaccccccagagattcgagtgcgaccaggaggagggcgccaacaccagagcctggagaaccagcctgctgatcgccctgggcaccctgctggccctggtgtgcgtgttcgtgatctgcagaagatacctggtgatgcagagactgttccccagaatcccccacatgaaggaccccatcggcgacagcttccagaacgacaagctggtggtgtgggaggccggcaaggccggcctggaggagtgcctggtgaccgaggtgcaggtggtgcagaagacctag

SEQ ID NO: 85635 - DNA, 903 bp, synthetic construct
  misc_feature 1..903: note = Description of Artificial Sequence: Synthetic coding sequence
  source 1..903: mol_type = other DNA
atggtgctgctgtggctgaccctgctgctgatcgccctgccctgcctgctgcagaccaaggagggcggcaagccctgggccggcgccgagaacctgacctgctggatccacgacgtggacttcctgagctgcagctgggccgtgggccccggcgcccccgccgacgtgcagtacgacctgtacctgaacgtggccaacagaagacagcagtacgagtgcctgcactacaagaccgacgcccagggcaccagaatcggctgcagattcgacgacatcagcagactgagcagcggcagccagagcagccacatcctggtgagaggcagaagcgccgccttcggcatcccctgcaccgacaagttcgtggtgttcagccagatcgagatcctgaccccccccaacatgaccgccaagtgcaacaagacccacagcttcatgcactggaagatgagaagccacttcaacagaaagttcagatacgagctgcagatccagaagagaatgcagcccgtgatcaccgagcaggtgagagacagaaccagcttccagctgctgaaccccggcacctacaccgtgcagatcagagccagagagagagtgtacgagttcctgagcgcctggagcaccccccagagattcgagtgcgaccaggaggagggcgccaacaccagagcctggagaaccagcctgctgatcgccctgggcaccctgctggccctggtgtgcgtgttcgtgatctgcagaagatacctggtgatgcagagactgttccccagaatcccccacatgaaggaccccatcggcgacagcttccagaacgacaagctggtggtgtgggaggccggcaaggccggcctggaggagtgcctggtgaccgaggtgcaggtggtgcagaagacctag

SEQ ID NO: 85636 - DNA, 495 bp, synthetic construct
  misc_feature 1..495: note = Description of Artificial Sequence: Synthetic coding sequence
  source 1..495: mol_type = other DNA
atggtgctgctgtggctgaccctgctgctgatcgccctgccctgcctgctgcagaccaaggagggcggcaagccctgggccggcgccgagaacctgacctgctggatccacgacgtggacttcctgagctgcagctgggccgtgggccccggcgcccccgccgacgtgcagtacgacctgtacctgaacgtggccaacagaagacagcagtacgagtgcctgcactacaagaccgacgcccagggcaccagaatcggctgcagattcgacgacatcagcagactgagcagcggcagccagagcagccacatcctggtgagaggcagaagcgccgccttcggcatcccctgcaccgacaagttcgtggtgttcagccagatcgagatcctgaccccccccaacatgaccgccaagtgcaacaagacccacagcttcatgcactggaagatgagaagccacttcaacagaaagttcagatacgagctgcagatctag

SEQ ID NO: 85637 - DNA, 1323 bp, synthetic construct
  misc_feature 1..1323: note = Description of Artificial Sequence: Synthetic coding sequence
  source 1..1323: mol_type = other DNA
atgacctactggagactggagaacatcgccaagaccgagccccccaagatcttcagagtgaagcccgtgctgggcatcaagagaatgatccagatcgagtggatcaagcccgagctggcccccgtgagcagcgacctgaagtacaccctgagattcagaaccgtgaacagcaccagctggatggaggtgaacttcgccaagaacagaaaggacaagaaccagacctacaacctgaccggcctgcagcccttcaccgagtacgtgatcgccctgagatgcgccgtgaaggagagcaagttctggagcgactggagccaggagaagatgggcatgaccgaggaggaggccccctgcggcctggagctgtggagagtgctgaagcccgccgaggccgacggcagaagacccgtgagactgctgtggaagaaggccagaggcgcccccgtgctggagaagaccctgggctacaacatctggtactaccccgagagcaacaccaacctgaccgagaccatgaacaccaccaaccagcagctggagctgcacctgggcggcgagagcttctgggtgagcatgatcagctacaacagcctgggcaagagccccgtggccaccctgagaatccccgccatccaggagaagagcttccagtgcatcgaggtgatgcaggcctgcgtggccgaggaccagctggtggtgaagtggcagagcagcgccctggacgtgaacacctggatgatcgagtggttccccgacgtggacagcgagcccaccaccctgagctgggagagcgtgagccaggccaccaactggaccatccagcaggacaagctgaagcccttctggtgctacaacatcagcgtgtaccccatgctgcacgacaaggtgggcgagccctacagcatccaggcctacgccaaggagggcgtgcccagcgagggccccgagaccaaggtggagaacatcggcgtgaagaccgtgaccatcacctggaaggagatccccaagagcgagagaaagggcatcatctgcaactacaccatcttctaccaggccgagggcggcaagggcttctgcaagcacgcccacagcgaggtggagaagaaccccaagccccagatcgacgccatggacagacccgtggtgggcatggccccccccagccactgcgacctgcagcccggcatgaaccacctggccagcctgaacctgagcgagaacggcgccaagagcacccacctgctgggcttctggggcctgaacgagagcgaggtgaccgtgcccgagagaagagtgctgagaaagtggaaggagctgctgtag

SEQ ID NO: 85638 - DNA, 1989 bp, synthetic construct
  misc_feature 1..1989: note = Description of Artificial Sequence: Synthetic coding sequence
  source 1..1989: mol_type = other DNA
atgaagctgagcccccagcccagctgcgtgaacctgggcatgatgtggacctgggccctgtggatgctgcccagcctgtgcaagttcagcctggccgccctgcccgccaagcccgagaacatcagctgcgtgtactactacagaaagaacctgacctgcacctggagccccggcaaggagaccagctacacccagtacaccgtgaagagaacctacgccttcggcgagaagcacgacaactgcaccaccaacagcagcaccagcgagaacagagccagctgcagcttcttcctgcccagaatcaccatccccgacaactacaccatcgaggtggaggccgagaacggcgacggcgtgatcaagagccacatgacctactggagactggagaacatcgccaagaccgagccccccaagatcttcagagtgaagcccgtgctgggcatcaagagaatgatccagatcgagtggatcaagcccgagctggcccccgtgagcagcgacctgaagtacaccctgagattcagaaccgtgaacagcaccagctggatggaggtgaacttcgccaagaacagaaaggacaagaaccagacctacaacctgaccggcctgcagcccttcaccgagtacgtgatcgccctgagatgcgccgtgaaggagagcaagttctggagcgactggagccaggagaagatgggcatgaccgaggaggaggccccctgcggcctggagctgtggagagtgctgaagcccgccgaggccgacggcagaagacccgtgagactgctgtggaagaaggccagaggcgcccccgtgctggagaagaccctgggctacaacatctggtactaccccgagagcaacaccaacctgaccgagaccatgaacaccaccaaccagcagctggagctgcacctgggcggcgagagcttctgggtgagcatgatcagctacaacagcctgggcaagagccccgtggccaccctgagaatccccgccatccaggagaagagcttccagtgcatcgaggtgatgcaggcctgcgtggccgaggaccagctggtggtgaagtggcagagcagcgccctggacgtgaacacctggatgatcgagtggttccccgacgtggacagcgagcccaccaccctgagctgggagagcgtgagccaggccaccaactggaccatccagcaggacaagctgaagcccttctggtgctacaacatcagcgtgtaccccatgctgcacgacaaggtgggcgagccctacagcatccaggcctacgccaaggagggcgtgcccagcgagggccccgagaccaaggtggagaacatcggcgtgaagaccgtgaccatcacctggaaggagatccccaagagcgagagaaagggcatcatctgcaactacaccatcttctaccaggccgagggcggcaagggcttcagcaagaccgtgaacagcagcatcctgcagtacggcctggagagcctgaagagaaagaccagctacatcgtgcaggtgatggccagcaccagcgccggcggcaccaacggcaccagcatcaacttcaagaccctgagcttcagcgtgttcgagatcatcctgatcaccagcctgatcggcggcggcctgctgatcctgatcatcctgaccgtggcctacggcctgaagaagcccaacaagctgacccacctgtgctggcccaccgtgcccaaccccgccgagagcagcatcgccacctggcacggcgacgacttcaaggacaagctgaacctgaaggagagcgacgacagcgtgaacaccgaggacagaatcctgaagccctgcagcacccccagcgacaagctggtgatcgacaagctggtggtgaacttcggcaacgtgctgcaggagatcttcaccgacgaggccagaaccggccaggagaacaacctgggcggcgagaagaacggcaccagaatcctgagcagctgccccaccagcatctag

SEQ ID NO: 85639 - DNA, 2046 bp, synthetic construct
  misc_feature 1..2046: note = Description of Artificial Sequence: Synthetic coding sequence
  source 1..2046: mol_type = other DNA
atgtgcatcagacagctgaagttcttcaccaccgcctgcgtgtgcgagtgcccccagaacatcctgagcccccagcccagctgcgtgaacctgggcatgatgtggacctgggccctgtggatgctgcccagcctgtgcaagttcagcctggccgccctgcccgccaagcccgagaacatcagctgcgtgtactactacagaaagaacctgacctgcacctggagccccggcaaggagaccagctacacccagtacaccgtgaagagaacctacgccttcggcgagaagcacgacaactgcaccaccaacagcagcaccagcgagaacagagccagctgcagcttcttcctgcccagaatcaccatccccgacaactacaccatcgaggtggaggccgagaacggcgacggcgtgatcaagagccacatgacctactggagactggagaacatcgccaagaccgagccccccaagatcttcagagtgaagcccgtgctgggcatcaagagaatgatccagatcgagtggatcaagcccgagctggcccccgtgagcagcgacctgaagtacaccctgagattcagaaccgtgaacagcaccagctggatggaggtgaacttcgccaagaacagaaaggacaagaaccagacctacaacctgaccggcctgcagcccttcaccgagtacgtgatcgccctgagatgcgccgtgaaggagagcaagttctggagcgactggagccaggagaagatgggcatgaccgaggaggaggccccctgcggcctggagctgtggagagtgctgaagcccgccgaggccgacggcagaagacccgtgagactgctgtggaagaaggccagaggcgcccccgtgctggagaagaccctgggctacaacatctggtactaccccgagagcaacaccaacctgaccgagaccatgaacaccaccaaccagcagctggagctgcacctgggcggcgagagcttctgggtgagcatgatcagctacaacagcctgggcaagagccccgtggccaccctgagaatccccgccatccaggagaagagcttccagtgcatcgaggtgatgcaggcctgcgtggccgaggaccagctggtggtgaagtggcagagcagcgccctggacgtgaacacctggatgatcgagtggttccccgacgtggacagcgagcccaccaccctgagctgggagagcgtgagccaggccaccaactggaccatccagcaggacaagctgaagcccttctggtgctacaacatcagcgtgtaccccatgctgcacgacaaggtgggcgagccctacagcatccaggcctacgccaaggagggcgtgcccagcgagggccccgagaccaaggtggagaacatcggcgtgaagaccgtgaccatcacctggaaggagatccccaagagcgagagaaagggcatcatctgcaactacaccatcttctaccaggccgagggcggcaagggcttcagcaagaccgtgaacagcagcatcctgcagtacggcctggagagcctgaagagaaagaccagctacatcgtgcaggtgatggccagcaccagcgccggcggcaccaacggcaccagcatcaacttcaagaccctgagcttcagcgtgttcgagatcatcctgatcaccagcctgatcggcggcggcctgctgatcctgatcatcctgaccgtggcctacggcctgaagaagcccaacaagctgacccacctgtgctggcccaccgtgcccaaccccgccgagagcagcatcgccacctggcacggcgacgacttcaaggacaagctgaacctgaaggagagcgacgacagcgtgaacaccgaggacagaatcctgaagccctgcagcacccccagcgacaagctggtgatcgacaagctggtggtgaacttcggcaacgtgctgcaggagatcttcaccgacgaggccagaaccggccaggagaacaacctgggcggcgagaagaacggcaccagaatcctgagcagctgccccaccagcatctag

SEQ ID NO: 85640 - DNA, 1989 bp, synthetic construct; identical to SEQ ID NO: 85638
  misc_feature 1..1989: note = Description of Artificial Sequence: Synthetic coding sequence
  source 1..1989: mol_type = other DNA

SEQ ID NO: 85641 - DNA, 1749 bp, synthetic construct
  misc_feature 1..1749: note = Description of Artificial Sequence: Synthetic coding sequence
  source 1..1749: mol_type = other DNA
atgtgcatcagacagctgaagttcttcaccaccgcctgcgtgtgcgagtgcccccagaacatcctgagcccccagcccagctgcgtgaacctgggcatgatgtggacctgggccctgtggatgctgcccagcctgtgcaagttcagcctggccgccctgcccgccaagcccgagaacatcagctgcgtgtactactacagaaagaacctgacctgcacctggagccccggcaaggagaccagctacacccagtacaccgtgaagagaacctacgccttcggcgagaagcacgacaactgcaccaccaacagcagcaccagcgagaacagagccagctgcagcttcttcctgcccagaatcaccatccccgacaactacaccatcgaggtggaggccgagaacggcgacggcgtgatcaagagccacatgacctactggagactggagaacatcgccaagaccgagccccccaagatcttcagagtgaagcccgtgctgggcatcaagagaatgatccagatcgagtggatcaagcccgagctggcccccgtgagcagcgacctgaagtacaccctgagattcagaaccgtgaacagcaccagctggatggaggtgaacttcgccaagaacagaaaggacaagaaccagacctacaacctgaccggcctgcagcccttcaccgagtacgtgatcgccctgagatgcgccgtgaaggagagcaagttctggagcgactggagccaggagaagatgggcatgaccgaggaggaggccccctgcggcctggagctgtggagagtgctgaagcccgccgaggccgacggcagaagacccgtgagactgctgtggaagaaggccagaggcgcccccgtgctggagaagaccctgggctacaacatctggtactaccccgagagcaacaccaacctgaccgagaccatgaacaccaccaaccagcagctggagctgcacctgggcggcgagagcttctgggtgagcatgatcagctacaacagcctgggcaagagccccgtggccaccctgagaatccccgccatccaggagaagagcttccagtgcatcgaggtgatgcaggcctgcgtggccgaggaccagctggtggtgaagtggcagagcagcgccctggacgtgaacacctggatgatcgagtggttccccgacgtggacagcgagcccaccaccctgagctgggagagcgtgagccaggccaccaactggaccatccagcaggacaagctgaagcccttctggtgctacaacatcagcgtgtaccccatgctgcacgacaaggtgggcgagccctacagcatccaggcctacgccaaggagggcgtgcccagcgagggccccgagaccaaggtggagaacatcggcgtgaagaccgtgaccatcacctggaaggagatccccaagagcgagagaaagggcatcatctgcaactacaccatcttctaccaggccgagggcggcaagggcttctgcaagcacgcccacagcgaggtggagaagaaccccaagccccagatcgacgccatggacagacccgtggtgggcatggccccccccagccactgcgacctgcagcccggcatgaaccacctggccagcctgaacctgagcgagaacggcgccaagagcacccacctgctgggcttctggggcctgaacgagagcgaggtgaccgtgcccgagagaagagtgctgagaaagtggaaggagctgctgtag

SEQ ID NO: 85642 - DNA, 2295 bp, synthetic construct
  misc_feature 1..2295: note = Description of Artificial Sequence: Synthetic coding sequence
  source 1..2295: mol_type = other DNA
atgtgcatcagacagctgaagttcttcaccaccgcctgcgtgtgcgagtgcccccagaacatcctgagcccccagcccagctgcgtgaacctgggcatgatgtggacctgggccctgtggatgctgcccagcctgtgcaagttcagcctggccgccctgcccgccaagcccgagaacatcagctgcgtgtactactacagaaagaacctgacctgcacctggagccccggcaaggagaccagctacacccagtacaccgtgaagagaacctacgccttcggcgagaagcacgacaactgcaccaccaacagcagcaccagcgagaacagagccagctgcagcttcttcctgcccagaatcaccatccccgacaactacaccatcgaggtggaggccgagaacggcgacggcgtgatcaagagccacatgacctactggagactggagaacatcgccaagaccgagccccccaagatcttcagagtgaagcccgtgctgggcatcaagagaatgatccagatcgagtggatcaagcccgagctggcccccgtgagcagcgacctgaagtacaccctgagattcagaaccgtgaacagcaccagctggatggaggtgaacttcgccaagaacagaaaggacaagaaccagacctacaacctgaccggcctgcagcccttcaccgagtacgtgatcgccctgagatgcgccgtgaaggagagcaagttctggagcgactggagccaggagaagatgggcatgaccgaggaggaggccccctgcggcctggagctgtggagagtgctgaagcccgccgaggccgacggcagaagacccgtgagactgctgtggaagaaggccagaggcgcccccgtgctggagaagaccctgggctacaacatctggtactaccccgagagcaacaccaacctgaccgagaccatgaacaccaccaaccagcagctggagctgcacctgggcggcgagagcttctgggtgagcatgatcagctacaacagcctgggcaagagccccgtggccaccctgagaatccccgccatccaggagaagagcttccagtgcatcgaggtgatgcaggcctgcgtggccgaggaccagctggtggtgaagtggcagagcagcgccctggacgtgaacacctggatgatcgagtggttccccgacgtggacagcgagcccaccaccctgagctgggagagcgtgagccaggccaccaactggaccatccagcaggacaagctgaagcccttctggtgctacaacatcagcgtgtaccccatgctgcacgacaaggtgggcgagccctacagcatccaggcctacgccaaggagggcgtgcccagcgagggccccgagaccaaggtggagaacatcggcgtgaagaccgtgaccatcacctggaaggagatccccaagagcgagagaaagggcatcatctgcaactacaccatcttctaccaggccgagggcggcaagggcttcagcaagaccgtgaacagcagcatcctgcagtacggcctggagagcctgaagagaaagaccagctacatcgtgcaggtgatggccagcaccagcgccggcggcaccaacggcaccagcatcaacttcaagaccctgagcttcagcgtgttcgagatcatcctgatcaccagcctgatcggcggcggcctgctgatcctgatcatcctgaccgtggcctacggcctgaagaagcccaacaagctgacccacctgtgctggcccaccgtgcccaaccccgccgagagcagcatcgccacctggcacggcgacgacttcaaggacaagctgaacctgaaggagagcgacgacagcgtgaacaccgaggacagaatcctgaagccctgcagcacccccagcgacaagctggtgatcgacaagctggtggtgaacttcggcaacgtgctgcaggagatcttcaccgacgaggccagaaccggccaggagaacaacctgggcggcgagaagaacggctacgtgacctgccccttcagacccgactgccccctgggcaagagcttcgaggagctgcccgtgagccccgagatcccccccagaaagagccagtacctgagaagcagaatgcccgagggcaccagacccgaggccaaggagcagctgctgttcagcggccagagcctggtgcccgaccacctgtgcgaggagggcgcccccaacccctacctgaagaacagcgtgaccgccagagagttcctggtgagcgagaagctgcccgagcacaccaagggcgaggtgtag

SEQ ID NO: 85643 - DNA, 1869 bp, synthetic construct
  misc_feature 1..1869: note = Description of Artificial Sequence: Synthetic coding sequence
  source 1..1869: mol_type = other DNA
atgacctactggagactggagaacatcgccaagaccgagccccccaagatcttcagagtgaagcccgtgctgggcatcaagagaatgatccagatcgagtggatcaagcccgagctggcccccgtgagcagcgacctgaagtacaccctgagattcagaaccgtgaacagcaccagctggatggaggtgaacttcgccaagaacagaaaggacaagaaccagacctacaacctgaccggcctgcagcccttcaccgagtacgtgatcgccctgagatgcgccgtgaaggagagcaagttctggagcgactggagccaggagaagatgggcatgaccgaggaggaggccccctgcggcctggagctgtggagagtgctgaagcccgccgaggccgacggcagaagacccgtgagactgctgtggaagaaggccagaggcgcccccgtgctggagaagaccctgggctacaacatctggtactaccccgagagcaacaccaacctgaccgagaccatgaacaccaccaaccagcagctggagctgcacctgggcggcgagagcttctgggtgagcatgatcagctacaacagcctgggcaagagccccgtggccaccctgagaatccccgccatccaggagaagagcttccagtgcatcgaggtgatgcaggcctgcgtggccgaggaccagctggtggtgaagtggcagagcagcgccctggacgtgaacacctggatgatcgagtggttccccgacgtggacagcgagcccaccaccctgagctgggagagcgtgagccaggccaccaactggaccatccagcaggacaagctgaagcccttctggtgctacaacatcagcgtgtaccccatgctgcacgacaaggtgggcgagccctacagcatccaggcctacgccaaggagggcgtgcccagcgagggccccgagaccaaggtggagaacatcggcgtgaagaccgtgaccatcacctggaaggagatccccaagagcgagagaaagggcatcatctgcaactacaccatcttctaccaggccgagggcggcaagggcttcagcaagaccgtgaacagcagcatcctgcagtacggcctggagagcctgaagagaaagaccagctacatcgtgcaggtgatggccagcaccagcgccggcggcaccaacggcaccagcatcaacttcaagaccctgagcttcagcgtgttcgagatcatcctgatcaccagcctgatcggcggcggcctgctgatcctgatcatcctgaccgtggcctacggcctgaagaagcccaacaagctgacccacctgtgctggcccaccgtgcccaaccccgccgagagcagcatcgccacctggcacggcgacgacttcaaggacaagctgaacctgaaggagagcgacgacagcgtgaacaccgaggacagaatcctgaagccctgcagcacccccagcgacaagctggtgatcgacaagctggtggtgaacttcggcaacgtgctgcaggagatcttcaccgacgaggccagaaccggccaggagaacaacctgggcggcgagaagaacggctacgtgacctgccccttcagacccgactgccccctgggcaagagcttcgaggagctgcccgtgagccccgagatcccccccagaaagagccagtacctgagaagcagaatgcccgagggcaccagacccgaggccaaggagcagctgctgttcagcggccagagcctggtgcccgaccacctgtgcgaggagggcgcccccaacccctacctgaagaacagcgtgaccgccagagagttcctggtgagcgagaagctgcccgagcacaccaagggcgaggtgtag

SEQ ID NO: 85644 - DNA, 468 bp, synthetic construct
  misc_feature 1..468: note = Description of Artificial Sequence: Synthetic coding sequence
  source 1..468: mol_type = other DNA
atggtgctgagcggcgccctgtgcttcagaatgaaggacagcgccctgaaggtgctgtacctgcacaacaaccagctgctggccggcggcctgcacgccggcaaggtgatcaagggcgaggagatcagcgtggtgcccaacagatggctggacgccagcctgagccccgtgatcctgggcgtgcagggcggcagccagtgcctgagctgcggcgtgggccaggagcccaccctgaccctggagcccgtgaacatcatggagctgtacctgggcgccaaggagagcaagagcttcaccttctacagaagagacatgggcctgaccagcagcttcgagagcgccgcctaccccggctggttcctgtgcaccgtgcccgaggccgaccagcccgtgagactgacccagctgcccgagaacggcggctggaacgcccccatcaccgacttctacttccagcagtgcgactag

SEQ ID NO: 85645 - DNA, 468 bp, synthetic construct; identical to SEQ ID NO: 85644
  misc_feature 1..468: note = Description of Artificial Sequence: Synthetic coding sequence
  source 1..468: mol_type = other DNA

SEQ ID NO: 85646 - DNA, 354 bp, synthetic construct
  misc_feature 1..354: note = Description of Artificial Sequence: Synthetic coding sequence
  source 1..354: mol_type = other DNA
atggtgctgagcggcgccctgtgcttcagaatgaaggacagcgccctgaaggtgctgtacctgcacaacaaccagctgctggccggcggcctgcacgccggcaaggtgatcaagggcgaggagatcagcgtggtgcccaacagatggctggacgccagcctgagccccgtgatcctgggcgtgcagggcggcagccagtgcctgagctgcggcgtgggccaggagcccaccctgaccctggagcccgtgaacatcatggagctgtacctgggcgccaaggagagcaagagcttcaccttctacagaagagacatgggcctgaccagcagcttcgagagcgccgcctacccctag

SEQ ID NO: 85647 - DNA, 2478 bp, synthetic construct
  misc_feature 1..2478: note = Description of Artificial Sequence: Synthetic coding sequence
  source 1..2478: mol_type = other DNA
atgggctggctgtgcagcggcctgctgttccccgtgagctgcctggtgctgctgcaggtggccagcagcggcaacatgaaggtgctgcaggagcccacctgcgtgagcgactacatgagcatcagcacctgcgagtggaagatgaacggccccaccaactgcagcaccgagctgagactgctgtaccagctggtgttcctgctgagcgaggcccacacctgcatccccgagaacaacggcggcgccggctgcgtgtgccacctgctgatggacgacgtggtgagcgccgacaactacaccctggacctgtgggccggccagcagctgctgtggaagggcagcttcaagcccagcgagcacgtgaagcccagagcccccggcaacctgaccgtgcacaccaacgtgagcgacaccctgctgctgacctggagcaacccctacccccccgacaactacctgtacaaccacctgacctacgccgtgaacatctggagcgagaacgaccccgccgacttcagaatctacaacgtgacctacctggagcccagcctgagaatcgccgccagcaccctgaagagcggcatcagctacagagccagagtgagagcctgggcccagtgctacaacaccacctggagcgagtggagccccagcaccaagtggcacaacagctacagagagcccttcgagcagcacctgctgctgggcgtgagcgtgagctgcatcgtgatcctggccgtgtgcctgctgtgctacgtgagcatcaccaagatcaagaaggagtggtgggaccagatccccaaccccgccagaagcagactggtggccatcatcatccaggacgcccagggcagccagtgggagaagagaagcagaggccaggagcccgccaagtgcccccactggaagaactgcctgaccaagctgctgccctgcttcctggagcacaacatgaagagagacgaggacccccacaaggccgccaaggagatgcccttccagggcagcggcaagagcgcctggtgccccgtggagatcagcaagaccgtgctgtggcccgagagcatcagcgtggtgagatgcgtggagctgttcgaggcccccgtggagtgcgaggaggaggaggaggtggaggaggagaagggcagcttctgcgccagccccgagagcagcagagacgacttccaggagggcagagagggcatcgtggccagactgaccgagagcctgttcctggacctgctgggcgaggagaacggcggcttctgccagcaggacatgggcgagagctgcctgctgccccccagcggcagcaccagcgcccacatgccctgggacgagttccccagcgccggccccaaggaggcccccccctggggcaaggagcagcccctgcacctggagcccagcccccccgccagccccacccagagccccgacaacctgacctgcaccgagacccccctggtgatcgccggcaaccccgcctacagaagcttcagcaacagcctgagccagagcccctgccccagagagctgggccccgaccccctgctggccagacacctggaggaggtggagcccgagatgccctgcgtgccccagctgagcgagcccaccaccgtgccccagcccgagcccgagacctgggagcagatcctgagaagaaacgtgctgcagcacggcgccgccgccgcccccgtgagcgcccccaccagcggctaccaggagttcgtgcacgccgtggagcagggcggcacccaggccagcgccgtggtgggcctgggcccccccggcgaggccggctacaaggccttcagcagcctgctggccagcagcgccgtgagccccgagaagtgcggcttcggcgccagcagcggcgaggagggctacaagcccttccaggacctgatccccggctgccccggcgaccccgcccccgtgcccgtgcccctgttcaccttcggcctggacagagagccccccagaagcccccagagcagccacctgcccagcagcagccccgagcacctgggcctggagcccggcgagaaggtggaggacatgcccaagccccccctgccccaggagcaggccaccgaccccctggtggacagcctgggcagcggcatcgtgtacagcgccctgacctgccacctgtgcggccacctgaagcagtgccacggccaggaggacggcggccagacccccgtgatggccagcccctgctgcggctgctgctgcggcgacagaagcagcccccccaccacccccctgagagcccccgaccccagccccggcggcgtgcccctggaggccagcctgtgccccgccagcctggcccccagcggcatcagcgagaagagcaagagcagcagcagcttccaccccgcccccggcaacgcccagagcagcagccagacccccaagatcgtgaacttcgtgagcgtgggccccacctacatgagagtgagctag

SEQ ID NO: 85648 - DNA, 2433 bp, synthetic construct
  misc_feature 1..2433: note = Description of Artificial Sequence: Synthetic coding sequence
  source 1..2433: mol_type = other DNA
atgcagaaggacgccagaagagagggcaacatgaaggtgctgcaggagcccacctgcgtgagcgactacatgagcatcagcacctgcgagtggaagatgaacggccccaccaactgcagcaccgagctgagactgctgtaccagctggtgttcctgctgagcgaggcccacacctgcatccccgagaacaacggcggcgccggctgcgtgtgccacctgctgatggacgacgtggtgagcgccgacaactacaccctggacctgtgggccggccagcagctgctgtggaagggcagcttcaagcccagcgagcacgtgaagcccagagcccccggcaacctgaccgtgcacaccaacgtgagcgacaccctgctgctgacctggagcaacccctacccccccgacaactacctgtacaaccacctgacctacgccgtgaacatctggagcgagaacgaccccgccgacttcagaatctacaacgtgacctacctggagcccagcctgagaatcgccgccagcaccctgaagagcggcatcagctacagagccagagtgagagcctgggcccagtgctacaacaccacctggagcgagtggagccccagcaccaagtggcacaacagctacagagagcccttcgagcagcacctgctgctgggcgtgagcgtgagctgcatcgtgatcctggccgtgtgcctgctgtgctacgtgagcatcaccaagatcaagaaggagtggtgggaccagatccccaaccccgccagaagcagactggtggccatcatcatccaggacgcccagggcagccagtgggagaagagaagcagaggccaggagcccgccaagtgcccccactggaagaactgcctgaccaagctgctgccctgcttcctggagcacaacatgaagagagacgaggacccccacaaggccgccaaggagatgcccttccagggcagcggcaagagcgcctggtgccccgtggagatcagcaagaccgtgctgtggcccgagagcatcagcgtggtgagatgcgtggagctgttcgaggcccccgtggagtgcgaggaggaggaggaggtggaggaggagaagggcagcttctgcgccagccccgagagcagcagagacgacttccaggagggcagagagggcatcgtggccagactgaccgagagcctgttcctggacctgctgggcgaggagaacggcggcttctgccagcaggacatgggcgagagctgcctgctgccccccagcggcagcaccagcgcccacatgccctgggacgagttccccagcgccggccccaaggaggcccccccctggggcaaggagcagcccctgcacctggagcccagcccccccgccagccccacccagagccccgacaacctgacctgcaccgagacccccctggtgatcgccggcaaccccgcctacagaagcttcagcaacagcctgagccagagcccctgccccagagagctgggccccgaccccctgctggccagacacctggaggaggtggagcccgagatgccctgcgtgccccagctgagcgagcccaccaccgtgccccagcccgagcccgagacctgggagcagatcctgagaagaaacgtgctgcagcacggcgccgccgccgcccccgtgagcgcccccaccagcggctaccaggagttcgtgcacgccgtggagcagggcggcacccaggccagcgccgtggtgggcctgggcccccccggcgaggccggctacaaggccttcagcagcctgctggccagcagcgccgtgagccccgagaagtgcggcttcggcgccagcagcggcgaggagggctacaagcccttccaggacctgatccccggctgccccggcgaccccgcccccgtgcccgtgcccctgttcaccttcggcctggacagagagccccccagaagcccccagagcagccacctgcccagcagcagccccgagcacctgggcctggagcccggcgagaaggtggaggacatgcccaagccccccctgccccaggagcaggccaccgaccccctggtggacagcctgggcagcggcatcgtgtacagcgccctgacctgccacctgtgcggccacctgaagcagtgccacggccaggaggacggcggccagacccccgtgatggccagcccctgctgcggctgctgctgcggcgacagaagcagcccccccaccacccccctgagagcccccgaccccagccccggcggcgtgcccctggaggccagcctgtgccccgccagcctggcccccagcggcatcagcgagaagagcaagagcagcagcagcttccaccccgcccccggcaacgcccagagcagcagccagacccccaagatcgtgaacttcgtgagcgtgggccccacctacatgagagtgagctag

SEQ ID NO: 85649 - DNA, 684 bp, synthetic construct
  misc_feature 1..684: note = Description of Artificial Sequence: Synthetic coding sequence
  source 1..684: mol_type = other DNA
atgggctggctgtgcagcggcctgctgttccccgtgagctgcctggtgctgctgcaggtggccagcagcggcaacatgaaggtgctgcaggagcccacctgcgtgagcgactacatgagcatcagcacctgcgagtggaagatgaacggccccaccaactgcagcaccgagctgagactgctgtaccagctggtgttcctgctgagcgaggcccacacctgcatccccgagaacaacggcggcgccggctgcgtgtgccacctgctgatggacgacgtggtgagcgccgacaactacaccctggacctgtgggccggccagcagctgctgtggaagggcagcttcaagcccagcgagcacgtgaagcccagagcccccggcaacctgaccgtgcacaccaacgtgagcgacaccctgctgctgacctggagcaacccctacccccccgacaactacctgtacaaccacctgacctacgccgtgaacatctggagcgagaacgaccccgccgacttcagaatctacaacgtgacctacctggagcccagcctgagaatcgccgccagcaccctgaagagcggcatcagctacagagccagagtgagagcctgggcccagtgctacaacaccacctggagcgagtggagccccagcaccaagtggcacaacttcagcgtgtgctag

SEQ ID NO: 85650 - DNA, 2478 bp, synthetic construct; identical to SEQ ID NO: 85647
  misc_feature 1..2478: note = Description of Artificial Sequence: Synthetic coding sequence
  source 1..2478: mol_type = other DNA

SEQ ID NO: 85651 - DNA, 684 bp, synthetic construct
  misc_feature 1..684: note = Description of Artificial Sequence: Synthetic coding sequence
  source 1..684: mol_type = other DNA
atgggctggctgtgcagcggcctgctgttccccgtgagctgcctggtgctgctgcaggtggccagcagcggcaacatgaaggtgctgcaggagcccacctgcgtgagcgactacatgagcatcagcacctgcgagtggaagatgaacggccccaccaactgcagcaccgagctgagactgctgtaccagctggtgttcctgctgagcgaggcccacacctgcatccccgagaacaacggcggcgccggctgcgtgtgccacctgctgatggacgacgtggtgagcgccgacaactacaccctggacctgtgggccggccagcagctgctgtggaagggcagcttcaagcccagcgagcacgtgaagcccagagcccccggcaacctgaccgtgcacaccaacgtgagcgacaccctgctgctgacctggagcaacccctacccccccgacaactacctgtacaaccacctgacctacgccgtgaacatctggagcgagaacgaccccgccgacttcagaatctacaacgtgacctacctggagcccagcctgagaatcgccgccagcaccctgaagagcggcatcagctacagagccagagtgagagcctgggcccagtgctacaacaccacctggagcgagtggagccccagcaccaagtggcacaacagcaacatctgctag

SEQ ID NO: 85652 - DNA, 2478 bp, synthetic construct; identical to SEQ ID NO: 85647
  misc_feature 1..2478: note = Description of Artificial Sequence: Synthetic coding sequence
  source 1..2478: mol_type = other DNA

SEQ ID NO: 85653 - DNA, 1263 bp, synthetic construct
  misc_feature 1..1263: note = Description of Artificial Sequence: Synthetic coding sequence
  source 1..1263: mol_type = other DNA
atgatcatcgtggcccacgtgctgctgatcctgctgggcgccaccgagatcctgcaggccgacctgctgcccgacgagaagatcagcctgctgccccccgtgaacttcaccatcaaggtgaccggcctggcccaggtgctgctgcagtggaagcccaaccccgaccaggagcagagaaacgtgaacctggagtaccaggtgaagatcaacgcccccaaggaggacgactacgagaccagaatcaccgagagcaagtgcgtgaccatcctgcacaagggcttcagcgccagcgtgagaaccatcctgcagaacgaccacagcctgctggccagcagctgggccagcgccgagctgcacgccccccccggcagccccggcaccagcatcgtgaacctgacctgcaccaccaacaccaccgaggacaactacagcagactgagaagctaccaggtgagcctgcactgcacctggctggtgggcaccgacgcccccgaggacacccagtacttcctgtactacagatacggcagctggaccgaggagtgccaggagtacagcaaggacaccctgggcagaaacatcgcctgctggttccccagaaccttcatcctgagcaagggcagagactggctggccgtgctggtgaacggcagcagcaagcacagcgccatcagacccttcgaccagctgttcgccctgcacgccatcgaccagatcaacccccccctgaacgtgaccgccgagatcgagggcaccagactgagcatccagtgggagaagcccgtgagcgccttccccatccactgcttcgactacgaggtgaagatccacaacaccagaaacggctacctgcagatcgagaagctgatgaccaacgccttcatcagcatcatcgacgacctgagcaagtacgacgtgcaggtgagagccgccgtgagcagcatgtgcagagaggccggcctgtggagcgagtggagccagcccatctacgtgggcaacgacgagcacaagcccctgagagagtggttcgtgatcgtgatcatggccaccatctgcttcatcctgctgatcctgagcctgatctgcaagatctgccacctgtggatcaagctgttcccccccatccccgcccccaagagcaacatcaaggacctgttcgtgaccaccaactacgagaaggccggcagcagcgagaccgagatcgaggtgatctgctacatcgagaagcccggcgtggagaccctggaggacagcgtgttctag

SEQ ID NO: 85654 - DNA, 1008 bp, synthetic construct
  misc_feature 1..1008: note = Description of Artificial Sequence: Synthetic coding sequence
  source 1..1008: mol_type = other DNA
atgatcatcgtggcccacgtgctgctgatcctgctgggcgccaccgagatcctgcaggccgacctgctgcccgacgagaagatcagcctgctgccccccgtgaacttcaccatcaaggtgaccggcctggcccaggtgctgctgcagtggaagcccaaccccgaccaggagcagagaaacgtgaacctggagtaccaggtgaagatcaacgcccccaaggaggacgactacgagaccagaatcaccgagagcaagtgcgtgaccatcctgcacaagggcttcagcgccagcgtgagaaccatcctgcagaacgaccacagcctgctggccagcagctgggccagcgccgagctgcacgccccccccggcagccccggcaccagcatcgtgaacctgacctgcaccaccaacaccaccgaggacaactacagcagactgagaagctaccaggtgagcctgcactgcacctggctggtgggcaccgacgcccccgaggacacccagtacttcctgtactacagatacggcagctggaccgaggagtgccaggagtacagcaaggacaccctgggcagaaacatcgcctgctggttccccagaaccttcatcctgagcaagggcagagactggctggccgtgctggtgaacggcagcagcaagcacagcgccatcagacccttcgaccagctgttcgccctgcacgccatcgaccagatcaacccccccctgaacgtgaccgccgagatcgagggcaccagactgagcatccagtgggagaagcccgtgagcgccttccccatccactgcttcgactacgaggtgaagatccacaacaccagaaacggctacctgcagatcgagaagctgatgaccaacgccttcatcagcatcatcgacgacctgagcaagtacgacgtgcaggtgagagccgccgtgagcagcatgtgcagagaggccggcctgtggagcgagtggagccagcccatctacgtgggcttcagcagatag

SEQ ID NO: 85655 - DNA, 453 bp, synthetic construct
  misc_feature 1..453: note = Description of Artificial Sequence: Synthetic coding sequence
  source 1..453: mol_type = other DNA
atgaccaacgccttcatcagcatcatcgacgacctgagcaagtacgacgtgcaggtgagagccgccgtgagcagcatgtgcagagaggccggcctgtggagcgagtggagccagcccatctacgtgggcaacgacgagcacaagcccctgagagagtggttcgtgatcgtgatcatggccaccatctgcttcatcctgctgatcctgagcctgatctgcaagatctgccacctgtggatcaagctgttcccccccatccccgcccccaagagcaacatcaaggacctgttcgtgaccaccaactacgaggtgctgtgcatcttcatctacatcctggacagcgccgacaacttcctgcagaagaagaaggccggcagcagcgagaccgagatcgaggtgatctgctacatcgagaagcccggcgtggagaccctggaggacagcgtgttctag

SEQ ID NO: 85656 - DNA, 1008 bp, synthetic construct; identical to SEQ ID NO: 85654
  misc_feature 1..1008: note = Description of Artificial Sequence: Synthetic coding sequence
  source 1..1008: mol_type = other DNA

SEQ ID NO: 85657 - DNA, 978 bp, synthetic construct
  misc_feature 1..978: note = Description of Artificial Sequence: Synthetic coding sequence
  source 1..978: mol_type = other DNA
atgatcatcgtggcccacgtgctgctgatcctgctgggcgccaccgagatcctgcaggccgacctgctgcccgacgagaagatcagcctgctgccccccgtgaacttcaccatcaaggtgaccggcctggcccaggtgctgctgcagtggaagcccaaccccgaccaggagcagagaaacgtgaacctggagtaccaggtgaagatcaacgcccccaaggaggacgactacgagaccagaatcaccgagagcaagtgcgtgaccatcctgcacaagggcttcagcgccagcgtgagaaccatcctgcagaacgaccacagcctgctggccagcagctgggccagcgccgagctgcacgccccccccggcagccccggcaccagcatcgtgaacctgacctgcaccaccaacaccaccgaggacaactacagcagactgagaagctaccaggtgagcctgcactgcacctggctggtgggcaccgacgcccccgaggacacccagtacttcctgtactacagatacggcagctggaccgaggagtgccaggagtacagcaaggacaccctgggcagaaacatcgcctgctggttccccagaaccttcatcctgagcaagggcagagactggctggccgtgctggtgaacggcagcagcaagcacagcgccatcagacccttcgaccagctgttcgccctgcacgccatcggcaacgacgagcacaagcccctgagagagtggttcgtgatcgtgatcatggccaccatctgcttcatcctgctgatcctgagcctgatctgcaagatctgccacctgtggatcaagctgttcccccccatccccgcccccaagagcaacatcaaggacctgttcgtgaccaccaactacgagaaggccggcagcagcgagaccgagatcgaggtgatctgctacatcgagaagcccggcgtggagaccctggaggacagcgtgttctag

SEQ ID NO: 85658 - DNA, 330 bp, synthetic construct
  misc_feature 1..330: note = Description of Artificial Sequence: Synthetic coding sequence
  source 1..330: mol_type = other DNA
atgatcatcgtggcccacgtgctgctgatcctgctgggcgccaccgagatcctgcaggccgacctgctgcccgacgagaagatcagcctgctgccccccgtgaacttcaccatcaaggtgaccggcctggcccaggtgctgctgcagtggaagcccaaccccgaccaggagcagagaaacgtgaacctggagtaccaggtgaagatcaacgcccccaaggaggacgactacgagaccagaatcaccgagagcaagtgcgtgaccatcctgcacaagggcttcagcgccagcgtgagaaccatcctgcagaacgaccacagcctgctgtag

SEQ ID NO: 85659 - DNA, 1002 bp, synthetic construct
  misc_feature 1..1002: note = Description of Artificial Sequence: Synthetic coding sequence
  source 1..1002: mol_type = other DNA
atgatcatcgtggcccacgtgctgctgatcctgctgggcgccaccgagatcctgcaggccgacctgctgcccgacgagaagatcagcctgctgccccccgtgaacttcaccatcaaggtgaccggcctggcccaggtgctgctgcagtggaagcccaaccccgaccaggagcagagaaacgtgaacctggagtaccaggtgaagatcaacgcccccaaggaggacgactacgagaccagaatcaccgagagcaagtgcgtgaccatcctgcacaagggcttcagcgccagcgtgagaaccatcctgcagaacgaccacagcctgctggccagcagctgggccagcgccgagctgcacgccccccccggcagccccggcaccagcatcgtgaacctgacctgcaccaccaacaccaccgaggacaactacagcagactgagaagctaccaggtgagcctgcactgcacctggctggtgggcaccgacgcccccgaggacacccagtacttcctgtactacagatacggcagctggaccgaggagtgccaggagtacagcaaggacaccctgggcagaaacatcgcctgctggttccccagaaccttcatcctgagcaagggcagagactggctggccgtgctggtgaacggcagcagcaagcacagcgccatcagacccttcgaccagctgttcgccctgcacgccatcgaccagatcaacccccccctgaacgtgaccgccgagatcgagggcaccagactgagcatccagtgggagaagcccgtgagcgccttccccatccactgcttcgactacgaggtgaagatccacaacaccagaaacggctacctgcagatcgagaagctgatgaccaacgccttcatcagcatcatcgacgacctgagcaagtacgacgtgcaggtgagagccgccgtgagcagcatgtgcagagaggccggcctgtggagcgagtggagccagcccatctacgtgggcaagtag

SEQ ID NO: 85660 - DNA, 1137 bp, synthetic construct
  misc_feature 1..1137: note = Description of Artificial Sequence: Synthetic coding sequence
  source 1..1137: mol_type = other DNA
atgatcatcgtggcccacgtgctgctgatcctgctgggcgccaccgagatcctgcaggccgacctgctgcccgacgagaagatcagcctgctgccccccgtgaacttcaccatcaaggtgaccggcctggcccaggtgctgctgcagtggaagcccaaccccgaccaggagcagagaaacgtgaacctggagtaccaggtgaagatcaacgcccccaaggaggacgactacgagaccagaatcaccgagagcaagtgcgtgaccatcctgcacaagggcttcagcgccagcgtgagaaccatcctgcagaacgaccacagcctgctggccagcagctgggccagcgccgagctgcacgccccccccggcagccccggcaccagcatcgtgaacctgacctgcaccaccaacaccaccgaggacaactacagcagactgagaagctaccaggtgagcctgcactgcacctggctggtgggcaccgacgcccccgaggacacccagtacttcctgtactacagatacggcagctggaccgaggagtgccaggagtacagcaaggacaccctgggcagaaacatcgcctgctggttccccagaaccttcatcctgagcaagggcagagactggctggccgtgctggtgaacggcagcagcaagcacagcgccatcagacccttcgaccagctgttcgccctgcacgccatcgaccagatcaacccccccctgaacgtgaccgccgagatcgagggcaccagactgagcatccagtgggagaagcccgtgagcgccttccccatccactgcttcgactacgaggtgaagatccacaacaccagaaacggctacctgcagatcgagaagctgatgaccaacgccttcatcagcatcatcgacgacctgagcaagtacgacgtgcaggtgagagccgccgtgagcagcatgtgcagagaggccggcctgtggagcgagtggagccagcccatctacgtgggcaacgacgagcacaagcccctgagagagtggttcgtgatcgtgatcatggccaccatctgcttcatcctgctgatcctgagcctgatctgcaagatcaagctgggccccgtgagaagaaagctgaagagcagcgtgatctag

SEQ ID NO: 85661 - DNA, 591 bp, synthetic construct
  misc_feature 1..591: note = Description of Artificial Sequence: Synthetic coding sequence
  source 1..591: mol_type = other DNA
atgatcatcgtggcccacgtgctgctgatcctgctgggcgccaccgagatcctgcaggccgacctgctgcccgacgagaagatcagcctgctgccccccgtgaacttcaccatcaaggtgaccggcctggcccaggtgctgctgcagtggaagcccaaccccgaccaggagcagagaaacgtgaacctggagtaccaggtgaagatcaacgcccccaaggaggacgactacgagaccagaatcaccgagagcaagtgcgtgaccatcctgcacaagggcttcagcgccagcgtgagaaccatcctgcagaacgaccacagcctgctggccagcagctgggccagcgccgagctgcacgccccccccggcagccccggcaccagcatcgtgaacctgacctgcaccaccaacaccaccgaggacaactacagcagactgagaagctaccaggtgagcctgcactgcacctggctggtgggcaccgacgcccccgaggacacccagtacttcctgtactacagatacggcagctggaccgaggagtgccaggagtacagcaaggacaccctgggcagaaacatcgcctgctag

SEQ ID NO: 85662 - DNA, 636 bp, synthetic construct
  misc_feature 1..636: note = Description of Artificial Sequence: Synthetic coding sequence
  source 1..636: mol_type = other DNA
atgatcatcgtggcccacgtgctgctgatcctgctgggcgccaccgagatcctgcaggccgacctgctgcccgacgagaagatcagcctgctgccccccgtgaacttcaccatcaaggtgaccggcctggcccaggtgctgctgcagtggaagcccaaccccgaccaggagcagagaaacgtgaacctggagtaccaggtgaagatcaacgcccccaaggaggacgactacgagaccagaatcaccgagagcaagtgcgtgaccatcctgcacaagggcttcagcgccagcgtgagaaccatcctgcagaacgaccacagcctgctggccagcagctgggccagcgccgagctgcacgccccccccggcaacgacgagcacaagcccctgagagagtggttcgtgatcgtgatcatggccaccatctgcttcatcctgctgatcctgagcctgatctgcaagatctgccacctgtggatcaagctgttcccccccatccccgcccccaagagcaacatcaaggacctgttcgtgaccaccaactacgagaaggccggcagcagcgagaccgagatcgaggtgatctgctacatcgagaagcccggcgtggagaccctggaggacagcgtgttctag

SEQ ID NO: 85663 - DNA, 1263 bp, synthetic construct; identical to SEQ ID NO: 85653
  misc_feature 1..1263: note = Description of Artificial Sequence: Synthetic coding sequence
  source 1..1263: mol_type = other DNA

SEQ ID NO: 85664 - DNA, 1002 bp, synthetic construct; identical to SEQ ID NO: 85659
  misc_feature 1..1002: note = Description of Artificial Sequence: Synthetic coding sequence
  source 1..1002: mol_type = other DNA

SEQ ID NO: 85665 - DNA, 1098 bp, synthetic construct
  misc_feature 1..1098: note = Description of Artificial Sequence: Synthetic coding sequence
  source 1..1098: mol_type = other DNA
atgctggccgtgggctgcgccctgctggccgccctgctggccgcccccggcgccgccctggcccccagaagatgccccgcccaggaggtggccagaggcgtgctgaccagcctgcccggcgacagcgtgaccctgacctgccccggcgtggagcccgaggacaacgccaccgtgcactgggtgctgagaaagcccgccgccggcagccaccccagcagatgggccggcatgggcagaagactgctgctgagaagcgtgcagctgcacgacagcggcaactacagctgctacagagccggcagacccgccggcaccgtgcacctgctggtggacgtgccccccgaggagccccagctgagctgcttcagaaagagccccctgagcaacgtggtgtgcgagtggggccccagaagcacccccagcctgaccaccaaggccgtgctgctggtgagaaagttccagaacagccccgccgaggacttccaggagccctgccagtacagccaggagagccagaagttcagctgccagctggccgtgcccgagggcgacagcagcttctacatcgtgagcatgtgcgtggccagcagcgtgggcagcaagttcagcaagacccagaccttccagggctgcggcatcctgcagcccgacccccccgccaacatcaccgtgaccgccgtggccagaaaccccagatggctgagcgtgacctggcaggacccccacagctggaacagcagcttctacagactgagattcgagctgagatacagagccgagagaagcaagaccttcaccacctggatggtgaaggacctgcagcaccactgcgtgatccacgacgcctggagcggcctgagacacgtggtgcagctgagagcccaggaggagttcggccagggcgagtggagcgagtggagccccgaggccatgggcaccccctggaccgagagcagaagcccccccgccgagaacgaggtgagcacccccatgcaggccctgaccaccaacaaggacgacgacaacatcctgttcagagacagcgccaacgccaccagcctgcccggcagcagaagaagaggcagctgcggcctgtag

SEQ ID NO: 85666 - DNA, 1407 bp, synthetic construct
  misc_feature 1..1407: note = Description of Artificial Sequence: Synthetic coding sequence
  source 1..1407: mol_type = other DNA
atgctggccgtgggctgcgccctgctggccgccctgctggccgcccccggcgccgccctggcccccagaagatgccccgcccaggaggtggccagaggcgtgctgaccagcctgcccggcgacagcgtgaccctgacctgccccggcgtggagcccgaggacaacgccaccgtgcactgggtgctgagaaagcccgccgccggcagccaccccagcagatgggccggcatgggcagaagactgctgctgagaagcgtgcagctgcacgacagcggcaactacagctgctacagagccggcagacccgccggcaccgtgcacctgctggtggacgtgccccccgaggagccccagctgagctgcttcagaaagagccccctgagcaacgtggtgtgcgagtggggccccagaagcacccccagcctgaccaccaaggccgtgctgctggtgagaaagttccagaacagccccgccgaggacttccaggagccctgccagtacagccaggagagccagaagttcagctgccagctggccgtgcccgagggcgacagcagcttctacatcgtgagcatgtgcgtggccagcagcgtgggcagcaagttcagcaagacccagaccttccagggctgcggcatcctgcagcccgacccccccgccaacatcaccgtgaccgccgtggccagaaaccccagatggctgagcgtgacctggcaggacccccacagctggaacagcagcttctacagactgagattcgagctgagatacagagccgagagaagcaagaccttcaccacctggatggtgaaggacctgcagcaccactgcgtgatccacgacgcctggagcggcctgagacacgtggtgcagctgagagcccaggaggagttcggccagggcgagtggagcgagtggagccccgaggccatgggcaccccctggaccgagagcagaagcccccccgccgagaacgaggtgagcacccccatgcaggccctgaccaccaacaaggacgacgacaacatcctgttcagagacagcgccaacgccaccagcctgcccgtgcaggacagcagcagcgtgcccctgcccaccttcctggtggccggcggcagcctggccttcggcaccctgctgtgcatcgccatcgtgctgagattcaagaagacctggaagctgagagccctgaaggagggcaagaccagcatgcaccccccctacagcctgggccagctggtgcccgagagacccagacccacccccgtgctggtgcccctgatcagcccccccgtgagccccagcagcctgggcagcgacaacaccagcagccacaacagacccgacgccagagaccccagaagcccctacgacatcagcaacaccgactacttcttccccagatag

SEQ ID NO: 85667 - DNA, 2757 bp, synthetic construct
  misc_feature 1..2757: note = Description of Artificial Sequence: Synthetic coding sequence
  source 1..2757: mol_type = other DNA
atgctgaccctgcagacctggctggtgcaggccctgttcatcttcctgaccaccgagagcaccggcgagctgctggacccctgcggctacatcagccccgagagccccgtggtgcagctgcacagcaacttcaccgccgtgtgcgtgctgaaggagaagtgcatggactacttccacgtgaacgccaactacatcgtgtggaagaccaaccacttcaccatccccaaggagcagtacaccatcatcaacagaaccgccagcagcgtgaccttcaccgacatcgccagcctgaacatccagctgacctgcaacatcctgaccttcggccagctggagcagaacgtgtacggcatcaccatcatcagcggcctgccccccgagaagcccaagaacctgagctgcatcgtgaacgagggcaagaagatgagatgcgagtgggacggcggcagagagacccacctggagaccaacttcaccctgaagagcgagtgggccacccacaagttcgccgactgcaaggccaagagagacacccccaccagctgcaccgtggactacagcaccgtgtacttcgtgaacatcgaggtgtgggtggaggccgagaacgccctgggcaaggtgaccagcgaccacatcaacttcgaccccgtgtacaaggtgaagcccaaccccccccacaacctgagcgtgatcaacagcgaggagctgagcagcatcctgaagctgacctggaccaaccccagcatcaagagcgtgatcatcctgaagtacaacatccagtacagaaccaaggacgccagcacctggagccagatcccccccgaggacaccgccagcaccagaagcagcttcaccgtgcaggacctgaagcccttcaccgagtacgtgttcagaatcagatgcatgaaggaggacggcaagggctactggagcgactggagcgaggaggccagcggcatcacctacgaggacagacccagcaaggcccccagcttctggtacaagatcgaccccagccacacccagggctacagaaccgtgcagctggtgtggaagaccctgccccccttcgaggccaacggcaagatcctggactacgaggtgaccctgaccagatggaagagccacctgcagaactacaccgtgaacgccaccaagctgaccgtgaacctgaccaacgacagatacctggccaccctgaccgtgagaaacctggtgggcaagagcgacgccgccgtgctgaccatccccgcctgcgacttccaggccacccaccccgtgatggacctgaaggccttccccaaggacaacatgctgtgggtggagtggaccacccccagagagagcgtgaagaagtacatcctggagtggtgcgtgctgagcgacaaggccccctgcatcaccgactggcagcaggaggacggcaccgtgcacagaacctacctgagaggcaacctggccgagagcaagtgctacctgatcaccgtgacccccgtgtacgccgacggccccggcagccccgagagcatcaaggcctacctgaagcaggccccccccagcaagggccccaccgtgagaaccaagaaggtgggcaagaacgaggccgtgctggagtgggaccagctgcccgtggacgtgcagaacggcttcatcagaaactacaccatcttctacagaaccatcatcggcaacgagaccgccgtgaacgtggacagcagccacaccgagtacaccctgagcagcctgaccagcgacaccctgtacatggtgagaatggccgcctacaccgacgagggcggcaaggacggccccgagttcaccttcaccacccccaagttcgcccagggcgagatcgaggccatcgtggtgcccgtgtgcctggccttcctgctgaccaccctgctgggcgtgctgttctgcttcaacaagagagacctgatcaagaagcacatctggcccaacgtgcccgaccccagcaagagccacatcgcccagtggagcccccacaccccccccagacacaacttcaacagcaaggaccagatgtacagcgacggcaacttcaccgacgtgagcgtggtggagatcgaggccaacgacaagaagcccttccccgaggacctgaagagcctggacctgttcaagaaggagaagatcaacaccgagggccacagcagcggcatcggcggcagcagctgcatgagcagcagcagacccagcatcagcagcagcgacgagaacgagagcagccagaacaccagcagcaccgtgcagtacagcaccgtggtgcacagcggctacagacaccaggtgcccagcgtgcaggtgttcagcagaagcgagagcacccagcccctgctggacagcgaggagagacccgaggacctgcagctggtggaccacgtggacggcggcgacggcatcctgcccagacagcagtacttcaagcagaactgcagccagcacgagagcagccccgacatcagccacttcgagagaagcaagcaggtgagcagcgtgaacgaggaggacttcgtgagactgaagcagcagatcagcgaccacatcagccagagctgcggcagcggccagatgaagatgttccaggaggtgagcgccgccgacgccttcggccccggcaccgagggccaggtggagagattcgagaccgtgggcatggaggccgccaccgacgagggcatgcccaagagctacctgccccagaccgtgagacagggcggctacatgccccagtag

SEQ ID NO: 85668 - DNA, 990 bp, synthetic construct
  misc_feature 1..990: note = Description of Artificial Sequence: Synthetic coding sequence
  source 1..990: mol_type = other DNA
atgctgaccctgcagacctggctggtgcaggccctgttcatcttcctgaccaccgagagcaccggcgagctgctggacccctgcggctacatcagccccgagagccccgtggtgcagctgcacagcaacttcaccgccgtgtgcgtgctgaaggagaagtgcatggactacttccacgtgaacgccaactacatcgtgtggaagaccaaccacttcaccatccccaaggagcagtacaccatcatcaacagaaccgccagcagcgtgaccttcaccgacatcgccagcctgaacatccagctgacctgcaacatcctgaccttcggccagctggagcagaacgtgtacggcatcaccatcatcagcggcctgccccccgagaagcccaagaacctgagctgcatcgtgaacgagggcaagaagatgagatgcgagtgggacggcggcagagagacccacctggagaccaacttcaccctgaagagcgagtgggccacccacaagttcgccgactgcaaggccaagagagacacccccaccagctgcaccgtggactacagcaccgtgtacttcgtgaacatcgaggtgtgggtggaggccgagaacgccctgggcaaggtgaccagcgaccacatcaacttcgaccccgtgtacaaggtgaagcccaaccccccccacaacctgagcgtgatcaacagcgaggagctgagcagcatcctgaagctgacctggaccaaccccagcatcaagagcgtgatcatcctgaagtacaacatccagtacagaaccaaggacgccagcacctggagccagatcccccccgaggacaccgccagcaccagaagcagcttcaccgtgcaggacctgaagcccttcaccgagtacgtgttcagaatcagatgcatgaaggaggacggcaagggctactggagcgactggagcgaggaggccagcggcatcacctacgaggacaacatcgccagcttctag

SEQ ID NO: 85669 - DNA, 2574 bp, synthetic construct
  misc_feature 1..2574: note = Description of Artificial Sequence: Synthetic coding sequence
  source 1..2574: mol_type = other DNA
atgctgaccctgcagacctggctggtgcaggccctgttcatcttcctgaccaccgagagcaccggcgagctgctggacccctgcggctacatcagccccgagagccccgtggtgcagctgcacagcaacttcaccgccgtgtgcgtgctgaaggagaagtgcatggactacttccacgtgaacgccaactacatcgtgtggaagaccaaccacttcaccatccccaaggagcagtacaccatcatcaacagaaccgccagcagcgtgaccttcaccgacatcgccagcctgaacatccagctgacctgcaacatcctgaccttcggccagctggagcagaacgtgtacggcatcaccatcatcagcggcctgccccccgagaagcccaagaacctgagctgcatcgtgaacgagggcaagaagatgagatgcgagtgggacggcggcagagagacccacctggagaccaacttcaccctgaagagcgagtgggccacccacaagttcgccgactgcaaggccaagagagacacccccaccagctgcaccgtggactacagcaccgtgtacttcgtgaacatcgaggtgtgggtggaggccgagaacgccctgggcaaggtgaccagcgaccacatcaacttcgaccccgtgtacaaggtgaagcccaaccccccccacaacctgagcgtgatcaacagcgaggagctgagcagcatcctgaagctgacctggaccaaccccagcatcaagagcgtgatcatcctgaagtacaacatccagtacagaaccaaggacgccagcacctggagccagatcccccccgaggacaccgccagcaccagaagcagcttcaccgtgcaggacctgaagcccttcaccgagtacgtgttcagaatcagatgcatgaaggaggacggcaagggctactggagcgactggagcgaggaggccagcggcatcacctacgaggacagacccagcaaggcccccagcttctggtacaagatcgaccccagccacacccagggctacagaaccgtgcagctggtgtggaagaccctgccccccttcgaggccaacggcaagatcctggactacgaggtgaccctgaccagatggaagagccacctgcagaactacaccgtgaacgccaccaagctgaccgtgaacctgaccaacgacagatacctggccaccctgaccgtgagaaacctggtgggcaagagcgacgccgccgtgctgaccatccccgcctgcgacttccagggcaacctggccgagagcaagtgctacctgatcaccgtgacccccgtgtacgccgacggccccggcagccccgagagcatcaaggcctacctgaagcaggccccccccagcaagggccccaccgtgagaaccaagaaggtgggcaagaacgaggccgtgctggagtgggaccagctgcccgtggacgtgcagaacggcttcatcagaaactacaccatcttctacagaaccatcatcggcaacgagaccgccgtgaacgtggacagcagccacaccgagtacaccctgagcagcctgaccagcgacaccctgtacatggtgagaatggccgcctacaccgacgagggcggcaaggacggccccgagttcaccttcaccacccccaagttcgcccagggcgagatcgaggccatcgtggtgcccgtgtgcctggccttcctgctgaccaccctgctgggcgtgctgttctgcttcaacaagagagacctgatcaagaagcacatctggcccaacgtgcccgaccccagcaagagccacatcgcccagtggagcccccacaccccccccagacacaacttcaacagcaaggaccagatgtacagcgacggcaacttcaccgacgtgagcgtggtggagatcgaggccaacgacaagaagcccttccccgaggacctgaagagcctggacctgttcaagaaggagaagatcaacaccgagggccacagcagcggcatcggcggcagcagctgcatgagcagcagcagacccagcatcagcagcagcgacgagaacgagagcagccagaacaccagcagcaccgtgcagtacagcaccgtggtgcacagcggctacagacaccaggtgcccagcgtgcaggtgttcagcagaagcgagagcacccagcccctgctggacagcgaggagagacccgaggacctgcagctggtggaccacgtggacggcggcgacggcatcctgcccagacagcagtacttcaagcagaactgcagccagcacgagagcagccccgacatcagccacttcgagagaagcaagcaggtgagcagcgtgaacgaggaggacttcgtgagactgaagcagcagatcagcgaccacatcagccagagctgcggcagcggccagatgaagatgttccaggaggtgagcgccgccgacgccttcggccccggcaccgagggccaggtggagagattcgagaccgtgggcatggaggccgccaccgacgagggcatgcccaagagctacctgccccagaccgtgagacagggcggctacatgccccagtag

SEQ ID NO: 85670 - DNA, 2757 bp, synthetic construct; identical to SEQ ID NO: 85667
  misc_feature 1..2757: note = Description of Artificial Sequence: Synthetic coding sequence
  source 1..2757: mol_type = other DNA

SEQ ID NO: 85671 - DNA, 990 bp, synthetic construct; identical to SEQ ID NO: 85668
  misc_feature 1..990: note = Description of Artificial Sequence: Synthetic coding sequence
  source 1..990: mol_type = other DNA

SEQ ID NO: 85672 - DNA, 990 bp, synthetic construct; identical to SEQ ID NO: 85668
  misc_feature 1..990: note = Description of Artificial Sequence: Synthetic coding sequence
  source 1..990: mol_type = other DNA

SEQ ID NO: 85673 - DNA, 990 bp, synthetic construct
  misc_feature 1..990: note = Description of Artificial Sequence: Synthetic coding sequence
  source 1..990: mol_type = other DNA
atgctgaccctgcagacctggctggtgcaggccctgttcatcttcctgaccaccgagagcaccggcgagctgctggacccctgcggctacatcagccccgagagccccgtggtgcagctgcacagcaacttcaccgccgtgtgcgtgctgaaggagaagtgcatggactacttccacgtgaacgccaactacatcgtgtggaagaccaaccacttcaccatccccaaggagcagtacaccatcatcaacagaaccgccagcagcgtgaccttcaccgacatcgccagcctgaacatccagctgacctgcaacatcctgaccttcggccagctggagcagaacgtgtacggcatcaccatcatcagcggcctgccccccgagaagcccaagaacctgagctgcatcgtgaacgagggcaagaagatgagatgcgagtgggacggcggcagagagacccacctggagaccaacttcaccctgaagagcgagtgggccacccacaagttcgccgactgcaaggccaagagagacacccccaccagctgcaccgtggactacagcaccgtgtacttcgtgaacatcgaggtgtgggtggaggccgagaacgccctgggcaaggtgaccagcgaccacatcaacttcgaccccgtgtacaaggtgaagcccaaccccccccacaacctgagcgtgatcaacagcgaggagctgagcagcatcctgaagctgacctggaccaaccccagcatcaagagcgtgatcatcctgaagtacaacatccagtacagaaccaaggacgccagcacctggagccagatcccccccgaggacaccgccagcaccagaagcagcttcaccgtgcaggacctgaagcccttcaccgagtacgtgttcagaatcagatgcatgaaggaggacggcaagggctactggagcgactggagcgaggaggccagcggcatcacctacgaggacaccatcttcagcttctag

SEQ ID NO: 85674 - DNA, 1380 bp, synthetic construct
  misc_feature 1..1380: note = Description of Artificial Sequence: Synthetic coding sequence
  source 1..1380: mol_type = other DNA
atgaccatcctgggcaccaccttcggcatggtgttcagcctgctgcaggtggtgagcggcgagagcggctacgcccagaacggcgacctggaggacgccgagctggacgactacagcttcagctgctacagccagctggaggtgaacggcagccagcacagcctgacctgcgccttcgaggaccccgacgtgaacatcaccaacctggagttcgagatctgcggcgccctggtggaggtgaagtgcctgaacttcagaaagctgcaggagatctacttcatcgagaccaagaagttcctgctgatcggcaagagcaacatctgcgtgaaggtgggcgagaagagcctgacctgcaagaagatcgacctgaccaccatcgtgaagcccgaggcccccttcgacctgagcgtggtgtacagagagggcgccaacgacttcgtggtgaccttcaacaccagccacctgcagaagaagtacgtgaaggtgctgatgcacgacgtggcctacagacaggagaaggacgagaacaagtggacccacgtgaacctgagcagcaccaagctgaccctgctgcagagaaagctgcagcccgccgccatgtacgagatcaaggtgagaagcatccccgaccactacttcaagggcttctggagcgagtggagccccagctactacttcagaacccccgagatcaacaacagcagcggcgagatggaccccatcctgctgaccatcagcatcctgagcttcttcagcgtggccctgctggtgatcctggcctgcgtgctgtggaagaagagaatcaagcccatcgtgtggcccagcctgcccgaccacaagaagaccctggagcacctgtgcaagaagcccagaaagaacctgaacgtgagcttcaaccccgagagcttcctggactgccagatccacagagtggacgacatccaggccagagacgaggtggagggcttcctgcaggacaccttcccccagcagctggaggagagcgagaagcagagactgggcggcgacgtgcagagccccaactgccccagcgaggacgtggtgatcacccccgagagcttcggcagagacagcagcctgacctgcctggccggcaacgtgagcgcctgcgacgcccccatcctgagcagcagcagaagcctggactgcagagagagcggcaagaacggcccccacgtgtaccaggacctgctgctgagcctgggcaccaccaacagcaccctgcccccccccttcagcctgcagagcggcatcctgaccctgaaccccgtggcccagggccagcccatcctgaccagcctgggcagcaaccaggaggaggcctacgtgaccatgagcagcttctaccagaaccagtag

SEQ ID NO: 85675 - DNA, 789 bp, synthetic construct
  misc_feature 1..789: note = Description of Artificial Sequence: Synthetic coding sequence
  source 1..789: mol_type = other DNA
atgaccatcctgggcaccaccttcggcatggtgttcagcctgctgcaggtggtgagcggcgagagcggctacgcccagaacggcgacctggaggacgccgagctggacgactacagcttcagctgctacagccagctggaggtgaacggcagccagcacagcctgacctgcgccttcgaggaccccgacgtgaacatcaccaacctggagttcgagatctgcggcgccctggtggaggtgaagtgcctgaacttcagaaagctgcaggagatctacttcatcgagaccaagaagttcctgctgatcggcaagagcaacatctgcgtgaaggtgggcgagaagagcctgacctgcaagaagatcgacctgaccaccatcgtgaagcccgaggcccccttcgacctgagcgtggtgtacagagagggcgccaacgacttcgtggtgaccttcaacaccagccacctgcagaagaagtacgtgaaggtgctgatgcacgacgtggcctacagacaggagaaggacgagaacaagtggacccacgtgaacctgagcagcaccaagctgaccctgctgcagagaaagctgcagcccgccgccatgtacgagatcaaggtgagaagcatccccgaccactacttcaagggcttctggagcgagtggagccccagctactacttcagaacccccgagatcaacaacagcagcggcctgagcctgagctacggccccgtgagccccatcatcagaagactgtggaacatcttcgtgagaaaccaggagaagatctag

SEQ ID NO: 85676 - DNA, 786 bp, synthetic construct
  misc_feature 1..786: note = Description of Artificial Sequence: Synthetic coding sequence
  source 1..786: mol_type = other DNA
atgaccatcctgggcaccaccttcggcatggtgttcagcctgctgcaggtggtgagcggcgagagcggctacgcccagaacggcgacctggaggacgccgagctggacgactacagcttcagctgctacagccagctggaggtgaacggcagccagcacagcctgacctgcgccttcgaggaccccgacgtgaacatcaccaacctggagttcgagatctgcggcgccctggtggaggtgaagtgcctgaacttcagaaagctgcaggagatctacttcatcgagaccaagaagttcctgctgatcggcaagagcaacatctgcgtgaaggtgggcgagaagagcctgacctgcaagaagatcgacctgaccaccatcgtgaagcccgaggcccccttcgacctgagcgtggtgtacagagagggcgccaacgacttcgtggtgaccttcaacaccagccacctgcagaagaagtacgtgaaggtgctgatgcacgacgtggcctacagacaggagaaggacgagaacaagtggacccacgtgaacctgagcagcaccaagctgaccctgctgcagagaaagctgcagcccgccgccatgtacgagatcaaggtgagaagcatccccgaccactacttcaagggcttctggagcgagtggagccccagctactacttcagaacccccgagatcaacaacagcagcggcctgagcctgagctacggccccgtgagccccatcatcagaagactgtggaacatcttcgtgagaaaccaggagaagtag

SEQ ID NO: 85677 - DNA, 180 bp, synthetic construct
  misc_feature 1..180: note = Description of Artificial Sequence: Synthetic coding sequence
  source 1..180: mol_type = other DNA
atgaccatcctgggcaccaccttcggcatggtgttcagcctgctgcaggtggtgagcggcgagagcggctacgcccagaacggcgacctggaggacgccgagctggacgactacagcttcagctgctacagccagctggaggtgaacggcagccagcacagcctgacctgcgccttctag

SEQ ID NO: 85678 - DNA, 159 bp, synthetic construct
  misc_feature 1..159: note = Description of Artificial Sequence: Synthetic coding sequence
  source 1..159: mol_type = other DNA
atgaccatcctgggcaccaccttcggcatggtgttcagcctgctgcaggtggtgagcggcgagagcggctacgcccagaacggcgacctggaggacgccgagctggacgactacagcttcagctgctacagccagctggaggtgaacggcagccagtag

SEQ ID NO: 85679 - DNA, 1566 bp, synthetic construct
  misc_feature 1..1566: note = Description of Artificial Sequence: Synthetic coding sequence
  source 1..1566: mol_type = other DNA
atgggcctgggcagatgcatctgggagggctggaccctggagagcgaggccctgagaagagacatgggcacctggctgctggcctgcatctgcatctgcacctgcgtgtgcctgggcgtgagcgtgaccggcgagggccagggccccagaagcagaaccttcacctgcctgaccaacaacatcctgagaatcgactgccactggagcgcccccgagctgggccagggcagcagcccctggctgctgttcaccagcaaccaggcccccggcggcacccacaagtgcatcctgagaggcagcgagtgcaccgtggtgctgccccccgaggccgtgctggtgcccagcgacaacttcaccatcaccttccaccactgcatgagcggcagagagcaggtgagcctggtggaccccgagtacctgcccagaagacacgtgaagctggacccccccagcgacctgcagagcaacatcagcagcggccactgcatcctgacctggagcatcagccccgccctggagcccatgaccaccctgctgagctacgagctggccttcaagaagcaggaggaggcctgggagcaggcccagcacagagaccacatcgtgggcgtgacctggctgatcctggaggccttcgagctggaccccggcttcatccacgaggccagactgagagtgcagatggccaccctggaggacgacgtggtggaggaggagagatacaccggccagtggagcgagtggagccagcccgtgtgcttccaggccccccagagacagggccccctgatccccccctggggctggcccggcaacaccctggtggccgtgagcatcttcctgctgctgaccggccccacctacctgctgttcaagctgagccccagagtgaagagaatcttctaccagaacgtgcccagccccgccatgttcttccagcccctgtacagcgtgcacaacggcaacttccagacctggatgggcgcccacggcgccggcgtgctgctgagccaggactgcgccggcaccccccagggcgccctggagccctgcgtgcaggaggccaccgccctgctgacctgcggccccgccagaccctggaagagcgtggccctggaggaggagcaggagggccccggcaccagactgcccggcaacctgagcagcgaggacgtgctgcccgccggctgcaccgagtggagagtgcagaccctggcctacctgccccaggaggactgggcccccaccagcctgaccagacccgccccccccgacagcgagggcagcagaagcagcagcagcagcagcagcagcaacaacaacaactactgcgccctgggctgctacggcggctggcacctgagcgccctgcccggcaacacccagagcagcggccccatccccgccctggcctgcggcctgagctgcgaccaccagggcctggagacccagcagggcgtggcctgggtgctggccggccactgccagagacccggcctgcacgaggacctgcagggcatgctgctgcccagcgtgctgagcaaggccagaagctggaccttctag

SEQ ID NO: 85680 - DNA, 1029 bp, synthetic construct
  misc_feature 1..1029: note = Description of Artificial Sequence: Synthetic coding sequence
  source 1..1029: mol_type = other DNA
atgccccagacctgcgacggcaccggccagatgcacctgggcagcaactgctgcaagaacggccagaccctgctgcagagaacctgccacggcgtgagctgctgcggctggtggttccaggccgccagaagcatcctgggcaagggccccagcgcccagagcctggccggctggaccctggagagcgaggccctgagaagagacatgggcacctggctgctggcctgcatctgcatctgcacctgcgtgtgcctgggcgtgagcgtgaccggcgagggccagggccccagaagcagaaccttcacctgcctgaccaacaacatcctgagaatcgactgccactggagcgcccccgagctgggccagggcagcagcccctggctgctgttcaccagactgctggccgcccacatcagcgccagctgcggcgccgtgagcgcccccagctgctgccacctgagacagtgcagctgccacctgaccatcagccccagcctgagcaccaccgcctgcctgggcggcagcagaagcgcctggtggaccagaagcacctgccccggcgacaccagcaacatcagcagcggccactgcatcctgacctggagcatcagccccgccctggagcccatgaccaccctgctgagctacgagctggccttcaagaagcaggaggaggcctgggagcaggcccagcacagagaccacatcgtgggcgtgacctggctgatcctggaggccttcgagctggaccccggcttcatccacgaggccagactgagagtgcagatggccaccctggaggacgacgtggtggaggaggagagatacaccggccagtggagcgagtggagccagcccgtgtgcttccaggccccccagagacagggccccctgatccccccctggggctggcccggcaacaccctggtggccgtgagcatcttcctgctgctgaccggccccacctacctgctgttcaagctgagccccagactgggctggggccccaccggccccgtgtgctgctag

SEQ ID NO: 85681 - DNA, 1503 bp, synthetic construct
  misc_feature 1..1503: note = Description of Artificial Sequence: Synthetic coding sequence
  source 1..1503: mol_type = other DNA
atgggcacctggctgctggcctgcatctgcatctgcacctgcgtgtgcctgggcgtgagcgtgaccggcgagggccagggccccagaagcagaaccttcacctgcctgaccaacaacatcctgagaatcgactgccactggagcgcccccgagctgggccagggcagcagcccctggctgctgttcaccagcaaccaggcccccggcggcacccacaagtgcatcctgagaggcagcgagtgcaccgtggtgctgccccccgaggccgtgctggtgcccagcgacaacttcaccatcaccttccaccactgcatgagcggcagagagcaggtgagcctggtggaccccgagtacctgcccagaagacacgtgaagctggacccccccagcgacctgcagagcaacatcagcagcggccactgcatcctgacctggagcatcagccccgccctggagcccatgaccaccctgctgagctacgagctggccttcaagaagcaggaggaggcctgggagcaggcccagcacagagaccacatcgtgggcgtgacctggctgatcctggaggccttcgagctggaccccggcttcatccacgaggccagactgagagtgcagatggccaccctggaggacgacgtggtggaggaggagagatacaccggccagtggagcgagtggagccagcccgtgtgcttccaggccccccagagacagggccccctgatccccccctggggctggcccggcaacaccctggtggccgtgagcatcttcctgctgctgaccggccccacctacctgctgttcaagctgagccccagagtgaagagaatcttctaccagaacgtgcccagccccgccatgttcttccagcccctgtacagcgtgcacaacggcaacttccagacctggatgggcgcccacggcgccggcgtgctgctgagccaggactgcgccggcaccccccagggcgccctggagccctgcgtgcaggaggccaccgccctgctgacctgcggccccgccagaccctggaagagcgtggccctggaggaggagcaggagggccccggcaccagactgcccggcaacctgagcagcgaggacgtgctgcccgccggctgcaccgagtggagagtgcagaccctggcctacctgccccaggaggactgggcccccaccagcctgaccagacccgccccccccgacagcgagggcagcagaagcagcagcagcagcagcagcagcaacaacaacaactactgcgccctgggctgctacggcggctggcacctgagcgccctgcccggcaacacccagagcagcggccccatccccgccctggcctgcggcctgagctgcgaccaccagggcctggagacccagcagggcgtggcctgggtgctggccggccactgccagagacccggcctgcacgaggacctgcagggcatgctgctgcccagcgtgctgagcaaggccagaagctggaccttctag

SEQ ID NO: 85682 - DNA, 990 bp, synthetic construct
  misc_feature 1..990: note = Description of Artificial Sequence: Synthetic coding sequence
  source 1..990: mol_type = other DNA
atgggcacctggctgctggcctgcatctgcatctgcacctgcgtgtgcctgggcgtgagcgtgaccggcgagggccagggccccagaagcagaaccttcacctgcctgaccaacaacatcctgagaatcgactgccactggagcgcccccgagctgggccagggcagcagcccctggctgctgttcaccagcaaccaggcccccggcggcacccacaagtgcatcctgagaggcagcgagtgcaccgtggtgctgccccccgaggccgtgctggtgcccagcgacaacttcaccatcaccttccaccactgcatgagcggcagagagcaggtgagcctggtggaccccgagtacctgcccagaagacacgtgaagctggacccccccagcgacctgcagagcaacatcagcagcggccactgcatcctgacctggagcatcagccccgccctggagcccatgaccaccctgctgagctacgagctggccttcaagaagcaggaggaggcctgggagcaggcccagcacagagaccacatcgtgggcgtgacctggctgatcctggaggccttcgagctggaccccggcttcatccacgaggccagactgagagtgcagatggccaccctggaggacgacgtggtggaggaggagagatacaccggccagtggagcgagtggagccagcccgtgtgcttccaggccccccagagacagggccccctgatccccccctggggctggcccggcaacaccctggtggccgtgagcatcttcctgctgctgaccggccccacctacctgctgttcaagctgagccccagagtgaagagaatcttctaccagaacgtgcccagccccgccatgttcttccagcccctgtacagcgtgcacaacggcaacttccaggtgtgcgccgagaccaccgagggccacggcggccagggcctgcccagagccctggcctgccccagatgctggctgagctag

SEQ ID NO: 85683 - DNA, 999 bp, synthetic construct
  misc_feature 1..999: note = Description of Artificial Sequence: Synthetic coding sequence
  source 1..999: mol_type = other DNA
atgcacctgggcagcaactgctgcaagaacggccagaccctgctgcagagaacctgccacggcgtgagctgctgcggctggtggttccaggccgccagaagcatcctgggcaagggccccagcgcccagagcctggccggctggaccctggagagcgaggccctgagaagagacatgggcacctggctgctggcctgcatctgcatctgcacctgcgtgtgcctgggcgtgagcgtgaccggcgagggccagggccccagaagcagaaccttcacctgcctgaccaacaacatcctgagaatcgactgccactggagcgcccccgagctgggccagggcagcagcccctggctgctgttcaccagactgctggccgcccacatcagcgccagctgcggcgccgtgagcgcccccagctgctgccacctgagacagtgcagctgccacctgaccatcagccccagcctgagcaccaccgcctgcctgggcggcagcagaagcgcctggtggaccagaagcacctgccccggcgacaccagcaacatcagcagcggccactgcatcctgacctggagcatcagccccgccctggagcccatgaccaccctgctgagctacgagctggccttcaagaagcaggaggaggcctgggagcaggcccagcacagagaccacatcgtgggcgtgacctggctgatcctggaggccttcgagctggaccccggcttcatccacgaggccagactgagagtgcagatggccaccctggaggacgacgtggtggaggaggagagatacaccggccagtggagcgagtggagccagcccgtgtgcttccaggccccccagagacagggccccctgatccccccctggggctggcccggcaacaccctggtggccgtgagcatcttcctgctgctgaccggccccacctacctgctgttcaagctgagccccagactgggctggggccccaccggccccgtgtgctgctag

SEQ ID NO: 85684 - DNA, 1878 bp, synthetic construct
  misc_feature 1..1878: note = Description of Artificial Sequence: Synthetic coding sequence
  source 1..1878: mol_type = other DNA
atggcctgctacatctaccagctgcccagctgggtgctggacgacctgtgcagaaacatggacgccctgagcgagtgggactggatggagttcgccagctacgtgatcaccgacctgacccagctgagaaagatcaagagcatggagagagtgcagggcgtgagcatcaccagagagctgctgtggtggtggggcatgagacaggccaccgtgcagcagctggtggacctgctgtgcagactggagctgtacagagccgcccagatcatcctgaactggaagcccgcccccgagatcagatgccccatccccgccttccccgacagcgtgaagcccgagaagcccctggccgccagcgtgagaaaggccgaggacgagcaggaggagggccagcccgtgagaatggccaccttccccggccccggcagcagccccgccagagcccaccagcccgccttcctgcagccccccgaggaggacgccccccacagcctgagaagcgacctgcccaccagcagcgacagcaaggacttcagcaccagcatccccaagcaggagaagctgctgagcctggccggcgacagcctgttctggagcgaggccgacgtggtgcaggccaccgacgacttcaaccagaacagaaagatcagccagggcaccttcgccgacgtgtacagaggccacagacacggcaagcccttcgtgttcaagaagctgagagagaccgcctgcagcagccccggcagcatcgagagattcttccaggccgagctgcagatctgcctgagatgctgccaccccaacgtgctgcccgtgctgggcttctgcgccgccagacagttccacagcttcatctacccctacatggccaacggcagcctgcaggacagactgcagggccagggcggcagcgaccccctgccctggccccagagagtgagcatctgcagcggcctgctgtgcgccgtggagtacctgcacggcctggagatcatccacagcaacgtgaagagcagcaacgtgctgctggaccagaacctgacccccaagctggcccaccccatggcccacctgtgccccgtgaacaagagaagcaagtacaccatgatgaagacccacctgctgagaaccagcgccgcctacctgcccgaggacttcatcagagtgggccagctgaccaagagagtggacatcttcagctgcggcatcgtgctggccgaggtgctgaccggcatccccgccatggacaacaacagaagccccgtgtacctgaaggacctgctgctgagcgacatccccagcagcaccgccagcctgtgcagcagaaagaccggcgtggagaacgtgatggccaaggagatctgccagaagtacctggagaagggcgccggcagactgcccgaggactgcgccgaggccctggccaccgccgcctgcctgtgcctgagaagaagaaacaccagcctgcaggaggtgtgcggcagcgtggccgccgtggaggagagactgagaggcagagagaccctgctgccctggagcggcctgagcgagggcaccggcagcagcagcaacacccccgaggagaccgacgacgtggacaacagcagcctggacgccagcagcagcatgagcgtggccccctgggccggcgccgccacccccctgctgcccaccgagaacggcgagggcagactgagagtgatcgtgggcagagaggccgacagcagcagcgaggcctgcgtgggcctggagcccccccaggacgtgaccgagaccagctggcagatcgagatcaacgaggccaagagaaagctgatggagaacatcctgctgtacaaggaggagaaggtggacagcatcgagctgttcggcccctag

SEQ ID NO: 85685 - DNA, 1791 bp, synthetic construct
  misc_feature 1..1791: note = Description of Artificial Sequence: Synthetic coding sequence
  source 1..1791: mol_type = other DNA
atggccggcaactgcggcgccagaggcgccctgagcgcccacaccctgctgttcgacctgccccccgccctgctgggcgagctgtgcgccgtgctggacagctgcgacggcgccctgggctggagaggcctggccgagagactgagcagcagctggctggacgtgagacacatcgagaagtacgtggaccagggcaagagcggcaccagagagctgctgtggagctgggcccagaagaacaagaccatcggcgacctgctgcaggtgctgcaggagatgggccacagaagagccatccacctgatcaccaactacggcgccgtgctgagccccagcgagaagagctaccaggagggcggcttccccaacatcctgttcaaggagaccgccaacgtgaccgtggacaacgtgctgatccccgagcacaacgagaagggcatcctgctgaagagcagcatcagcttccagaacatcatcgagggcaccagaaacttccacaaggacttcctgatcggcgagggcgagatcttcgaggtgtacagagtggagatccagaacctgacctacgccgtgaagctgttcaagcaggagaagaagatgcagtgcaagaagcactggaagagattcctgagcgagctggaggtgctgctgctgttccaccaccccaacatcctggagctggccgcctacttcaccgagaccgagaagttctgcctgatctacccctacatgagaaacggcaccctgttcgacagactgcagtgcgtgggcgacaccgcccccctgccctggcacatcagaatcggcatcctgatcggcatcagcaaggccatccactacctgcacaacgtgcagccctgcagcgtgatctgcggcagcatcagcagcgccaacatcctgctggacgaccagttccagcccaagctgaccgacttcgccatggcccacttcagaagccacctggagcaccagagctgcaccatcaacatgaccagcagcagcagcaagcacctgtggtacatgcccgaggagtacatcagacagggcaagctgagcatcaagaccgacgtgtacagcttcggcatcgtgatcatggaggtgctgaccggctgcagagtggtgctggacgaccccaagcacatccagctgagagacctgctgagagagctgatggagaagagaggcctggacagctgcctgagcttcctggacaagaaggtgcccccctgccccagaaacttcagcgccaagctgttctgcctggccggcagatgcgccgccaccagagccaagctgagacccagcatggacgaggtgctgaacaccctggagagcacccaggccagcctgtacttcgccgaggacccccccaccagcctgaagagcttcagatgccccagccccctgttcctggagaacgtgcccagcatccccgtggaggacgacgagagccagaacaacaacctgctgcccagcgacgagggcctgagaatcgacagaatgacccagaagacccccttcgagtgcagccagagcgaggtgatgttcctgagcctggacaagaagcccgagagcaagagaaacgaggaggcctgcaacatgcccagcagcagctgcgaggagagctggttccccaagtacatcgtgcccagccaggacctgagaccctacaaggtgaacatcgaccccagcagcgaggcccccggccacagctgcagaagcagacccgtggagagcagctgcagcagcaagttcagctgggacgagtacgagcagtacaagaaggagtag

SEQ ID NO: 85686 - DNA, 1608 bp, synthetic construct
  misc_feature 1..1608: note = Description of Artificial Sequence: Synthetic coding sequence
  source 1..1608: mol_type = other DNA
atggccggcaactgcggcgccagaggcgccctgagcgcccacaccctgctgttcgacctgccccccgccctgctgggcgagctgtgcgccgtgctggacagctgcgacggcgccctgggctggagaggcctgggcgccgtgctgagccccagcgagaagagctaccaggagggcggcttccccaacatcctgttcaaggagaccgccaacgtgaccgtggacaacgtgctgatccccgagcacaacgagaagggcatcctgctgaagagcagcatcagcttccagaacatcatcgagggcaccagaaacttccacaaggacttcctgatcggcgagggcgagatcttcgaggtgtacagagtggagatccagaacctgacctacgccgtgaagctgttcaagcaggagaagaagatgcagtgcaagaagcactggaagagattcctgagcgagctggaggtgctgctgctgttccaccaccccaacatcctggagctggccgcctacttcaccgagaccgagaagttctgcctgatctacccctacatgagaaacggcaccctgttcgacagactgcagtgcgtgggcgacaccgcccccctgccctggcacatcagaatcggcatcctgatcggcatcagcaaggccatccactacctgcacaacgtgcagccctgcagcgtgatctgcggcagcatcagcagcgccaacatcctgctggacgaccagttccagcccaagctgaccgacttcgccatggcccacttcagaagccacctggagcaccagagctgcaccatcaacatgaccagcagcagcagcaagcacctgtggtacatgcccgaggagtacatcagacagggcaagctgagcatcaagaccgacgtgtacagcttcggcatcgtgatcatggaggtgctgaccggctgcagagtggtgctggacgaccccaagcacatccagctgagagacctgctgagagagctgatggagaagagaggcctggacagctgcctgagcttcctggacaagaaggtgcccccctgccccagaaacttcagcgccaagctgttctgcctggccggcagatgcgccgccaccagagccaagctgagacccagcatggacgaggtgctgaacaccctggagagcacccaggccagcctgtacttcgccgaggacccccccaccagcctgaagagcttcagatgccccagccccctgttcctggagaacgtgcccagcatccccgtggaggacgacgagagccagaacaacaacctgctgcccagcgacgagggcctgagaatcgacagaatgacccagaagacccccttcgagtgcagccagagcgaggtgatgttcctgagcctggacaagaagcccgagagcaagagaaacgaggaggcctgcaacatgcccagcagcagctgcgaggagagctggttccccaagtacatcgtgcccagccaggacctgagaccctacaaggtgaacatcgaccccagcagcgaggcccccggccacagctgcagaagcagacccgtggagagcagctgcagcagcaagttcagctgggacgagtacgagcagtacaagaaggagtag

SEQ ID NO: 85687 - DNA, 657 bp, synthetic construct
  misc_feature 1..657: note = Description of Artificial Sequence: Synthetic coding sequence
  source 1..657: mol_type = other DNA
atgaacaagcccatcacccccagcacctacgtgagatgcctgaacgtgggcctgatcagaaagctgagcgacttcatcgacccccaggagggctggaagaagctggccgtggccatcaagaagcccagcggcgacgacagatacaaccagttccacatcagaagattcgaggccctgctgcagaccggcaagagccccaccagcgagctgctgttcgactggggcaccaccaactgcaccgtgggcgacctggtggacctgctgatccagaacgagttcttcgcccccgccagcctgctgctgcccgacgccgtgcccaagaccgccaacaccctgcccagcaaggaggccatcaccgtgcagcagaagcagatgcccttctgcgacaaggacagaaccctgatgacccccgtgcagaacctggagcagagctacatgccccccgacagcagcagccccgagaacaagagcctggaggtgagcgacaccagattccacagcttcagcttctacgagctgaagaacgtgaccaacaacttcgacgagagacccatcagcgtgggcggcaacaagatgggcgagggcggcttcggcgtggtgtacaagggctacgtgaacaacaactgcggcagcgaggaggcctgcagcaacggctag

SEQ ID NO: 85688 - DNA, 1011 bp, synthetic construct
  misc_feature 1..1011: note = Description of Artificial Sequence: Synthetic coding sequence
  source 1..1011: mol_type = other DNA
atgcccttctgcgacaaggacagaaccctgatgacccccgtgcagaacctggagcagagctacatgccccccgacagcagcagccccgagaacaagagcctggaggtgagcgacaccagattccacagcttcagcttctacgagctgaagaacgtgaccaacaacttcgacgagagacccatcagcgtgggcggcaacaagatgggcgagggcggcttcggcgtggtgtacaagggctacgtgaacaacaccaccgtggccgtgaagaagctggccgccatggtggacatcaccaccgaggagctgaagcagcagttcgaccaggagatcaaggtgatggccaagtgccagcacgagaacctggtggagctgctgggcttcagcagcgacggcgacgacctgtgcctggtgtacgtgtacatgcccaacggcagcctgctggacagactgagctgcctggacggcaccccccccctgagctggcacatgagatgcaagatcgcccagggcgccgccaacggcatcaacttcctgcacgagaaccaccacatccacagagacatcaagagcgccaacatcctgctggacgaggccttcaccgccaagatcagcgacttcggcctggccagagccagcgagaagttcgcccagaccgtgatgaccagcagaatcgtgggcaccaccgcctacatggcccccgaggccctgagaggcgagatcacccccaagagcgacatctacagcttcggcgtggtgctgctggagatcatcaccggcctgcccgccgtggacgagcacagagagccccagctgctgctggacatcaaggaggagatcgaggacgaggagaagaccatcgaggactacatcgacaagaagatgaacgacgccgacagcaccagcgtggaggccatgtacagcgtggccagccagtgcctgcacgagaagaagaacaagagacccgacatcaagaaggtgcagcagctgctgcaggagatgaccgccagctag

SEQ ID NO: 85689 - DNA, 1011 bp, synthetic construct; identical to SEQ ID NO: 85688
  misc_feature 1..1011: note = Description of Artificial Sequence: Synthetic coding sequence
  source 1..1011: mol_type = other DNA

SEQ ID NO: 85690 - DNA, 1383 bp, synthetic construct
  misc_feature 1..1383: note = Description of Artificial Sequence: Synthetic coding sequence
  source 1..1383: mol_type = other DNA
atgaacaagcccatcacccccagcacctacgtgagatgcctgaacgtgggcctgatcagaaagctgagcgacttcatcgacccccaggagggctggaagaagctggccgtggccatcaagaagcccagcggcgacgacagatacaaccagttccacatcagaagattcgaggccctgctgcagaccggcaagagccccaccagcgagctgctgttcgactggggcaccaccaactgcaccgtgggcgacctggtggacctgctgatccagaacgagttcttcgcccccgccagcctgctgctgcccgacgccgtgcccaagaccgccaacaccctgcccagcaaggaggccatcaccgtgcagcagaagcagatgcccttctgcgacaaggacagaaccctgatgacccccgtgcagaacctggagcagagctacatgccccccgacagcagcagccccgagaacaagagcctggaggtgagcgacaccagattccacagcttcagcttctacgagctgaagaacgtgaccaacaacttcgacgagagacccatcagcgtgggcggcaacaagatgggcgagggcggcttcggcgtggtgtacaagggctacgtgaacaacaccaccgtggccgtgaagaagctggccgccatggtggacatcaccaccgaggagctgaagcagcagttcgaccaggagatcaaggtgatggccaagtgccagcacgagaacctggtggagctgctgggcttcagcagcgacggcgacgacctgtgcctggtgtacgtgtacatgcccaacggcagcctgctggacagactgagctgcctggacggcaccccccccctgagctggcacatgagatgcaagatcgcccagggcgccgccaacggcatcaacttcctgcacgagaaccaccacatccacagagacatcaagagcgccaacatcctgctggacgaggccttcaccgccaagatcagcgacttcggcctggccagagccagcgagaagttcgcccagaccgtgatgaccagcagaatcgtgggcaccaccgcctacatggcccccgaggccctgagaggcgagatcacccccaagagcgacatctacagcttcggcgtggtgctgctggagatcatcaccggcctgcccgccgtggacgagcacagagagccccagctgctgctggacatcaaggaggagatcgaggacgaggagaagaccatcgaggactacatcgacaagaagatgaacgacgccgacagcaccagcgtggaggccatgtacagcgtggccagccagtgcctgcacgagaagaagaacaagagacccgacatcaagaaggtgcagcagctgctgcaggagatgaccgccagctag

SEQ ID NO: 85691 - DNA, 270 bp, synthetic construct
  misc_feature 1..270: note = Description of Artificial Sequence: Synthetic coding sequence
  source 1..270: mol_type = other DNA
atgaacaagcccatcacccccagcacctacgtgagatgcctgaacgtgggcctgatcagaaagctgagcgacttcatcgacccccaggagggctggaagaagctggccgtggccatcaagaagcccagcggcgacgacagatacaaccagttccacatcagaagattcgaggccctgctgcagaccggcaagagccccaccagcgagctgctgttcgactggggcaccaccaactgcaccgtgggcgacctggtggacctgctgatctag

SEQ ID NO: 85692 - DNA, 1383 bp, synthetic construct; identical to SEQ ID NO: 85690
  misc_feature 1..1383: note = Description of Artificial Sequence: Synthetic coding sequence
  source 1..1383: mol_type = other DNA

SEQ ID NO: 85693 - DNA, 2394 bp, synthetic construct
  misc_feature 1..2394: note = Description of Artificial Sequence: Synthetic coding sequence
  source 1..2394: mol_type = other DNA
atgtacctggagaccagaagagccatcttcgtgttctggatcttcctgcaggtgcagggcaccaaggacatcagcatcaacatctaccacagcgagaccaaggacatcgacaacccccccagaaacgagaccaccgagagcaccgagaagatgtacaagatgagcaccatgagaagaatcttcgacctggccaagcacagaaccaagagaagcgccttcttccccaccggcgtgaaggtgtgcccccaggagagcatgaagcagatcctggacagcctgcaggcctactacagactgagagtgtgccaggaggccgtgtgggaggcctacagaatcttcctggacagaatccccgacaccggcgagtaccaggactgggtgagcatctgccagcaggagaccttctgcctgttcgacatcggcaagaacttcagcaacagccaggagcacctggacctgctgcagcagagaatcaagcagagaagcttccccgacagaaaggacgagatcagcgccgagaagaccctgggcgagcccggcgagaccatcgtgatcagcaccgacgtggccaacgtgagcctgggccccttccccctgacccccgacgacaccctgctgaacgagatcctggacaacaccctgaacgacaccaagatgcccaccaccgagagagagaccgagttcgccgtgctggaggagcagagagtggagctgagcgtgagcctggtgaaccagaagttcaaggccgagctggccgacagccagagcccctactaccaggagctggccggcaagagccagctgcagatgcagaagatcttcaagaagctgcccggcttcaagaagatccacgtgctgggcttcagacccaagaaggagaaggacggcagcagcagcaccgagatgcagctgaccgccatcttcaagagacacagcgccgaggccaagagccccgccagcgacctgctgagcttcgacagcaacaagatcgagagcgaggaggtgtaccacggcaccatggaggaggacaagcagcccgagatctacctgaccgccaccgacctgaagagactgatcagcaaggccctggaggaggagcagagcctggacgtgggcaccatccagttcaccgacgagatcgccggcagcctgcccgccttcggccccgacacccagagcgagctgcccaccagcttcgccgtgatcaccgaggacgccaccctgagccccgagctgccccccgtggagccccagctggagaccgtggacggcgccgagcacggcctgcccgacaccagctggagcccccccgccatggccagcaccagcctgagcgaggccccccccttcttcatggccagcagcatcttcagcctgaccgaccagggcaccaccgacaccatggccaccgaccagaccatgctggtgcccggcctgaccatccccaccagcgactacagcgccatcagccagctggccctgggcatcagccacccccccgccagcagcgacgacagcagaagcagcgccggcggcgaggacatggtgagacacctggacgagatggacctgagcgacacccccgcccccagcgaggtgcccgagctgagcgagtacgtgagcgtgcccgaccacttcctggaggacaccacccccgtgagcgccctgcagtacatcaccaccagcagcatgaccatcgcccccaagggcagagagctggtggtgttcttcagcctgagagtggccaacatggccttcagcaacgacctgttcaacaagagcagcctggagtacagagccctggagcagcagttcacccagctgctggtgccctacctgagaagcaacctgaccggcttcaagcagctggagatcctgaacttcagaaacggcagcgtgatcgtgaacagcaagatgaagttcgccaagagcgtgccctacaacctgaccaaggccgtgcacggcgtgctggaggacttcagaagcgccgccgcccagcagctgcacctggagatcgacagctacagcctgaacatcgagcccgccgaccaggccgacccctgcaagttcctggcctgcggcgagttcgcccagtgcgtgaagaacgagagaaccgaggaggccgagtgcagatgcaagcccggctacgacagccagggcagcctggacggcctggagcccggcctgtgcggccccggcaccaaggagtgcgaggtgctgcagggcaagggcgccccctgcagactgcccgaccacagcgagaaccaggcctacaagaccagcgtgaagaagttccagaaccagcagaacaacaaggtgatcagcaagagaaacagcgagctgctgaccgtggagtacgaggagttcaaccaccaggactgggagggcaactag

SEQ ID NO: 85694 - DNA, 477 bp, synthetic construct
  misc_feature 1..477: note = Description of Artificial Sequence: Synthetic coding sequence
  source 1..477: mol_type = other DNA
gagagacccaacggcaccagcgcccagcccgcccaggtgaagcccgagttctacagacaggccgagctgaagccctgcccctggaccggcagcaaccagagaagatgcatcaccttctgccccacccccgaccaggccgacccctgcaagttcctggcctgcggcgagttcgcccagtgcgtgaagaacgagagaaccgaggaggccgagtgcagatgcaagcccggctacgacagccagggcagcctggacggcctggagcccggcctgtgcggccccggcaccaaggagtgcgaggtgctgcagggcaagggcgccccctgcagactgcccgaccacagcgagaaccaggcctacaagaccagcgtgaagaagttccagaaccagcagaacaacaaggtgatcagcaagagaaacagcgagctgctgaccgtggagtacgaggagttcaaccaccaggactgggagggcaactag

SEQ ID NO: 85695 - DNA, 444 bp, synthetic construct
  misc_feature 1..444: note = Description of Artificial Sequence: Synthetic coding sequence
  source 1..444: mol_type = other DNA
atgtacctggagaccagaagagccatcttcgtgttctggatcttcctgcaggtgcagggcaccaaggtgtgccaggaggccgtgtgggaggcctacagaatcttcctggacagaatccccgacaccggcgagtaccaggactgggtgagcatctgccagcaggagaccttctgcctgttcgacatcggcaagaacttcagcaacagccaggagcacctggacctgctgcagcagagaatcaagcagagaagcttccccgacagaaaggacgagatcagcgccgagaagaccctgggcgagcccggcgagaccatcgtgatcagcaccgagaagaacaagggcaagaccaagcccttcaacatcctgcagttcggcaacaaccaccacgagcacctgctgcccatcttctgcctgctgagcagcatcatctacacctactactag

SEQ ID NO: 85696 - DNA, 3726 bp, synthetic construct
  misc_feature 1..3726: note = Description of Artificial Sequence: Synthetic coding sequence
  source 1..3726: mol_type = other DNA
atgatcatgttccccctgttcggcaagatcagcctgggcatcctgatcttcgtgctgatcgagggcgacttccccagcctgaccgcccagacctacctgagcatcgaggagatccaggagcccaagagcgccgtgagcttcctgctgcccgaggagagcaccgacctgagcctggccaccaagaagaagcagcccctggacagaagagagaccgagagacagtggctgatcagaagaagaagaagcatcctgttccccaacggcgtgaagatctgccccgacgagagcgtggccgaggccgtggccaaccacgtgaagtacttcaaggtgagagtgtgccaggaggccgtgtgggaggccttcagaaccttctgggacagactgcccggcagagaggagtaccactactggatgaacctgtgcgaggacggcgtgaccagcatcttcgagatgggcaccaacttcagcgagagcgtggagcacagaagcctgatcatgaagaagctgacctacgccaaggagaccgtgagcagcagcgagctgagcagccccgtgcccgtgggcgacaccagcaccctgggcgacaccaccctgagcgtgccccaccccgaggtggacgcctacgagggcgccagcgagagcagcctggagagacccgaggagagcatcagcaacgagatcgagaacgtgatcgaggaggccaccaagcccgccggcgagcagatcgccgagttcagcatccacctgctgggcaagcagtacagagaggagctgcaggacagcagcagcttccaccaccagcacctggaggaggagttcatcagcgaggtggagaacgccttcaccggcctgcccggctacaaggagatcagagtgctggagttcagaagccccaaggagaacgacagcggcgtggacgtgtactacgccgtgaccttcaacggcgaggccatcagcaacaccacctgggacctgatcagcctgcacagcaacaaggtggagaaccacggcctggtggagctggacgacaagcccaccgtggtgtacaccatcagcaacttcagagactacatcgccgagaccctgcagcagaacttcctgctgggcaacagcagcctgaaccccgaccccgacagcctgcagctgatcaacgtgagaggcgtgctgagacaccagaccgaggacctggtgtggaacacccagagcagcagcctgcaggccacccccagcagcatcctggacaacaccttccaggccgcctggcccagcgccgacgagagcatcaccagcagcatcccccccctggacttcagcagcggcccccccagcgccaccggcagagagctgtggagcgagagccccctgggcgacctggtgagcacccacaagctggccttccccagcaagatgggcctgagcagcagccccgaggtgctggaggtgagcagcctgaccctgcacagcgtgacccccgccgtgctgcagaccggcctgcccgtggccagcgaggagagaaccagcggcagccacctggtggaggacggcctggccaacgtggaggagagcgaggacttcctgagcatcgacagcctgcccagcagcagcttcacccagcccgtgcccaaggagaccatccccagcatggaggacagcgacgtgagcctgaccagcagcccctacctgaccagcagcatccccttcggcctggacagcctgaccagcaaggtgaaggaccagctgaaggtgagccccttcctgcccgacgccagcatggagaaggagctgatcttcgacggcggcctgggcagcggcagcggccagaaggtggacctgatcacctggccctggagcgagaccagcagcgagaagagcgccgagcccctgagcaagccctggctggaggacgacgacagcctgctgcccgccgagatcgaggacaagaagctggtgctggtggacaagatggacagcaccgaccagatcagcaagcacagcaagtacgagcacgacgacagaagcacccacttccccgaggaggagcccctgagcggccccgccgtgcccatcttcgccgacaccgccgccgagagcgccagcctgaccctgcccaagcacatcagcgaggtgcccggcgtggacgactacagcgtgaccaaggcccccctgatcctgaccagcgtggccatcagcgccagcaccgacaagagcgaccaggccgacgccatcctgagagaggacatggagcagatcaccgagagcagcaactacgagtggttcgacagcgaggtgagcatggtgaagcccgacatgcagaccctgtggaccatcctgcccgagagcgagagagtgtggaccagaaccagcagcctggagaagctgagcagagacatcctggccagcaccccccagagcgccgacagactgtggctgagcgtgacccagagcaccaagctgccccccaccaccatcagcaccctgctggaggacgaggtgatcatgggcgtgcaggacatcagcctggagctggacagaatcggcaccgactactaccagcccgagcaggtgcaggagcagaacggcaaggtgggcagctacgtggagatgagcaccagcgtgcacagcaccgagatggtgagcgtggcctggcccaccgagggcggcgacgacctgagctacacccagaccagcggcgccctggtggtgttcttcagcctgagagtgaccaacatgatgttcagcgaggacctgttcaacaagaacagcctggagtacaaggccctggagcagagattcctggagctgctggtgccctacctgcagagcaacctgaccggcttccagaacctggagatcctgaacttcagaaacggcagcatcgtggtgaacagcagaatgaagttcgccaacagcgtgccccccaacgtgaacaacgccgtgtacatgatcctggaggacttctgcaccaccgcctacaacaccatgaacctggccatcgacaagtacagcctggacgtggagagcggcgacgaggccaacccctgcaagttccaggcctgcaacgagttcagcgagtgcctggtgaacccctggagcggcgaggccaagtgcagatgcttccccggctacctgagcgtggaggagagaccctgccagagcctgtgcgacctgcagcccgacttctgcctgaacgacggcaagtgcgacatcatgcccggccacggcgccatctgcagatgcagagtgggcgagaactggtggtacagaggcaagcactgcgaggagttcgtgagcgagcccgtgatcatcggcatcaccatcgccagcgtggtgggcctgctggtgatcttcagcgccatcatctacttcttcatcagaaccctgcaggcccaccacgacagaagcgagagagagagccccttcagcggcagcagcagacagcccgacagcctgagcagcatcgagaacgccgtgaagtacaaccccgtgtacgagagccacagagccggctgcgagaagtacgagggcccctacccccagcaccccttctacagcagcgccagcggcgacgtgatcggcggcctgagcagagaggagatcagacagatgtacgagagcagcgagctgagcagagaggagatccaggagagaatgagagtgctggagctgtacgccaacgaccccgagttcgccgccttcgtgagagagcagcaggtggaggaggtgtag

SEQ ID NO: 85697 - DNA, 201 bp, synthetic construct
  misc_feature 1..201: note = Description of Artificial Sequence: Synthetic coding sequence
  source 1..201: mol_type = other DNA
ggctacctgagcgtggaggagagaccctgccagagcctgtgcgacctgcagcccgacttctgcctgaacgacggcaagtgcgacatcatgcccggccacggcgccatctgcagcggcagcagcagacagcccgacagcctgagcagcatcgagaacgccgtgaagtacaaccccgtgtacgagagccacagagccggctag

SEQ ID NO: 85698 - DNA, 2745 bp, synthetic construct
  misc_feature 1..2745: note = Description of Artificial Sequence: Synthetic coding sequence
  source 1..2745: mol_type = other DNA
atggcccagttccccacccccttcggcggcagcctggacatctgggccatcaccgtggaggagagagccaagcacgaccagcagttccacagcctgaagcccatcagcggcttcatcaccggcgaccaggccagaaacttcttcttccagagcggcctgccccagcccgtgctggcccagatctgggccctggccgacatgaacaacgacggcagaatggaccaggtggagttcagcatcgccatgaagctgatcaagctgaagctgcagggctaccagctgcccagcgccctgccccccgtgatgaagcagcagcccgtggccatcagcagcgcccccgccttcggcatgggcggcatcgccagcatgccccccctgaccgccgtggcccccgtgcccatgggcagcatccccgtggtgggcatgagccccaccctggtgagcagcgtgcccaccgccgccgtgccccccctggccaacggcgccccccccgtgatccagcccctgcccgccttcgcccaccccgccgccaccctgcccaagagcagcagcttcagcagaagcggccccggcagccagctgaacaccaagctgcagaaggcccagagcttcgacgtggccagcgtgccccccgtggccgagtgggccgtgccccagagcagcagactgaagtacagacagctgttcaacagccacgacaagaccatgagcggccacctgaccggcccccaggccagaaccatcctgatgcagagcagcctgccccaggcccagctggccagcatctggaacctgagcgacatcgaccaggacggcaagctgaccgccgaggagttcatcctggccatgcacctgatcgacgtggccatgagcggccagcccctgccccccgtgctgccccccgagtacatcccccccagcttcagaagagtgagaagcggcagcggcatcagcgtgatcagcagcaccagcgtggaccagagactgcccgaggagcccgtgctggaggacgagcagcagcagctggagaagaagctgcccgtgaccttcgaggacaagaagagagagaacttcgagagaggcaacctggagctggagaagagaagacaggccctgctggagcagcagagaaaggagcaggagagactggcccagctggagagagccgagcaggagagaaaggagagagagagacaggagcaggagagaaagagacagctggagctggagaagcagctggagaagcagagagagctggagagacagagagaggaggagagaagaaaggagatcgagagaagagaggccgccaagagagagctggagagacagagacagctggagtgggagagaaacagaagacaggagctgctgaaccagagaaacaaggagcaggaggacatcgtggtgctgaaggccaagaagaagaccctggagttcgagctggaggccctgaacgacaagaagcaccagctggagggcaagctgcaggacatcagatgcagactgaccacccagagacaggagatcgagagcaccaacaagagcagagagctgagaatcgccgagatcacccacctgcagcagcagctgcaggagagccagcagatgctgggcagactgatccccgagaagcagatcctgaacgaccagctgaagcaggtgcagcagaacagcctgcacagagacagcctggtgaccctgaagagagccctggaggccaaggagctggccagacagcacctgagagaccagctggacgaggtggagaaggagaccagaagcaagctgcaggagatcgacatcttcaacaaccagctgaaggagctgagagagatccacaacaagcagcagctgcagaagcagaagagcatggaggccgagagactgaagcagaaggagcaggagagaaagatcatcgagctggagaagcagaaggaggaggcccagagaagagcccaggagagagacaagcagtggctggagcacgtgcagcaggaggacgagcaccagagacccagaaagctgcacgaggaggagaagctgaagagagaggagagcgtgaagaagaaggacggcgaggagaagggcaagcaggaggcccaggacaagctgggcagactgttccaccagcaccaggagcccgccaagcccgccgtgcaggccccctggagcaccgccgagaagggccccctgaccatcagcgcccaggagaacgtgaaggtggtgtactacagagccctgtaccccttcgagagcagaagccacgacgagatcaccatccagcccggcgacatcgtgatggtggacgagagccagaccggcgagcccggctggctgggcggcgagctgaagggcaagaccggctggttccccgccaactacgccgagaagatccccgagaacgaggtgcccgcccccgtgaagcccgtgaccgacagcaccagcgcccccgcccccaagctggccctgagagagacccccgcccccctggccgtgaccagcagcgagcccagcaccacccccaacaactgggccgacttcagcagcacctggcccaccagcaccaacgagaagcccgagaccgacaactgggacgcctgggccgcccagcccagcctgaccgtgcccagcgccggccagctgagacagagaagcgccttcacccccgccaccgccaccggcagcagccccagccccgtgctgggccagcacggcttctggttcttcagagagagctgctag

SEQ ID NO: 85699 - DNA, 954 bp, synthetic construct
  misc_feature 1..954: note = Description of Artificial Sequence: Synthetic coding sequence
  source 1..954: mol_type = other DNA
tgacccctgatggagagcgagctgctgaccgagaaggaggtggccatgatcttcgtgaactggaaggagctgatcatgtgcaacatcaagctgctgaaggccctgagagtgagaaagaagatgagcggcgagaagatgcccgtgaagatgatcggcgacatcctgagcgcccagctgccccacatgcagccctacatcagattctgcagcagacagctgaacggcgccgccctgatccagcagaagaccgacgaggcccccgacttcaaggagttcgtgaagagactggccatggaccccagatgcaagggcatgcccctgagcagcttcatcctgaagcccatgcagagagtgaccagataccccctgatcatcaagaaccagctggtgttcaacagcgtgaccaactgcctgggccccagaaagttcctgcacagcggcaagctgtacaaggccaagagcaacaaggagctgtacggcttcctgttcaacgacttcctgctgctgacccagatcaccaagcccctgggcagcagcggcaccgacaaggtgttcagccccaagagcaacctgcagtacaagatgtacaagacccccatcttcctgaacgaggtgctggtgaagctgcccaccgaccccagcggcgacgagcccatcttccacatcagccacatcgacagagtgtacaccctgagagccgagagcatcaacgagagaaccgcctgggtgcagaagatcaaggccgccagcgagctgtacatcgagaccgagaagaagaagagagagaaggcctacctggtgagaagccagagagccaccggcatcggcagactgatggtgaacgtggtggagggcatcgagctgaagccctgcagaagccacggcaagagcaacccctactgcgaggtgaccatgggcagccagtgccacatcaccaagaccatccaggactag

SEQ ID NO: 85700 - DNA, 5166 bp, synthetic construct
  misc_feature 1..5166: note = Description of Artificial Sequence: Synthetic coding sequence
  source 1..5166: mol_type = other DNA
atggcccagttccccacccccttcggcggcagcctggacatctgggccatcaccgtggaggagagagccaagcacgaccagcagttccacagcctgaagcccatcagcggcttcatcaccggcgaccaggccagaaacttcttcttccagagcggcctgccccagcccgtgctggcccagatctgggccctggccgacatgaacaacgacggcagaatggaccaggtggagttcagcatcgccatgaagctgatcaagctgaagctgcagggctaccagctgcccagcgccctgccccccgtgatgaagcagcagcccgtggccatcagcagcgcccccgccttcggcatgggcggcatcgccagcatgccccccctgaccgccgtggcccccgtgcccatgggcagcatccccgtggtgggcatgagccccaccctggtgagcagcgtgcccaccgccgccgtgccccccctggccaacggcgccccccccgtgatccagcccctgcccgccttcgcccaccccgccgccaccctgcccaagagcagcagcttcagcagaagcggccccggcagccagctgaacaccaagctgcagaaggcccagagcttcgacgtggccagcgtgccccccgtggccgagtgggccgtgccccagagcagcagactgaagtacagacagctgttcaacagccacgacaagaccatgagcggccacctgaccggcccccaggccagaaccatcctgatgcagagcagcctgccccaggcccagctggccagcatctggaacctgagcgacatcgaccaggacggcaagctgaccgccgaggagttcatcctggccatgcacctgatcgacgtggccatgagcggccagcccctgccccccgtgctgccccccgagtacatcccccccagcttcagaagagtgagaagcggcagcggcatcagcgtgatcagcagcaccagcgtggaccagagactgcccgaggagcccgtgctggaggacgagcagcagcagctggagaagaagctgcccgtgaccttcgaggacaagaagagagagaacttcgagagaggcaacctggagctggagaagagaagacaggccctgctggagcagcagagaaaggagcaggagagactggcccagctggagagagccgagcaggagagaaaggagagagagagacaggagcaggagagaaagagacagctggagctggagaagcagctggagaagcagagagagctggagagacagagagaggaggagagaagaaaggagatcgagagaagagaggccgccaagagagagctggagagacagagacagctggagtgggagagaaacagaagacaggagctgctgaaccagagaaacaaggagcaggaggacatcgtggtgctgaaggccaagaagaagaccctggagttcgagctggaggccctgaacgacaagaagcaccagctggagggcaagctgcaggacatcagatgcagactgaccacccagagacaggagatcgagagcaccaacaagagcagagagctgagaatcgccgagatcacccacctgcagcagcagctgcaggagagccagcagatgctgggcagactgatccccgagaagcagatcctgaacgaccagctgaagcaggtgcagcagaacagcctgcacagagacagcctggtgaccctgaagagagccctggaggccaaggagctggccagacagcacctgagagaccagctggacgaggtggagaaggagaccagaagcaagctgcaggagatcgacatcttcaacaaccagctgaaggagctgagagagatccacaacaagcagcagctgcagaagcagaagagcatggaggccgagagactgaagcagaaggagcaggagagaaagatcatcgagctggagaagcagaaggaggaggcccagagaagagcccaggagagagacaagcagtggctggagcacgtgcagcaggaggacgagcaccagagacccagaaagctgcacgaggaggagaagctgaagagagaggagagcgtgaagaagaaggacggcgaggagaagggcaagcaggaggcccaggacaagctgggcagactgttccaccagcaccaggagcccgccaagcccgccgtgcaggccccctggagcaccgccgagaagggccccctgaccatcagcgcccaggagaacgtgaaggtggtgtactacagagccctgtaccccttcgagagcagaagccacgacgagatcaccatccagcccggcgacatcgtgatggtgatcggctgctgggtggacgagagccagaccggcgagcccggctggctgggcggcgagctgaagggcaagaccggctggttccccgccaactacgccgagaagatccccgagaacgaggtgcccgcccccgtgaagcccgtgaccgacagcaccagcgcccccgcccccaagctggccctgagagagacccccgcccccctggccgtgaccagcagcgagcccagcaccacccccaacaactgggccgacttcagcagcacctggcccaccagcaccaacgagaagcccgagaccgacaactgggacgcctgggccgcccagcccagcctgaccgtgcccagcgccggccagctgagacagagaagcgccttcacccccgccaccgccaccggcagcagccccagccccgtgctgggccagggcgagaaggtggagggcctgcaggcccaggccctgtacccctggagagccaagaaggacaaccacctgaacttcaacaagaacgacgtgatcaccgtgctggagcagcaggacatgtggtggttcggcgaggtgcagggccagaagggctggttccccaagagctacgtgaagctgatcagcggccccatcagaaagagcaccagcatggacagcggcagcagcgagagccccgccagcctgaagagagtggccagccccgccgccaagcccgtggtgagcggcgaggagttcatcgccatgtacacctacgagagcagcgagcagggcgacctgaccttccagcagggcgacgtgatcctggtgaccaagaaggacggcgactggtggaccggcaccgtgggcgacaaggccggcgtgttccccagcaactacgtgagactgaaggacagcgagggcagcggcaccgccggcaagaccggcagcctgggcaagaagcccgagatcgcccaggtgatcgccagctacaccgccaccggccccgagcagctgaccctggcccccggccagctgatcctgatcagaaagaagaaccccggcggctggtgggagggcgagctgcaggccagaggcaagaagagacagatcggctggttccccgccaactacgtgaagctgctgagccccggcaccagcaagatcacccccaccgagccccccaagagcaccgccctggccgccgtgtgccaggtgatcggcatgtacgactacaccgcccagaacgacgacgagctggccttcaacaagggccagatcatcaacgtgctgaacaaggaggaccccgactggtggaagggcgaggtgaacggccaggtgggcctgttccccagcaactacgtgaagctgaccaccgacatggaccccagccagcagtggtgcagcgacctgcacctgctggacatgctgacccccaccgagagaaagagacagggctacatccacgagctgatcgtgaccgaggagaactacgtgaacgacctgcagctggtgaccgagatcttccagaagcccctgatggagagcgagctgctgaccgagaaggaggtggccatgatcttcgtgaactggaaggagctgatcatgtgcaacatcaagctgctgaaggccctgagagtgagaaagaagatgagcggcgagaagatgcccgtgaagatgatcggcgacatcctgagcgcccagctgccccacatgcagccctacatcagattctgcagcagacagctgaacggcgccgccctgatccagcagaagaccgacgaggcccccgacttcaaggagttcgtgaagagactggccatggaccccagatgcaagggcatgcccctgagcagcttcatcctgaagcccatgcagagagtgaccagataccccctgatcatcaagaacatcctggagaacacccccgagaaccaccccgaccacagccacctgaagcacgccctggagaaggccgaggagctgtgcagccaggtgaacgagggcgtgagagagaaggagaacagcgacagactggagtggatccaggcccacgtgcagtgcgagggcctgagcgagcagctggtgttcaacagcgtgaccaactgcctgggccccagaaagttcctgcacagcggcaagctgtacaaggccaagagcaacaaggagctgtacggcttcctgttcaacgacttcctgctgctgacccagatcaccaagcccctgggcagcagcggcaccgacaaggtgttcagccccaagagcaacctgcagtacaagatgtacaagacccccatcttcctgaacgaggtgctggtgaagctgcccaccgaccccagcggcgacgagcccatcttccacatcagccacatcgacagagtgtacaccctgagagccgagagcatcaacgagagaaccgcctgggtgcagaagatcaaggccgccagcgagctgtacatcgagaccgagaagaagaagagagagaaggcctacctggtgagaagccagagagccaccggcatcggcagactgatggtgaacgtggtggagggcatcgagctgaagccctgcagaagccacggcaagagcaacccctactgcgaggtgaccatgggcagccagtgccacatcaccaagaccatccaggacaccctgaaccccaagtggaacagcaactgccagttcttcatcagagacctggagcaggaggtgctgtgcatcaccgtgttcgagagagaccagttcagccccgacgacttcctgggcagaaccgagatcagagtggccgacatcaagaaggaccagggcagcaagggccccgtgaccaagtgcctgctgctgcacgaggtgcccaccggcgagatcgtggtgagactggacctgcagctgttcgacgagccctag

SEQ ID NO: 85701 - DNA, 4953 bp, synthetic construct
  misc_feature 1..4953: note = Description of Artificial Sequence: Synthetic coding sequence
  source 1..4953: mol_type = other DNA
atggcccagttccccacccccttcggcggcagcctggacatctgggccatcaccgtggaggagagagccaagcacgaccagcagttccacagcctgaagcccatcagcggcttcatcaccggcgaccaggccagaaacttcttcttccagagcggcctgccccagcccgtgctggcccagatctgggccctggccgacatgaacaacgacggcagaatggaccaggtggagttcagcatcgccatgaagctgatcaagctgaagctgcagggctaccagctgcccagcgccctgccccccgtgatgaagcagcagcccgtggccatcagcagcgcccccgccttcggcatgggcggcatcgccagcatgccccccctgaccgccgtggcccccgtgcccatgggcagcatccccgtggtgggcatgagccccaccctggtgagcagcgtgcccaccgccgccgtgccccccctggccaacggcgccccccccgtgatccagcccctgcccgccttcgcccaccccgccgccaccctgcccaagagcagcagcttcagcagaagcggccccggcagccagctgaacaccaagctgcagaaggcccagagcttcgacgtggccagcgtgccccccgtggccgagtgggccgtgccccagagcagcagactgaagtacagacagctgttcaacagccacgacaagaccatgagcggccacctgaccggcccccaggccagaaccatcctgatgcagagcagcctgccccaggcccagctggccagcatctggaacctgagcgacatcgaccaggacggcaagctgaccgccgaggagttcatcctggccatgcacctgatcgacgtggccatgagcggccagcccctgccccccgtgctgccccccgagtacatcccccccagcttcagaagagtgagaagcggcagcggcatcagcgtgatcagcagcaccagcgtggaccagagactgcccgaggagcccgtgctggaggacgagcagcagcagctggagaagaagctgcccgtgaccttcgaggacaagaagagagagaacttcgagagaggcaacctggagctggagaagagaagacaggccctgctggagcagcagagaaaggagcaggagagactggcccagctggagagagccgagcaggagagaaaggagagagagagacaggagcaggagagaaagagacagctggagctggagaagcagctggagaagcagagagagctggagagacagagagaggaggagagaagaaaggagatcgagagaagagaggccgccaagagagagctggagagacagagacagctggagtgggagagaaacagaagacaggagctgctgaaccagagaaacaaggagcaggaggacatcgtggtgctgaaggccaagaagaagaccctggagttcgagctggaggccctgaacgacaagaagcaccagctggagggcaagctgcaggacatcagatgcagactgaccacccagagacaggagatcgagagcaccaacaagagcagagagctgagaatcgccgagatcacccacctgcagcagcagctgcaggagagccagcagatgctgggcagactgatccccgagaagcagatcctgaacgaccagctgaagcaggtgcagcagaacagcctgcacagagacagcctggtgaccctgaagagagccctggaggccaaggagctggccagacagcacctgagagaccagctggacgaggtggagaaggagaccagaagcaagctgcaggagatcgacatcttcaacaaccagctgaaggagctgagagagatccacaacaagcagcagctgcagaagcagaagagcatggaggccgagagactgaagcagaaggagcaggagagaaagatcatcgagctggagaagcagaaggaggaggcccagagaagagcccaggagagagacaagcagtggctggagcacgtgcagcaggaggacgagcaccagagacccagaaagctgcacgaggaggagaagctgaagagagaggagagcgtgaagaagaaggacggcgaggagaagggcaagcaggaggcccaggacaagctgggcagactgttccaccagcaccaggagcccgccaagcccgccgtgcaggccccctggagcaccgccgagaagggccccctgaccatcagcgcccaggagaacgtgaaggtggtgtactacagagccctgtaccccttcgagagcagaagccacgacgagatcaccatccagcccggcgacatcgtgatggtgatcggctgctgggtggacgagagccagaccggcgagcccggctggctgggcggcgagctgaagggcaagaccggctggttccccgccaactacgccgagaagatccccgagaacgaggtgcccgcccccgtgaagcccgtgaccgacagcaccagcgcccccgcccccaagctggccctgagagagacccccgcccccctggccgtgaccagcagcgagcccagcaccacccccaacaactgggccgacttcagcagcacctggcccaccagcaccaacgagaagcccgagaccgacaactgggacgcctgggccgcccagcccagcctgaccgtgcccagcgccggccagctgagacagagaagcgccttcacccccgccaccgccaccggcagcagccccagccccgtgctgggccagggcgagaaggtggagggcctgcaggcccaggccctgtacccctggagagccaagaaggacaaccacctgaacttcaacaagaacgacgtgatcaccgtgctggagcagcaggacatgtggtggttcggcgaggtgcagggccagaagggctggttccccaagagctacgtgaagctgatcagcggccccatcagaaagagcaccagcatggacagcggcagcagcgagagccccgccagcctgaagagagtggccagccccgccgccaagcccgtggtgagcggcgaggagatcgcccaggtgatcgccagctacaccgccaccggccccgagcagctgaccctggcccccggccagctgatcctgatcagaaagaagaaccccggcggctggtgggagggcgagctgcaggccagaggcaagaagagacagatcggctggttccccgccaactacgtgaagctgctgagccccggcaccagcaagatcacccccaccgagccccccaagagcaccgccctggccgccgtgtgccaggtgatcggcatgtacgactacaccgcccagaacgacgacgagctggccttcaacaagggccagatcatcaacgtgctgaacaaggaggaccccgactggtggaagggcgaggtgaacggccaggtgggcctgttccccagcaactacgtgaagctgaccaccgacatggaccccagccagcagtggtgcagcgacctgcacctgctggacatgctgacccccaccgagagaaagagacagggctacatccacgagctgatcgtgaccgaggagaactacgtgaacgacctgcagctggtgaccgagatcttccagaagcccctgatggagagcgagctgctgaccgagaaggaggtggccatgatcttcgtgaactggaaggagctgatcatgtgcaacatcaagctgctgaaggccctgagagtgagaaagaagatgagcggcgagaagatgcccgtgaagatgatcggcgacatcctgagcgcccagctgccccacatgcagccctacatcagattctgcagcagacagctgaacggcgccgccctgatccagcagaagaccgacgaggcccccgacttcaaggagttcgtgaagagactggccatggaccccagatgcaagggcatgcccctgagcagcttcatcctgaagcccatgcagagagtgaccagataccccctgatcatcaagaacatcctggagaacacccccgagaaccaccccgaccacagccacctgaagcacgccctggagaaggccgaggagctgtgcagccaggtgaacgagggcgtgagagagaaggagaacagcgacagactggagtggatccaggcccacgtgcagtgcgagggcctgagcgagcagctggtgttcaacagcgtgaccaactgcctgggccccagaaagttcctgcacagcggcaagctgtacaaggccaagagcaacaaggagctgtacggcttcctgttcaacgacttcctgctgctgacccagatcaccaagcccctgggcagcagcggcaccgacaaggtgttcagccccaagagcaacctgcagtacaagatgtacaagacccccatcttcctgaacgaggtgctggtgaagctgcccaccgaccccagcggcgacgagcccatcttccacatcagccacatcgacagagtgtacaccctgagagccgagagcatcaacgagagaaccgcctgggtgcagaagatcaaggccgccagcgagctgtacatcgagaccgagaagaagaagagagagaaggcctacctggtgagaagccagagagccaccggcatcggcagactgatggtgaacgtggtggagggcatcgagctgaagccctgcagaagccacggcaagagcaacccctactgcgaggtgaccatgggcagccagtgccacatcaccaagaccatccaggacaccctgaaccccaagtggaacagcaactgccagttcttcatcagagacctggagcaggaggtgctgtgcatcaccgtgttcgagagagaccagttcagccccgacgacttcctgggcagaaccgagatcagagtggccgacatcaagaaggaccagggcagcaagggccccgtgaccaagtgcctgctgctgcacgaggtgcccaccggcgagatcgtggtgagactggacctgcagctgttcgacgagccctag

SEQ ID NO: 85702 - DNA, 3237 bp, synthetic construct
  misc_feature 1..3237: note = Description of Artificial Sequence: Synthetic coding sequence
  source 1..3237: mol_type = other DNA
atggcccagttccccacccccttcggcggcagcctggacatctgggccatcaccgtggaggagagagccaagcacgaccagcagttccacagcctgaagcccatcagcggcttcatcaccggcgaccaggccagaaacttcttcttccagagcggcctgccccagcccgtgctggcccagatctgggccctggccgacatgaacaacgacggcagaatggaccaggtggagttcagcatcgccatgaagctgatcaagctgaagctgcagggctaccagctgcccagcgccctgccccccgtgatgaagcagcagcccgtggccatcagcagcgcccccgccttcggcatgggcggcatcgccagcatgccccccctgaccgccgtggcccccgtgcccatgggcagcatccccgtggtgggcatgagccccaccctggtgagcagcgtgcccaccgccgccgtgccccccctggccaacggcgccccccccgtgatccagcccctgcccgccttcgcccaccccgccgccaccctgcccaagagcagcagcttcagcagaagcggccccggcagccagctgaacaccaagctgcagaaggcccagagcttcgacgtggccagcgtgccccccgtggccgagtgggccgtgccccagagcagcagactgaagtacagacagctgttcaacagccacgacaagaccatgagcggccacctgaccggcccccaggccagaaccatcctgatgcagagcagcctgccccaggcccagctggccagcatctggaacctgagcgacatcgaccaggacggcaagctgaccgccgaggagttcatcctggccatgcacctgatcgacgtggccatgagcggccagcccctgccccccgtgctgccccccgagtacatcccccccagcttcagaagagtgagaagcggcagcggcatcagcgtgatcagcagcaccagcgtggaccagagactgcccgaggagcccgtgctggaggacgagcagcagcagctggagaagaagctgcccgtgaccttcgaggacaagaagagagagaacttcgagagaggcaacctggagctggagaagagaagacaggccctgctggagcagcagagaaaggagcaggagagactggcccagctggagagagccgagcaggagagaaaggagagagagagacaggagcaggagagaaagagacagctggagctggagaagcagctggagaagcagagagagctggagagacagagagaggaggagagaagaaaggagatcgagagaagagaggccgccaagagagagctggagagacagagacagctggagtgggagagaaacagaagacaggagctgctgaaccagagaaacaaggagcaggaggacatcgtggtgctgaaggccaagaagaagaccctggagttcgagctggaggccctgaacgacaagaagcaccagctggagggcaagctgcaggacatcagatgcagactgaccacccagagacaggagatcgagagcaccaacaagagcagagagctgagaatcgccgagatcacccacctgcagcagcagctgcaggagagccagcagatgctgggcagactgatccccgagaagcagatcctgaacgaccagctgaagcaggtgcagcagaacagcctgcacagagacagcctggtgaccctgaagagagccctggaggccaaggagctggccagacagcacctgagagaccagctggacgaggtggagaaggagaccagaagcaagctgcaggagatcgacatcttcaacaaccagctgaaggagctgagagagatccacaacaagcagcagctgcagaagcagaagagcatggaggccgagagactgaagcagaaggagcaggagagaaagatcatcgagctggagaagcagaaggaggaggcccagagaagagcccaggagagagacaagcagtggctggagcacgtgcagcaggaggacgagcaccagagacccagaaagctgcacgaggaggagaagctgaagagagaggagagcgtgaagaagaaggacggcgaggagaagggcaagcaggaggcccaggacaagctgggcagactgttccaccagcaccaggagcccgccaagcccgccgtgcaggccccctggagcaccgccgagaagggccccctgaccatcagcgcccaggagaacgtgaaggtggtgtactacagagccctgtaccccttcgagagcagaagccacgacgagatcaccatccagcccggcgacatcgtgatggtggacgagagccagaccggcgagcccggctggctgggcggcgagctgaagggcaagaccggctggttccccgccaactacgccgagaagatccccgagaacgaggtgcccgcccccgtgaagcccgtgaccgacagcaccagcgcccccgcccccaagctggccctgagagagacccccgcccccctggccgtgaccagcagcgagcccagcaccacccccaacaactgggccgacttcagcagcacctggcccaccagcaccaacgagaagcccgagaccgacaactgggacgcctgggccgcccagcccagcctgaccgtgcccagcgccggccagctgagacagagaagcgccttcacccccgccaccgccaccggcagcagccccagccccgtgctgggccagggcgagaaggtggagggcctgcaggcccaggccctgtacccctggagagccaagaaggacaaccacctgaacttcaacaagaacgacgtgatcaccgtgctggagcagcaggacatgtggtggttcggcgaggtgcagggccagaagggctggttccccaagagctacgtgaagctgatcagcggccccatcagaaagagcaccagcatggacagcggcagcagcgagagccccgccagcctgaagagagtggccagccccgccgccaagcccgtggtgagcggcgaggagttcatcgccatgtacacctacgagagcagcgagcagggcgacctgaccttccagcagggcgacgtgatcctggtgaccaagaaggacggcgactggtggaccggcaccgtgggcgacaaggccggcgtgttccccagcaactacgtgagactgaaggacagcgagggcagcggcaccgccggcaagaccggcagcctgggcaagaagcccggccccagctgcaacgtgaagtag

SEQ ID NO: 85703 - DNA, 3663 bp, synthetic construct
  misc_feature 1..3663: note = Description of Artificial Sequence: Synthetic coding sequence
  source 1..3663: mol_type = other DNA
atggcccagttccccacccccttcggcggcagcctggacatctgggccatcaccgtggaggagagagccaagcacgaccagcagttccacagcctgaagcccatcagcggcttcatcaccggcgaccaggccagaaacttcttcttccagagcggcctgccccagcccgtgctggcccagatctgggccctggccgacatgaacaacgacggcagaatggaccaggtggagttcagcatcgccatgaagctgatcaagctgaagctgcagggctaccagctgcccagcgccctgccccccgtgatgaagcagcagcccgtggccatcagcagcgcccccgccttcggcatgggcggcatcgccagcatgccccccctgaccgccgtggcccccgtgcccatgggcagcatccccgtggtgggcatgagccccaccctggtgagcagcgtgcccaccgccgccgtgccccccctggccaacggcgccccccccgtgatccagcccctgcccgccttcgcccaccccgccgccaccctgcccaagagcagcagcttcagcagaagcggccccggcagccagctgaacaccaagctgcagaaggcccagagcttcgacgtggccagcgtgccccccgtggccgagtgggccgtgccccagagcagcagactgaagtacagacagctgttcaacagccacgacaagaccatgagcggccacctgaccggcccccaggccagaaccatcctgatgcagagcagcctgccccaggcccagctggccagcatctggaacctgagcgacatcgaccaggacggcaagctgaccgccgaggagttcatcctggccatgcacctgatcgacgtggccatgagcggccagcccctgccccccgtgctgccccccgagtacatcccccccagcttcagaagagtgagaagcggcagcggcatcagcgtgatcagcagcaccagcgtggaccagagactgcccgaggagcccgtgctggaggacgagcagcagcagctggagaagaagctgcccgtgaccttcgaggacaagaagagagagaacttcgagagaggcaacctggagctggagaagagaagacaggccctgctggagcagcagagaaaggagcaggagagactggcccagctggagagagccgagcaggagagaaaggagagagagagacaggagcaggagagaaagagacagctggagctggagaagcagctggagaagcagagagagctggagagacagagagaggaggagagaagaaaggagatcgagagaagagaggccgccaagagagagctggagagacagagacagctggagtgggagagaaacagaagacaggagctgctgaaccagagaaacaaggagcaggaggacatcgtggtgctgaaggccaagaagaagaccctggagttcgagctggaggccctgaacgacaagaagcaccagctggagggcaagctgcaggacatcagatgcagactgaccacccagagacaggagatcgagagcaccaacaagagcagagagctgagaatcgccgagatcacccacctgcagcagcagctgcaggagagccagcagatgctgggcagactgatccccgagaagcagatcctgaacgaccagctgaagcaggtgcagcagaacagcctgcacagagacagcctggtgaccctgaagagagccctggaggccaaggagctggccagacagcacctgagagaccagctggacgaggtggagaaggagaccagaagcaagctgcaggagatcgacatcttcaacaaccagctgaaggagctgagagagatccacaacaagcagcagctgcagaagcagaagagcatggaggccgagagactgaagcagaaggagcaggagagaaagatcatcgagctggagaagcagaaggaggaggcccagagaagagcccaggagagagacaagcagtggctggagcacgtgcagcaggaggacgagcaccagagacccagaaagctgcacgaggaggagaagctgaagagagaggagagcgtgaagaagaaggacggcgaggagaagggcaagcaggaggcccaggacaagctgggcagactgttccaccagcaccaggagcccgccaagcccgccgtgcaggccccctggagcaccgccgagaagggccccctgaccatcagcgcccaggagaacgtgaaggtggtgtactacagagccctgtaccccttcgagagcagaagccacgacgagatcaccatccagcccggcgacatcgtgatggtgaagggcgagtgggtggacgagagccagaccggcgagcccggctggctgggcggcgagctgaagggcaagaccggctggttccccgccaactacgccgagaagatccccgagaacgaggtgcccgcccccgtgaagcccgtgaccgacagcaccagcgcccccgcccccaagctggccctgagagagacccccgcccccctggccgtgaccagcagcgagcccagcaccacccccaacaactgggccgacttcagcagcacctggcccaccagcaccaacgagaagcccgagaccgacaactgggacgcctgggccgcccagcccagcctgaccgtgcccagcgccggccagctgagacagagaagcgccttcacccccgccaccgccaccggcagcagccccagccccgtgctgggccagggcgagaaggtggagggcctgcaggcccaggccctgtacccctggagagccaagaaggacaaccacctgaacttcaacaagaacgacgtgatcaccgtgctggagcagcaggacatgtggtggttcggcgaggtgcagggccagaagggctggttccccaagagctacgtgaagctgatcagcggccccatcagaaagagcaccagcatggacagcggcagcagcgagagccccgccagcctgaagagagtggccagccccgccgccaagcccgtggtgagcggcgaggagttcatcgccatgtacacctacgagagcagcgagcagggcgacctgaccttccagcagggcgacgtgatcctggtgaccaagaaggacggcgactggtggaccggcaccgtgggcgacaaggccggcgtgttccccagcaactacgtgagactgaaggacagcgagggcagcggcaccgccggcaagaccggcagcctgggcaagaagcccgagatcgcccaggtgatcgccagctacaccgccaccggccccgagcagctgaccctggcccccggccagctgatcctgatcagaaagaagaaccccggcggctggtgggagggcgagctgcaggccagaggcaagaagagacagatcggctggttccccgccaactacgtgaagctgctgagccccggcaccagcaagatcacccccaccgagccccccaagagcaccgccctggccgccgtgtgccaggtgatcggcatgtacgactacaccgcccagaacgacgacgagctggccttcaacaagggccagatcatcaacgtgctgaacaaggaggaccccgactggtggaagggcgaggtgaacggccaggtgggcctgttccccagcaactacgtgaagctgaccaccgacatggaccccagccagcagtag

SEQ ID NO: 85704 - DNA, 5166 bp, synthetic construct
  misc_feature 1..5166: note = Description of Artificial Sequence: Synthetic coding sequence
  source 1..5166: mol_type = other DNA
atggcccagttccccacccccttcggcggcagcctggacatctgggccatcaccgtggaggagagagccaagcacgaccagcagttccacagcctgaagcccatcagcggcttcatcaccggcgaccaggccagaaacttcttcttccagagcggcctgccccagcccgtgctggcccagatctgggccctggccgacatgaacaacgacggcagaatggaccaggtggagttcagcatcgccatgaagctgatcaagctgaagctgcagggctaccagctgcccagcgccctgccccccgtgatgaagcagcagcccgtggccatcagcagcgcccccgccttcggcatgggcggcatcgccagcatgccccccctgaccgccgtggcccccgtgcccatgggcagcatccccgtggtgggcatgagccccaccctggtgagcagcgtgcccaccgccgccgtgccccccctggccaacggcgccccccccgtgatccagcccctgcccgccttcgcccaccccgccgccaccctgcccaagagcagcagcttcagcagaagcggccccggcagccagctgaacaccaagctgcagaaggcccagagcttcgacgtggccagcgtgccccccgtggccgagtgggccgtgccccagagcagcagactgaagtacagacagctgttcaacagccacgacaagaccatgagcggccacctgaccggcccccaggccagaaccatcctgatgcagagcagcctgccccaggcccagctggccagcatctggaacctgagcgacatcgaccaggacggcaagctgaccgccgaggagttcatcctggccatgcacctgatcgacgtggccatgagcggccagcccctgccccccgtgctgccccccgagtacatcccccccagcttcagaagagtgagaagcggcagcggcatcagcgtgatcagcagcaccagcgtggaccagagactgcccgaggagcccgtgctggaggacgagcagcagcagctggagaagaagctgcccgtgaccttcgaggacaagaagagagagaacttcgagagaggcaacctggagctggagaagagaagacaggccctgctggagcagcagagaaaggagcaggagagactggcccagctggagagagccgagcaggagagaaaggagagagagagacaggagcaggagagaaagagacagctggagctggagaagcagctggagaagcagagagagctggagagacagagagaggaggagagaagaaaggagatcgagagaagagaggccgccaagagagagctggagagacagagacagctggagtgggagagaaacagaagacaggagctgctgaaccagagaaacaaggagcaggaggacatcgtggtgctgaaggccaagaagaagaccctggagttcgagctggaggccctgaacgacaagaagcaccagctggagggcaagctgcaggacatcagatgcagactgaccacccagagacaggagatcgagagcaccaacaagagcagagagctgagaatcgccgagatcacccacctgcagcagcagctgcaggagagccagcagatgctgggcagactgatccccgagaagcagatcctgaacgaccagctgaagcaggtgcagcagaacagcctgcacagagacagcctggtgaccctgaagagagccctggaggccaaggagctggccagacagcacctgagagaccagctggacgaggtggagaaggagaccagaagcaagctgcaggagatcgacatcttcaacaaccagctgaaggagctgagagagatccacaacaagcagcagctgcagaagcagaagagcatggaggccgagagactgaagcagaaggagcaggagagaaagatcatcgagctggagaagcagaaggaggaggcccagagaagagcccaggagagagacaagcagtggctggagcacgtgcagcaggaggacgagcaccagagacccagaaagctgcacgaggaggagaagctgaagagagaggagagcgtgaagaagaaggacggcgaggagaagggcaagcaggaggcccaggacaagctgggcagactgttccaccagcaccaggagcccgccaagcccgccgtgcaggccccctggagcaccgccgagaagggccccctgaccatcagcgcccaggagaacgtgaaggtggtgtactacagagccctgtaccccttcgagagcagaagccacgacgagatcaccatccagcccggcgacatcgtgatggtgaagggcgagtgggtggacgagagccagaccggcgagcccggctggctgggcggcgagctgaagggcaagaccggctggttccccgccaactacgccgagaagatccccgagaacgaggtgcccgcccccgtgaagcccgtgaccgacagcaccagcgcccccgcccccaagctggccctgagagagacccccgcccccctggccgtgaccagcagcgagcccagcaccacccccaacaactgggccgacttcagcagcacctggcccaccagcaccaacgagaagcccgagaccgacaactgggacgcctgggccgcccagcccagcctgaccgtgcccagcgccggccagctgagacagagaagcgccttcacccccgccaccgccaccggcagcagccccagccccgtgctgggccagggcgagaaggtggagggcctgcaggcccaggccctgtacccctggagagccaagaaggacaaccacctgaacttcaacaagaacgacgtgatcaccgtgctggagcagcaggacatgtggtggttcggcgaggtgcagggccagaagggctggttccccaagagctacgtgaagctgatcagcggccccatcagaaagagcaccagcatggacagcggcagcagcgagagccccgccagcctgaagagagtggccagccccgccgccaagcccgtggtgagcggcgaggagttcatcgccatgtacacctacgagagcagcgagcagggcgacctgaccttccagcagggcgacgtgatcctggtgaccaagaaggacggcgactggtggaccggcaccgtgggcgacaaggccggcgtgttccccagcaactacgtgagactgaaggacagcgagggcagcggcaccgccggcaagaccggcagcctgggcaagaagcccgagatcgcccaggtgatcgccagctacaccgccaccggccccgagcagctgaccctggcccccggccagctgatcctgatcagaaagaagaaccccggcggctggtgggagggcgagctgcaggccagaggcaagaagagacagatcggctggttccccgccaactacgtgaagctgctgagccccggcaccagcaagatcacccccaccgagccccccaagagcaccgccctggccgccgtgtgccaggtgatcggcatgtacgactacaccgcccagaacgacgacgagctggccttcaacaagggccagatcatcaacgtgctgaacaaggaggaccccgactggtggaagggcgaggtgaacggccaggtgggcctgttccccagcaactacgtgaagctgaccaccgacatggaccccagccagcagtggtgcagcgacctgcacctgctggacatgctgacccccaccgagagaaagagacagggctacatccacgagctgatcgtgaccgaggagaactacgtgaacgacctgcagctggtgaccgagatcttccagaagcccctgatggagagcgagctgctgaccgagaaggaggtggccatgatcttcgtgaactggaaggagctgatcatgtgcaacatcaagctgctgaaggccctgagagtgagaaagaagatgagcggcgagaagatgcccgtgaagatgatcggcgacatcctgagcgcccagctgccccacatgcagccctacatcagattctgcagcagacagctgaacggcgccgccctgatccagcagaagaccgacgaggcccccgacttcaaggagttcgtgaagagactggccatggaccccagatgcaagggcatgcccctgagcagcttcatcctgaagcccatgcagagagtgaccagataccccctgatcatcaagaacatcctggagaacacccccgagaaccaccccgaccacagccacctgaagcacgccctggagaaggccgaggagctgtgcagccaggtgaacgagggcgtgagagagaaggagaacagcgacagactggagtggatccaggcccacgtgcagtgcgagggcctgagcgagcagctggtgttcaacagcgtgaccaactgcctgggccccagaaagttcctgcacagcggcaagctgtacaaggccaagagcaacaaggagctgtacggcttcctgttcaacgacttcctgctgctgacccagatcaccaagcccctgggcagcagcggcaccgacaaggtgttcagccccaagagcaacctgcagtacaagatgtacaagacccccatcttcctgaacgaggtgctggtgaagctgcccaccgaccccagcggcgacgagcccatcttccacatcagccacatcgacagagtgtacaccctgagagccgagagcatcaacgagagaaccgcctgggtgcagaagatcaaggccgccagcgagctgtacatcgagaccgagaagaagaagagagagaaggcctacctggtgagaagccagagagccaccggcatcggcagactgatggtgaacgtggtggagggcatcgagctgaagccctgcagaagccacggcaagagcaacccctactgcgaggtgaccatgggcagccagtgccacatcaccaagaccatccaggacaccctgaaccccaagtggaacagcaactgccagttcttcatcagagacctggagcaggaggtgctgtgcatcaccgtgttcgagagagaccagttcagccccgacgacttcctgggcagaaccgagatcagagtggccgacatcaagaaggaccagggcagcaagggccccgtgaccaagtgcctgctgctgcacgaggtgcccaccggcgagatcgtggtgagactggacctgcagctgttcgacgagccctag

SEQ ID NO: 85705 - DNA, 3048 bp, synthetic construct
  misc_feature 1..3048: note = Description of Artificial Sequence: Synthetic coding sequence
  source 1..3048: mol_type = other DNA
atggcccagttccccacccccttcggcggcagcctggacatctgggccatcaccgtggaggagagagccaagcacgaccagcagttccacagcctgaagcccatcagcggcttcatcaccggcgaccaggccagaaacttcttcttccagagcggcctgccccagcccgtgctggcccagatctgggccctggccgacatgaacaacgacggcagaatggaccaggtggagttcagcatcgccatgaagctgatcaagctgaagctgcagggctaccagctgcccagcgccctgccccccgtgatgaagcagcagcccgtggccatcagcagcgcccccgccttcggcatgggcggcatcgccagcatgccccccctgaccgccgtggcccccgtgcccatgggcagcatccccgtggtgggcatgagccccaccctggtgagcagcgtgcccaccgccgccgtgccccccctggccaacggcgccccccccgtgatccagcccctgcccgccttcgcccaccccgccgccaccctgcccaagagcagcagcttcagcagaagcggccccggcagccagctgaacaccaagctgcagaaggcccagagcttcgacgtggccagcgtgccccccgtggccgagtgggccgtgccccagagcagcagactgaagtacagacagctgttcaacagccacgacaagaccatgagcggccacctgaccggcccccaggccagaaccatcctgatgcagagcagcctgccccaggcccagctggccagcatctggaacctgagcgacatcgaccaggacggcaagctgaccgccgaggagttcatcctggccatgcacctgatcgacgtggccatgagcggccagcccctgccccccgtgctgccccccgagtacatcccccccagcttcagaagagtgagaagcggcagcggcatcagcgtgatcagcagcaccagcgtggaccagagactgcccgaggagcccgtgctggaggacgagcagcagcagctggagaagaagctgcccgtgaccttcgaggacaagaagagagagaacttcgagagaggcaacctggagctggagaagagaagacaggccctgctggagcagcagagaaaggagcaggagagactggcccagctggagagagccgagcaggagagaaaggagagagagagacaggagcaggagagaaagagacagctggagctggagaagcagctggagaagcagagagagctggagagacagagagaggaggagagaagaaaggagatcgagagaagagaggccgccaagagagagctggagagacagagacagctggagtgggagagaaacagaagacaggagctgctgaaccagagaaacaaggagcaggaggacatcgtggtgctgaaggccaagaagaagaccctggagttcgagctggaggccctgaacgacaagaagcaccagctggagggcaagctgcaggacatcagatgcagactgaccacccagagacaggagatcgagagcaccaacaagagcagagagctgagaatcgccgagatcacccacctgcagcagcagctgcaggagagccagcagatgctgggcagactgatccccgagaagcagatcctgaacgaccagctgaagcaggtgcagcagaacagcctgcacagagacagcctggtgaccctgaagagagccctggaggccaaggagctggccagacagcacctgagagaccagctggacgaggtggagaaggagaccagaagcaagctgcaggagatcgacatcttcaacaaccagctgaaggagctgagagagatccacaacaagcagcagctgcagaagcagaagagcatggaggccgagagactgaagcagaaggagcaggagagaaagatcatcgagctggagaagcagaaggaggaggcccagagaagagcccaggagagagacaagcagtggctggagcacgtgcagcaggaggacgagcaccagagacccagaaagctgcacgaggaggagaagctgaagagagaggagagcgtgaagaagaaggacggcgaggagaagggcaagcaggaggcccaggacaagctgggcagactgttccaccagcaccaggagcccgccaagcccgccgtgcaggccccctggagcaccgccgagaagggccccctgaccatcagcgcccaggagaacgtgaaggtggtgtactacagagccctgtaccccttcgagagcagaagccacgacgagatcaccatccagcccggcgacatcgtgatggtggacgagagccagaccggcgagcccggctggctgggcggcgagctgaagggcaagaccggctggttccccgccaactacgccgagaagatccccgagaacgaggtgcccgcccccgtgaagcccgtgaccgacagcaccagcgcccccgcccccaagctggccctgagagagacccccgcccccctggccgtgaccagcagcgagcccagcaccacccccaacaactgggccgacttcagcagcacctggcccaccagcaccaacgagaagcccgagaccgacaactgggacgcctgggccgcccagcccagcctgaccgtgcccagcgccggccagctgagacagagaagcgccttcacccccgccaccgccaccggcagcagccccagccccgtgctgggccagggcgagaaggtggagggcctgcaggcccaggccctgtacccctggagagccaagaaggacaaccacctgaacttcaacaagaacgacgtgatcaccgtgctggagcagcaggacatgtggtggttcggcgaggtgcagggccagaagggctggttccccaagagctacgtgaagctgatcagcggccccatcagaaagagcaccagcatggacagcggcagcagcgagagccccgccagcctgaagagagtggccagccccgccgccaagcccgtggtgagcggcgagggcctgtggaactgctgggagaacagagagttcagaaagaagacctag

SEQ ID NO: 85706 - DNA, 3063 bp, synthetic construct
  misc_feature 1..3063: note = Description of Artificial Sequence: Synthetic coding sequence
  source 1..3063: mol_type = other DNA
atggcccagttccccacccccttcggcggcagcctggacatctgggccatcaccgtggaggagagagccaagcacgaccagcagttccacagcctgaagcccatcagcggcttcatcaccggcgaccaggccagaaacttcttcttccagagcggcctgccccagcccgtgctggcccagatctgggccctggccgacatgaacaacgacggcagaatggaccaggtggagttcagcatcgccatgaagctgatcaagctgaagctgcagggctaccagctgcccagcgccctgccccccgtgatgaagcagcagcccgtggccatcagcagcgcccccgccttcggcatgggcggcatcgccagcatgccccccctgaccgccgtggcccccgtgcccatgggcagcatccccgtggtgggcatgagccccaccctggtgagcagcgtgcccaccgccgccgtgccccccctggccaacggcgccccccccgtgatccagcccctgcccgccttcgcccaccccgccgccaccctgcccaagagcagcagcttcagcagaagcggccccggcagccagctgaacaccaagctgcagaaggcccagagcttcgacgtggccagcgtgccccccgtggccgagtgggccgtgccccagagcagcagactgaagtacagacagctgttcaacagccacgacaagaccatgagcggccacctgaccggcccccaggccagaaccatcctgatgcagagcagcctgccccaggcccagctggccagcatctggaacctgagcgacatcgaccaggacggcaagctgaccgccgaggagttcatcctggccatgcacctgatcgacgtggccatgagcggccagcccctgccccccgtgctgccccccgagtacatcccccccagcttcagaagagtgagaagcggcagcggcatcagcgtgatcagcagcaccagcgtggaccagagactgcccgaggagcccgtgctggaggacgagcagcagcagctggagaagaagctgcccgtgaccttcgaggacaagaagagagagaacttcgagagaggcaacctggagctggagaagagaagacaggccctgctggagcagcagagaaaggagcaggagagactggcccagctggagagagccgagcaggagagaaaggagagagagagacaggagcaggagagaaagagacagctggagctggagaagcagctggagaagcagagagagctggagagacagagagaggaggagagaagaaaggagatcgagagaagagaggccgccaagagagagctggagagacagagacagctggagtgggagagaaacagaagacaggagctgctgaaccagagaaacaaggagcaggaggacatcgtggtgctgaaggccaagaagaagaccctggagttcgagctggaggccctgaacgacaagaagcaccagctggagggcaagctgcaggacatcagatgcagactgaccacccagagacaggagatcgagagcaccaacaagagcagagagctgagaatcgccgagatcacccacctgcagcagcagctgcaggagagccagcagatgctgggcagactgatccccgagaagcagatcctgaacgaccagctgaagcaggtgcagcagaacagcctgcacagagacagcctggtgaccctgaagagagccctggaggccaaggagctggccagacagcacctgagagaccagctggacgaggtggagaaggagaccagaagcaagctgcaggagatcgacatcttcaacaaccagctgaaggagctgagagagatccacaacaagcagcagctgcagaagcagaagagcatggaggccgagagactgaagcagaaggagcaggagagaaagatcatcgagctggagaagcagaaggaggaggcccagagaagagcccaggagagagacaagcagtggctggagcacgtgcagcaggaggacgagcaccagagacccagaaagctgcacgaggaggagaagctgaagagagaggagagcgtgaagaagaaggacggcgaggagaagggcaagcaggaggcccaggacaagctgggcagactgttccaccagcaccaggagcccgccaagcccgccgtgcaggccccctggagcaccgccgagaagggccccctgaccatcagcgcccaggagaacgtgaaggtggtgtactacagagccctgtaccccttcgagagcagaagccacgacgagatcaccatccagcccggcgacatcgtgatggtggacgagagccagaccggcgagcccggctggctgggcggcgagctgaagggcaagaccggctggttccccgccaactacgccgagaagatccccgagaacgaggtgcccgcccccgtgaagcccgtgaccgacagcaccagcgcccccgcccccaagctggccctgagagagacccccgcccccctggccgtgaccagcagcgagcccagcaccacccccaacaactgggccgacttcagcagcacctggcccaccagcaccaacgagaagcccgagaccgacaactgggacgcctgggccgcccagcccagcctgaccgtgcccagcgccggccagctgagacagagaagcgccttcacccccgccaccgccaccggcagcagccccagccccgtgctgggccagcccgacttcctgctgcaccccagcatgagactgggccacatgcagcccagaatcgtgctgctgttccccgaccccctgcagtgcagcaccagcagactgctgcccatgctgagacccagacccggcgtgcccttcctgagaagccccagctgccagagccccagccaccccagcagacccatcagcgacgccgcccccagcgtgaagttcaccctgatgccccccggcagaatccacccctgcttcctgttcatccccgccgtgaacagcagaaacagcttcctggtgtacttcatcctgcccggcggcaccctgggctgcttctacctgtgcctgccccactacctgtag

SEQ ID NO: 85707 - DNA, 3435 bp, synthetic construct
  misc_feature 1..3435: note = Description of Artificial Sequence: Synthetic coding sequence
  source 1..3435: mol_type = other DNA
atggcccagttccccacccccttcggcggcagcctggacatctgggccatcaccgtggaggagagagccaagcacgaccagcagttccacagcctgaagcccatcagcggcttcatcaccggcgaccaggccagaaacttcttcttccagagcggcctgccccagcccgtgctggcccagatctgggccctggccgacatgaacaacgacggcagaatggaccaggtggagttcagcatcgccatgaagctgatcaagctgaagctgcagggctaccagctgcccagcgccctgccccccgtgatgaagcagcagcccgtggccatcagcagcgcccccgccttcggcatgggcggcatcgccagcatgccccccctgaccgccgtggcccccgtgcccatgggcagcatccccgtggtgggcatgagccccaccctggtgagcagcgtgcccaccgccgccgtgccccccctggccaacggcgccccccccgtgatccagcccctgcccgccttcgcccaccccgccgccaccctgcccaagagcagcagcttcagcagaagcggccccggcagccagctgaacaccaagctgcagaaggcccagagcttcgacgtggccagcgtgccccccgtggccgagtgggccgtgccccagagcagcagactgaagtacagacagctgttcaacagccacgacaagaccatgagcggccacctgaccggcccccaggccagaaccatcctgatgcagagcagcctgccccaggcccagctggccagcatctggaacctgagcgacatcgaccaggacggcaagctgaccgccgaggagttcatcctggccatgcacctgatcgacgtggccatgagcggccagcccctgccccccgtgctgccccccgagtacatcccccccagcttcagaagagtgagaagcggcagcggcatcagcgtgatcagcagcaccagcgtggaccagagactgcccgaggagcccgtgctggaggacgagcagcagcagctggagaagaagctgcccgtgaccttcgaggacaagaagagagagaacttcgagagaggcaacctggagctggagaagagaagacaggccctgctggagcagcagagaaaggagcaggagagactggcccagctggagagagccgagcaggagagaaaggagagagagagacaggagcaggagagaaagagacagctggagctggagaagcagctggagaagcagagagagctggagagacagagagaggaggagagaagaaaggagatcgagagaagagaggccgccaagagagagctggagagacagagacagctggagtgggagagaaacagaagacaggagctgctgaaccagagaaacaaggagcaggaggacatcgtggtgctgaaggccaagaagaagaccctggagttcgagctggaggccctgaacgacaagaagcaccagctggagggcaagctgcaggacatcagatgcagactgaccacccagagacaggagatcgagagcaccaacaagagcagagagctgagaatcgccgagatcacccacctgcagcagcagctgcaggagagccagcagatgctgggcagactgatccccgagaagcagatcctgaacgaccagctgaagcaggtgcagcagaacagcctgcacagagacagcctggtgaccctgaagagagccctggaggccaaggagctggccagacagcacctgagagaccagctggacgaggtggagaaggagaccagaagcaagctgcaggagatcgacatcttcaacaaccagctgaaggagctgagagagatccacaacaagcagcagctgcagaagcagaagagcatggaggccgagagactgaagcagaaggagcaggagagaaagatcatcgagctggagaagcagaaggaggaggcccagagaagagcccaggagagagacaagcagtggctggagcacgtgcagcaggaggacgagcaccagagacccagaaagctgcacgaggaggagaagctgaagagagaggagagcgtgaagaagaaggacggcgaggagaagggcaagcaggaggcccaggacaagctgggcagactgttccaccagcaccaggagcccgccaagcccgccgtgcaggccccctggagcaccgccgagaagggccccctgaccatcagcgcccaggagaacgtgaaggtggtgtactacagagccctgtaccccttcgagagcagaagccacgacgagatcaccatccagcccggcgacatcgtgatggtggacgagagccagaccggcgagcccggctggctgggcggcgagctgaagggcaagaccggctggttccccgccaactacgccgagaagatccccgagaacgaggtgcccgcccccgtgaagcccgtgaccgacagcaccagcgcccccgcccccaagctggccctgagagagacccccgcccccctggccgtgaccagcagcgagcccagcaccacccccaacaactgggccgacttcagcagcacctggcccaccagcaccaacgagaagcccgagaccgacaactgggacgcctgggccgcccagcccagcctgaccgtgcccagcgccggccagctgagacagagaagcgccttcacccccgccaccgccaccggcagcagccccagccccgtgctgggccagggcgagaaggtggagggcctgcaggcccaggccctgtacccctggagagccaagaaggacaaccacctgaacttcaacaagaacgacgtgatcaccgtgctggagcagcaggacatgtggtggttcggcgaggtgcagggccagaagggctggttccccaagagctacgtgaagctgatcagcggccccatcagaaagagcaccagcatggacagcggcagcagcgagagccccgccagcctgaagagagtggccagccccgccgccaagcccgtggtgagcggcgaggagatcgcccaggtgatcgccagctacaccgccaccggccccgagcagctgaccctggcccccggccagctgatcctgatcagaaagaagaaccccggcggctggtgggagggcgagctgcaggccagaggcaagaagagacagatcggctggttccccgccaactacgtgaagctgctgagccccggcaccagcaagatcacccccaccgagccccccaagagcaccgccctggccgccgtgtgccaggtgatcggcatgtacgactacaccgcccagaacgacgacgagctggccttcaacaagggccagatcatcaacgtgctgaacaaggaggaccccgactggtggaagggcgaggtgaacggccaggtgggcctgttccccagcaactacgtgaagctgaccaccgacatggaccccagccagcagtag

SEQ ID NO: 85708 - DNA, 3648 bp, synthetic construct
  misc_feature 1..3648: note = Description of Artificial Sequence: Synthetic coding sequence
  source 1..3648: mol_type = other DNA
atggcccagttccccacccccttcggcggcagcctggacatctgggccatcaccgtggaggagagagccaagcacgaccagcagttccacagcctgaagcccatcagcggcttcatcaccggcgaccaggccagaaacttcttcttccagagcggcctgccccagcccgtgctggcccagatctgggccctggccgacatgaacaacgacggcagaatggaccaggtggagttcagcatcgccatgaagctgatcaagctgaagctgcagggctaccagctgcccagcgccctgccccccgtgatgaagcagcagcccgtggccatcagcagcgcccccgccttcggcatgggcggcatcgccagcatgccccccctgaccgccgtggcccccgtgcccatgggcagcatccccgtggtgggcatgagccccaccctggtgagcagcgtgcccaccgccgccgtgccccccctggccaacggcgccccccccgtgatccagcccctgcccgccttcgcccaccccgccgccaccctgcccaagagcagcagcttcagcagaagcggccccggcagccagctgaacaccaagctgcagaaggcccagagcttcgacgtggccagcgtgccccccgtggccgagtgggccgtgccccagagcagcagactgaagtacagacagctgttcaacagccacgacaagaccatgagcggccacctgaccggcccccaggccagaaccatcctgatgcagagcagcctgccccaggcccagctggccagcatctggaacctgagcgacatcgaccaggacggcaagctgaccgccgaggagttcatcctggccatgcacctgatcgacgtggccatgagcggccagcccctgccccccgtgctgccccccgagtacatcccccccagcttcagaagagtgagaagcggcagcggcatcagcgtgatcagcagcaccagcgtggaccagagactgcccgaggagcccgtgctggaggacgagcagcagcagctggagaagaagctgcccgtgaccttcgaggacaagaagagagagaacttcgagagaggcaacctggagctggagaagagaagacaggccctgctggagcagcagagaaaggagcaggagagactggcccagctggagagagccgagcaggagagaaaggagagagagagacaggagcaggagagaaagagacagctggagctggagaagcagctggagaagcagagagagctggagagacagagagaggaggagagaagaaaggagatcgagagaagagaggccgccaagagagagctggagagacagagacagctggagtgggagagaaacagaagacaggagctgctgaaccagagaaacaaggagcaggaggacatcgtggtgctgaaggccaagaagaagaccctggagttcgagctggaggccctgaacgacaagaagcaccagctggagggcaagctgcaggacatcagatgcagactgaccacccagagacaggagatcgagagcaccaacaagagcagagagctgagaatcgccgagatcacccacctgcagcagcagctgcaggagagccagcagatgctgggcagactgatccccgagaagcagatcctgaacgaccagctgaagcaggtgcagcagaacagcctgcacagagacagcctggtgaccctgaagagagccctggaggccaaggagctggccagacagcacctgagagaccagctggacgaggtggagaaggagaccagaagcaagctgcaggagatcgacatcttcaacaaccagctgaaggagctgagagagatccacaacaagcagcagctgcagaagcagaagagcatggaggccgagagactgaagcagaaggagcaggagagaaagatcatcgagctggagaagcagaaggaggaggcccagagaagagcccaggagagagacaagcagtggctggagcacgtgcagcaggaggacgagcaccagagacccagaaagctgcacgaggaggagaagctgaagagagaggagagcgtgaagaagaaggacggcgaggagaagggcaagcaggaggcccaggacaagctgggcagactgttccaccagcaccaggagcccgccaagcccgccgtgcaggccccctggagcaccgccgagaagggccccctgaccatcagcgcccaggagaacgtgaaggtggtgtactacagagccctgtaccccttcgagagcagaagccacgacgagatcaccatccagcccggcgacatcgtgatggtggacgagagccagaccggcgagcccggctggctgggcggcgagctgaagggcaagaccggctggttccccgccaactacgccgagaagatccccgagaacgaggtgcccgcccccgtgaagcccgtgaccgacagcaccagcgcccccgcccccaagctggccctgagagagacccccgcccccctggccgtgaccagcagcgagcccagcaccacccccaacaactgggccgacttcagcagcacctggcccaccagcaccaacgagaagcccgagaccgacaactgggacgcctgggccgcccagcccagcctgaccgtgcccagcgccggccagctgagacagagaagcgccttcacccccgccaccgccaccggcagcagccccagccccgtgctgggccagggcgagaaggtggagggcctgcaggcccaggccctgtacccctggagagccaagaaggacaaccacctgaacttcaacaagaacgacgtgatcaccgtgctggagcagcaggacatgtggtggttcggcgaggtgcagggccagaagggctggttccccaagagctacgtgaagctgatcagcggccccatcagaaagagcaccagcatggacagcggcagcagcgagagccccgccagcctgaagagagtggccagccccgccgccaagcccgtggtgagcggcgaggagttcatcgccatgtacacctacgagagcagcgagcagggcgacctgaccttccagcagggcgacgtgatcctggtgaccaagaaggacggcgactggtggaccggcaccgtgggcgacaaggccggcgtgttccccagcaactacgtgagactgaaggacagcgagggcagcggcaccgccggcaagaccggcagcctgggcaagaagcccgagatcgcccaggtgatcgccagctacaccgccaccggccccgagcagctgaccctggcccccggccagctgatcctgatcagaaagaagaaccccggcggctggtgggagggcgagctgcaggccagaggcaagaagagacagatcggctggttccccgccaactacgtgaagctgctgagccccggcaccagcaagatcacccccaccgagccccccaagagcaccgccctggccgccgtgtgccaggtgatcggcatgtacgactacaccgcccagaacgacgacgagctggccttcaacaagggccagatcatcaacgtgctgaacaaggaggaccccgactggtggaagggcgaggtgaacggccaggtgggcctgttccccagcaactacgtgaagctgaccaccgacatggaccccagccagcagtag

SEQ ID NO: 85709 - DNA, 3537 bp, synthetic construct
  misc_feature 1..3537: note = Description of Artificial Sequence: Synthetic coding sequence
  source 1..3537: mol_type = other DNA
atggcccagttccccacccccttcggcggcagcctggacatctgggccatcaccgtggaggagagagccaagcacgaccagcagttccacagcctgaagcccatcagcggcttcatcaccggcgaccaggccagaaacttcttcttccagagcggcctgccccagcccgtgctggcccagatctgggccctggccgacatgaacaacgacggcagaatggaccaggtggagttcagcatcgccatgaagctgatcaagctgaagctgcagggctaccagctgcccagcgccctgccccccgtgatgaagcagcagcccgtggccatcagcagcgcccccgccttcgccgccgtgccccccctggccaacggcgccccccccgtgatccagcccctgcccgccttcgcccaccccgccgccaccctgcccaagagcagcagcttcagcagaagcggccccggcagccagctgaacaccaagctgcagaaggcccagagcttcgacgtggccagcgtgccccccgtggccgagtgggccgtgccccagagcagcagactgaagtacagacagctgttcaacagccacgacaagaccatgagcggccacctgaccggcccccaggccagaaccatcctgatgcagagcagcctgccccaggcccagctggccagcatctggaacctgagcgacatcgaccaggacggcaagctgaccgccgaggagttcatcctggccatgcacctgatcgacgtggccatgagcggccagcccctgccccccgtgctgccccccgagtacatcccccccagcttcagaagagtgagaagcggcagcggcatcagcgtgatcagcagcaccagcgtggaccagagactgcccgaggagcccgtgctggaggacgagcagcagcagctggagaagaagctgcccgtgaccttcgaggacaagaagagagagaacttcgagagaggcaacctggagctggagaagagaagacaggccctgctggagcagcagagaaaggagcaggagagactggcccagctggagagagccgagcaggagagaaaggagagagagagacaggagcaggagagaaagagacagctggagctggagaagcagctggagaagcagagagagctggagagacagagagaggaggagagaagaaaggagatcgagagaagagaggccgccaagagagagctggagagacagagacagctggagtgggagagaaacagaagacaggagctgctgaaccagagaaacaaggagcaggaggacatcgtggtgctgaaggccaagaagaagaccctggagttcgagctggaggccctgaacgacaagaagcaccagctggagggcaagctgcaggacatcagatgcagactgaccacccagagacaggagatcgagagcaccaacaagagcagagagctgagaatcgccgagatcacccacctgcagcagcagctgcaggagagccagcagatgctgggcagactgatccccgagaagcagatcctgaacgaccagctgaagcaggtgcagcagaacagcctgcacagagacagcctggtgaccctgaagagagccctggaggccaaggagctggccagacagcacctgagagaccagctggacgaggtggagaaggagaccagaagcaagctgcaggagatcgacatcttcaacaaccagctgaaggagctgagagagatccacaacaagcagcagctgcagaagcagaagagcatggaggccgagagactgaagcagaaggagcaggagagaaagatcatcgagctggagaagcagaaggaggaggcccagagaagagcccaggagagagacaagcagtggctggagcacgtgcagcaggaggacgagcaccagagacccagaaagctgcacgaggaggagaagctgaagagagaggagagcgtgaagaagaaggacggcgaggagaagggcaagcaggaggcccaggacaagctgggcagactgttccaccagcaccaggagcccgccaagcccgccgtgcaggccccctggagcaccgccgagaagggccccctgaccatcagcgcccaggagaacgtgaaggtggtgtactacagagccctgtaccccttcgagagcagaagccacgacgagatcaccatccagcccggcgacatcgtgatggtggacgagagccagaccggcgagcccggctggctgggcggcgagctgaagggcaagaccggctggttccccgccaactacgccgagaagatccccgagaacgaggtgcccgcccccgtgaagcccgtgaccgacagcaccagcgcccccgcccccaagctggccctgagagagacccccgcccccctggccgtgaccagcagcgagcccagcaccacccccaacaactgggccgacttcagcagcacctggcccaccagcaccaacgagaagcccgagaccgacaactgggacgcctgggccgcccagcccagcctgaccgtgcccagcgccggccagctgagacagagaagcgccttcacccccgccaccgccaccggcagcagccccagccccgtgctgggccagggcgagaaggtggagggcctgcaggcccaggccctgtacccctggagagccaagaaggacaaccacctgaacttcaacaagaacgacgtgatcaccgtgctggagcagcaggacatgtggtggttcggcgaggtgcagggccagaagggctggttccccaagagctacgtgaagctgatcagcggccccatcagaaagagcaccagcatggacagcggcagcagcgagagccccgccagcctgaagagagtggccagccccgccgccaagcccgtggtgagcggcgaggagttcatcgccatgtacacctacgagagcagcgagcagggcgacctgaccttccagcagggcgacgtgatcctggtgaccaagaaggacggcgactggtggaccggcaccgtgggcgacaaggccggcgtgttccccagcaactacgtgagactgaaggacagcgagggcagcggcaccgccggcaagaccggcagcctgggcaagaagcccgagatcgcccaggtgatcgccagctacaccgccaccggccccgagcagctgaccctggcccccggccagctgatcctgatcagaaagaagaaccccggcggctggtgggagggcgagctgcaggccagaggcaagaagagacagatcggctggttccccgccaactacgtgaagctgctgagccccggcaccagcaagatcacccccaccgagccccccaagagcaccgccctggccgccgtgtgccaggtgatcggcatgtacgactacaccgcccagaacgacgacgagctggccttcaacaagggccagatcatcaacgtgctgaacaaggaggaccccgactggtggaagggcgaggtgaacggccaggtgggcctgttccccagcaactacgtgaagctgaccaccgacatggaccccagccagcagtag

SEQ ID NO: 85710 - DNA, 3450 bp, synthetic construct
  misc_feature 1..3450: note = Description of Artificial Sequence: Synthetic coding sequence
  source 1..3450: mol_type = other DNA
atggcccagttccccacccccttcggcggcagcctggacatctgggccatcaccgtggaggagagagccaagcacgaccagcagttccacagcctgaagcccatcagcggcttcatcaccggcgaccaggccagaaacttcttcttccagagcggcctgccccagcccgtgctggcccagatctgggccctggccgacatgaacaacgacggcagaatggaccaggtggagttcagcatcgccatgaagctgatcaagctgaagctgcagggctaccagctgcccagcgccctgccccccgtgatgaagcagcagcccgtggccatcagcagcgcccccgccttcggcatgggcggcatcgccagcatgccccccctgaccgccgtggcccccgtgcccatgggcagcatccccgtggtgggcatgagccccaccctggtgagcagcgtgcccaccgccgccgtgccccccctggccaacggcgccccccccgtgatccagcccctgcccgccttcgcccaccccgccgccaccctgcccaagagcagcagcttcagcagaagcggccccggcagccagctgaacaccaagctgcagaaggcccagagcttcgacgtggccagcgtgccccccgtggccgagtgggccgtgccccagagcagcagactgaagtacagacagctgttcaacagccacgacaagaccatgagcggccacctgaccggcccccaggccagaaccatcctgatgcagagcagcctgccccaggcccagctggccagcatctggaacctgagcgacatcgaccaggacggcaagctgaccgccgaggagttcatcctggccatgcacctgatcgacgtggccatgagcggccagcccctgccccccgtgctgccccccgagtacatcccccccagcttcagaagagtgagaagcggcagcggcatcagcgtgatcagcagcaccagcgtggaccagagactgcccgaggagcccgtgctggaggacgagcagcagcagctggagaagaagctgcccgtgaccttcgaggacaagaagagagagaacttcgagagaggcaacctggagctggagaagagaagacaggccctgctggagcagcagagaaaggagcaggagagactggcccagctggagagagccgagcaggagagaaaggagagagagagacaggagcaggagagaaagagacagctggagctggagaagcagctggagaagcagagagagctggagagacagagagaggaggagagaagaaaggagatcgagagaagagaggccgccaagagagagctggagagacagagacagctggagtgggagagaaacagaagacaggagctgctgaaccagagaaacaaggagcaggaggacatcgtggtgctgaaggccaagaagaagaccctggagttcgagctggaggccctgaacgacaagaagcaccagctggagggcaagctgcaggacatcagatgcagactgaccacccagagacaggagatcgagagcaccaacaagagcagagagctgagaatcgccgagatcacccacctgcagcagcagctgcaggagagccagcagatgctgggcagactgatccccgagaagcagatcctgaacgaccagctgaagcaggtgcagcagaacagcctgcacagagacagcctggtgaccctgaagagagccctggaggccaaggagctggccagacagcacctgagagaccagctggacgaggtggagaaggagaccagaagcaagctgcaggagatcgacatcttcaacaaccagctgaaggagctgagagagatccacaacaagcagcagctgcagaagcagaagagcatggaggccgagagactgaagcagaaggagcaggagagaaagatcatcgagctggagaagcagaaggaggaggcccagagaagagcccaggagagagacaagcagtggctggagcacgtgcagcaggaggacgagcaccagagacccagaaagctgcacgaggaggagaagctgaagagagaggagagcgtgaagaagaaggacggcgaggagaagggcaagcaggaggcccaggacaagctgggcagactgttccaccagcaccaggagcccgccaagcccgccgtgcaggccccctggagcaccgccgagaagggccccctgaccatcagcgcccaggagaacgtgaaggtggtgtactacagagccctgtaccccttcgagagcagaagccacgacgagatcaccatccagcccggcgacatcgtgatggtgaagggcgagtgggtggacgagagccagaccggcgagcccggctggctgggcggcgagctgaagggcaagaccggctggttccccgccaactacgccgagaagatccccgagaacgaggtgcccgcccccgtgaagcccgtgaccgacagcaccagcgcccccgcccccaagctggccctgagagagacccccgcccccctggccgtgaccagcagcgagcccagcaccacccccaacaactgggccgacttcagcagcacctggcccaccagcaccaacgagaagcccgagaccgacaactgggacgcctgggccgcccagcccagcctgaccgtgcccagcgccggccagctgagacagagaagcgccttcacccccgccaccgccaccggcagcagccccagccccgtgctgggccagggcgagaaggtggagggcctgcaggcccaggccctgtacccctggagagccaagaaggacaaccacctgaacttcaacaagaacgacgtgatcaccgtgctggagcagcaggacatgtggtggttcggcgaggtgcagggccagaagggctggttccccaagagctacgtgaagctgatcagcggccccatcagaaagagcaccagcatggacagcggcagcagcgagagccccgccagcctgaagagagtggccagccccgccgccaagcccgtggtgagcggcgaggagatcgcccaggtgatcgccagctacaccgccaccggccccgagcagctgaccctggcccccggccagctgatcctgatcagaaagaagaaccccggcggctggtgggagggcgagctgcaggccagaggcaagaagagacagatcggctggttccccgccaactacgtgaagctgctgagccccggcaccagcaagatcacccccaccgagccccccaagagcaccgccctggccgccgtgtgccaggtgatcggcatgtacgactacaccgcccagaacgacgacgagctggccttcaacaagggccagatcatcaacgtgctgaacaaggaggaccccgactggtggaagggcgaggtgaacggccaggtgggcctgttccccagcaactacgtgaagctgaccaccgacatggaccccagccagcagtag

SEQ ID NO: 85711 - DNA, 5151 bp, synthetic construct
  misc_feature 1..5151: note = Description of Artificial Sequence: Synthetic coding sequence
  source 1..5151: mol_type = other DNA
atggcccagttccccacccccttcggcggcagcctggacatctgggccatcaccgtggaggagagagccaagcacgaccagcagttccacagcctgaagcccatcagcggcttcatcaccggcgaccaggccagaaacttcttcttccagagcggcctgccccagcccgtgctggcccagatctgggccctggccgacatgaacaacgacggcagaatggaccaggtggagttcagcatcgccatgaagctgatcaagctgaagctgcagggctaccagctgcccagcgccctgccccccgtgatgaagcagcagcccgtggccatcagcagcgcccccgccttcggcatgggcggcatcgccagcatgccccccctgaccgccgtggcccccgtgcccatgggcagcatccccgtggtgggcatgagccccaccctggtgagcagcgtgcccaccgccgccgtgccccccctggccaacggcgccccccccgtgatccagcccctgcccgccttcgcccaccccgccgccaccctgcccaagagcagcagcttcagcagaagcggccccggcagccagctgaacaccaagctgcagaaggcccagagcttcgacgtggccagcgtgccccccgtggccgagtgggccgtgccccagagcagcagactgaagtacagacagctgttcaacagccacgacaagaccatgagcggccacctgaccggcccccaggccagaaccatcctgatgcagagcagcctgccccaggcccagctggccagcatctggaacctgagcgacatcgaccaggacggcaagctgaccgccgaggagttcatcctggccatgcacctgatcgacgtggccatgagcggccagcccctgccccccgtgctgccccccgagtacatcccccccagcttcagaagagtgagaagcggcagcggcatcagcgtgatcagcagcaccagcgtggaccagagactgcccgaggagcccgtgctggaggacgagcagcagcagctggagaagaagctgcccgtgaccttcgaggacaagaagagagagaacttcgagagaggcaacctggagctggagaagagaagacaggccctgctggagcagcagagaaaggagcaggagagactggcccagctggagagagccgagcaggagagaaaggagagagagagacaggagcaggagagaaagagacagctggagctggagaagcagctggagaagcagagagagctggagagacagagagaggaggagagaagaaaggagatcgagagaagagaggccgccaagagagagctggagagacagagacagctggagtgggagagaaacagaagacaggagctgctgaaccagagaaacaaggagcaggaggacatcgtggtgctgaaggccaagaagaagaccctggagttcgagctggaggccctgaacgacaagaagcaccagctggagggcaagctgcaggacatcagatgcagactgaccacccagagacaggagatcgagagcaccaacaagagcagagagctgagaatcgccgagatcacccacctgcagcagcagctgcaggagagccagcagatgctgggcagactgatccccgagaagcagatcctgaacgaccagctgaagcaggtgcagcagaacagcctgcacagagacagcctggtgaccctgaagagagccctggaggccaaggagctggccagacagcacctgagagaccagctggacgaggtggagaaggagaccagaagcaagctgcaggagatcgacatcttcaacaaccagctgaaggagctgagagagatccacaacaagcagcagctgcagaagcagaagagcatggaggccgagagactgaagcagaaggagcaggagagaaagatcatcgagctggagaagcagaaggaggaggcccagagaagagcccaggagagagacaagcagtggctggagcacgtgcagcaggaggacgagcaccagagacccagaaagctgcacgaggaggagaagctgaagagagaggagagcgtgaagaagaaggacggcgaggagaagggcaagcaggaggcccaggacaagctgggcagactgttccaccagcaccaggagcccgccaagcccgccgtgcaggccccctggagcaccgccgagaagggccccctgaccatcagcgcccaggagaacgtgaaggtggtgtactacagagccctgtaccccttcgagagcagaagccacgacgagatcaccatccagcccggcgacatcgtgatggtggacgagagccagaccggcgagcccggctggctgggcggcgagctgaagggcaagaccggctggttccccgccaactacgccgagaagatccccgagaacgaggtgcccgcccccgtgaagcccgtgaccgacagcaccagcgcccccgcccccaagctggccctgagagagacccccgcccccctggccgtgaccagcagcgagcccagcaccacccccaacaactgggccgacttcagcagcacctggcccaccagcaccaacgagaagcccgagaccgacaactgggacgcctgggccgcccagcccagcctgaccgtgcccagcgccggccagctgagacagagaagcgccttcacccccgccaccgccaccggcagcagccccagccccgtgctgggccagggcgagaaggtggagggcctgcaggcccaggccctgtacccctggagagccaagaaggacaaccacctgaacttcaacaagaacgacgtgatcaccgtgctggagcagcaggacatgtggtggttcggcgaggtgcagggccagaagggctggttccccaagagctacgtgaagctgatcagcggccccatcagaaagagcaccagcatggacagcggcagcagcgagagccccgccagcctgaagagagtggccagccccgccgccaagcccgtggtgagcggcgaggagttcatcgccatgtacacctacgagagcagcgagcagggcgacctgaccttccagcagggcgacgtgatcctggtgaccaagaaggacggcgactggtggaccggcaccgtgggcgacaaggccggcgtgttccccagcaactacgtgagactgaaggacagcgagggcagcggcaccgccggcaagaccggcagcctgggcaagaagcccgagatcgcccaggtgatcgccagctacaccgccaccggccccgagcagctgaccctggcccccggccagctgatcctgatcagaaagaagaaccccggcggctggtgggagggcgagctgcaggccagaggcaagaagagacagatcggctggttccccgccaactacgtgaagctgctgagccccggcaccagcaagatcacccccaccgagccccccaagagcaccgccctggccgccgtgtgccaggtgatcggcatgtacgactacaccgcccagaacgacgacgagctggccttcaacaagggccagatcatcaacgtgctgaacaaggaggaccccgactggtggaagggcgaggtgaacggccaggtgggcctgttccccagcaactacgtgaagctgaccaccgacatggaccccagccagcagtggtgcagcgacctgcacctgctggacatgctgacccccaccgagagaaagagacagggctacatccacgagctgatcgtgaccgaggagaactacgtgaacgacctgcagctggtgaccgagatcttccagaagcccctgatggagagcgagctgctgaccgagaaggaggtggccatgatcttcgtgaactggaaggagctgatcatgtgcaacatcaagctgctgaaggccctgagagtgagaaagaagatgagcggcgagaagatgcccgtgaagatgatcggcgacatcctgagcgcccagctgccccacatgcagccctacatcagattctgcagcagacagctgaacggcgccgccctgatccagcagaagaccgacgaggcccccgacttcaaggagttcgtgaagagactggccatggaccccagatgcaagggcatgcccctgagcagcttcatcctgaagcccatgcagagagtgaccagataccccctgatcatcaagaacatcctggagaacacccccgagaaccaccccgaccacagccacctgaagcacgccctggagaaggccgaggagctgtgcagccaggtgaacgagggcgtgagagagaaggagaacagcgacagactggagtggatccaggcccacgtgcagtgcgagggcctgagcgagcagctggtgttcaacagcgtgaccaactgcctgggccccagaaagttcctgcacagcggcaagctgtacaaggccaagagcaacaaggagctgtacggcttcctgttcaacgacttcctgctgctgacccagatcaccaagcccctgggcagcagcggcaccgacaaggtgttcagccccaagagcaacctgcagtacaagatgtacaagacccccatcttcctgaacgaggtgctggtgaagctgcccaccgaccccagcggcgacgagcccatcttccacatcagccacatcgacagagtgtacaccctgagagccgagagcatcaacgagagaaccgcctgggtgcagaagatcaaggccgccagcgagctgtacatcgagaccgagaagaagaagagagagaaggcctacctggtgagaagccagagagccaccggcatcggcagactgatggtgaacgtggtggagggcatcgagctgaagccctgcagaagccacggcaagagcaacccctactgcgaggtgaccatgggcagccagtgccacatcaccaagaccatccaggacaccctgaaccccaagtggaacagcaactgccagttcttcatcagagacctggagcaggaggtgctgtgcatcaccgtgttcgagagagaccagttcagccccgacgacttcctgggcagaaccgagatcagagtggccgacatcaagaaggaccagggcagcaagggccccgtgaccaagtgcctgctgctgcacgaggtgcccaccggcgagatcgtggtgagactggacctgcagctgttcgacgagccctag

SEQ ID NO: 85712 - DNA, 4983 bp, synthetic construct
  misc_feature 1..4983: note = Description of Artificial Sequence: Synthetic coding sequence
  source 1..4983: mol_type = other DNA
atggcccagttccccacccccttcggcggcagcctggacatctgggccatcaccgtggaggagagagccaagcacgaccagcagttccacagcctgaagcccatcagcggcttcatcaccggcgaccaggccagaaacttcttcttccagagcggcctgccccagcccgtgctggcccagatctgggccctggccgacatgaacaacgacggcagaatggaccaggtggagttcagcatcgccatgaagctgatcaagctgaagctgcagggctaccagctgcccagcgccctgccccccgtgatgaagcagcagcccgtggccatcagcagcgcccccgccttcggcatgggcggcatcgccagcatgccccccctgaccgccgtggcccccgtgcccatgggcagcatccccgtggtgggcatgagccccaccctggtgagcagcgtgcccaccgccgccgtgccccccctggccaacggcgccccccccgtgatccagcccctgcccgccttcgcccaccccgccgccaccctgcccaagagcagcagcttcagcagaagcggccccggcagccagctgaacaccaagctgcagaaggcccagagcttcgacgtggccagcgtgccccccgtggccgagtgggccgtgccccagagcagcagactgaagtacagacagctgttcaacagccacgacaagaccatgagcggccacctgaccggcccccaggccagaaccatcctgatgcagagcagcctgccccaggcccagctggccagcatctggaacctgagcgacatcgaccaggacggcaagctgaccgccgaggagttcatcctggccatgcacctgatcgacgtggccatgagcggccagcccctgccccccgtgctgccccccgagtacatcccccccagcttcagaagagtgagaagcggcagcggcatcagcgtgatcagcagcaccagcgtggaccagagactgcccgaggagcccgtgctggaggacgagcagcagcagctggagaagaagctgcccgtgaccttcgaggacaagaagagagagaacttcgagagaggcaacctggagctggagaagagaagacaggccctgctggagcagcagagaaaggagcaggagagactggcccagctggagagagccgagcaggagagaaaggagagagagagacaggagcaggagagaaagagacagctggagctggagaagcagctggagaagcagagagagctggagagacagagagaggaggagagaagaaaggagatcgagagaagagaggccgccaagagagagctggagagacagagacagctggagtgggagagaaacagaagacaggagctgctgaaccagagaaacaaggagcaggaggacatcgtggtgctgaaggccaagaagaagaccctggagttcgagctggaggccctgaacgacaagaagcaccagctggagggcaagctgcaggacatcagatgcagactgaccacccagagacaggagatcgagagcaccaacaagagcagagagctgagaatcgccgagatcacccacctgcagcagcagctgcaggagagccagcagatgctgggcagactgatccccgagaagcagatcctgaacgaccagctgaagcaggtgcagcagaacagcctgcacagagacagcctggtgaccctgaagagagccctggaggccaaggagctggccagacagcacctgagagaccagctggacgaggtggagaaggagaccagaagcaagctgcaggagatcgacatcttcaacaaccagctgaaggagctgagagagatccacaacaagcagcagctgcagaagcagaagagcatggaggccgagagactgaagcagaaggagcaggagagaaagatcatcgagctggagaagcagaaggaggaggcccagagaagagcccaggagagagacaagcagtggctggagcacgtgcagcaggaggacgagcaccagagacccagaaagctgcacgaggaggagaagctgaagagagaggagagcgtgaagaagaaggacggcgaggagaagggcaagcaggaggcccaggacaagctgggcagactgttccaccagcaccaggagcccgccaagcccgccgtgcaggccccctggagcaccgccgagaagggccccctgaccatcagcgcccaggagaacgtgaaggtggtgtactacagagccctgtaccccttcgagagcagaagccacgacgagatcaccatccagcccggcgacatcgtgatggtggacgagagccagaccggcgagcccggctggctgggcggcgagctgaagggcaagaccggctggttccccgccaactacgccgagaagatccccgagaacgaggtgcccgcccccgtgaagcccgtgaccgacagcaccagcgcccccgcccccaagctggccctgagagagacccccgcccccctggccgtgaccagcagcgagcccagcaccacccccaacaactgggccgacttcagcagcacctggcccaccagcaccaacgagaagcccgagaccgacaactgggacgcctgggccgcccagcccagcctgaccgtgcccagcgccggccagctgagacagagaagcgccttcacccccgccaccgccaccggcagcagccccagccccgtgctgggccagggcgagaaggtggagggcctgcaggcccaggccctgtacccctggagagccaagaaggacaaccacctgaacttcaacaagaacgacgtgatcaccgtgctggagcagcaggacatgtggtggttcggcgaggtgcagggccagaagggctggttccccaagagctacgtgaagctgatcagcggccccatcagaaagagcaccagcatggacagcggcagcagcgagagccccgccagcctgaagagagtggccagccccgccgccaagcccgtggtgagcggcgaggagttcatcgccatgtacacctacgagagcagcgagcagggcgacctgaccttccagcagggcgacgtgatcctggtgaccaagaaggacggcgactggtggaccggcaccgtgggcgacaaggccggcgtgttccccagcaactacgtgagactgaaggacagcgagggcagcggcaccgccggcaagaccggcagcctgggcaagaagcccgagatcgcccaggtgatcgccagctacaccgccaccggccccgagcagctgaccctggcccccggccagctgatcctgatcagaaagaagaaccccggcggctggtgggagggcgagctgcaggccagaggcaagaagagacagatcggctggttccccgccaactacgtgaagctgctgagccccggcaccagcaagatcacccccaccgagccccccaagagcaccgccctggccgccgtgtgccaggtgatcggcatgtacgactacaccgcccagaacgacgacgagctggccttcaacaagggccagatcatcaacgtgctgaacaaggaggaccccgactggtggaagggcgaggtgaacggccaggtgggcctgttccccagcaactacgtgaagctgaccaccgacatggaccccagccagcagtggtgcagcgacctgcacctgctggacatgctgacccccaccgagagaaagagacagggctacatccacgagctgatcgtgaccgaggagaactacgtgaacgacctgcagctggtgaccgagatcttccagaagcccctgatggagagcgagctgctgaccgagaaggaggtggccatgatcttcgtgaactggaaggagctgatcatgtgcaacatcaagctgctgaaggccctgagagtgagaaagaagatgagcggcgagaagatgcccgtgaagatgatcggcgacatcctgagcgcccagctgccccacatgcagccctacatcagattctgcagcagacagctgaacggcgccgccctgatccagcagaagaccgacgaggcccccgacttcaaggagttcgtgaagagactggccatggaccccagatgcaagggcatgcccctgagcagcttcatcctgaagcccatgcagagagtgaccagataccccctgatcatcaagaaccagctggtgttcaacagcgtgaccaactgcctgggccccagaaagttcctgcacagcggcaagctgtacaaggccaagagcaacaaggagctgtacggcttcctgttcaacgacttcctgctgctgacccagatcaccaagcccctgggcagcagcggcaccgacaaggtgttcagccccaagagcaacctgcagtacaagatgtacaagacccccatcttcctgaacgaggtgctggtgaagctgcccaccgaccccagcggcgacgagcccatcttccacatcagccacatcgacagagtgtacaccctgagagccgagagcatcaacgagagaaccgcctgggtgcagaagatcaaggccgccagcgagctgtacatcgagaccgagaagaagaagagagagaaggcctacctggtgagaagccagagagccaccggcatcggcagactgatggtgaacgtggtggagggcatcgagctgaagccctgcagaagccacggcaagagcaacccctactgcgaggtgaccatgggcagccagtgccacatcaccaagaccatccaggacaccctgaaccccaagtggaacagcaactgccagttcttcatcagagacctggagcaggaggtgctgtgcatcaccgtgttcgagagagaccagttcagccccgacgacttcctgggcagaaccgagatcagagtggccgacatcaagaaggaccagggcagcaagggccccgtgaccaagtgcctgctgctgcacgaggtgcccaccggcgagatcgtggtgagactggacctgcagctgttcgacgagccctag

SEQ ID NO: 85713 - DNA, 348 bp, synthetic construct
  misc_feature 1..348: note = Description of Artificial Sequence: Synthetic coding sequence
  source 1..348: mol_type = other DNA
atggcccagttccccacccccttcggcggcagcctggacatctgggccatcaccgtggaggagagagccaagcacgaccagcagttccacagcctgaagcccatcagcggcttcatcaccggcgaccaggccagaaacttcttcttccagagcggcctgccccagcccgtgctggcccagatctgggccctggccgacatgaacaacgacggcagaatggaccaggtggagttcagcatcgccatgaagctgatcaagctgaagctgcagggctaccagctgcccagcgccctgccccccgtgatgaagcagcagcccgtggccatcagcagcgcccccgccttctag

SEQ ID NO: 85714 - DNA, 237 bp, synthetic construct
  misc_feature 1..237: note = Description of Artificial Sequence: Synthetic coding sequence
  source 1..237: mol_type = other DNA
atggcccagttccccacccccttcggcggcagcctggacatctgggccatcaccgtggaggagagagccaagcacgaccagcagttccacagcctgaagcccatcagcggcttcatcaccggcgaccaggccagaaacttcttcttccagagcggcctgccccagcccgtgctggcccagatctgggccctggccgacatgaacaacgacggcagaatggaccaggtggagttctag

SEQ ID NO: 85715 - DNA, 5094 bp, synthetic construct
  misc_feature 1..5094: note = Description of Artificial Sequence: Synthetic coding sequence
  source 1..5094: mol_type = other DNA
atgatggcccagttccccaccgccatgaacggcggccccaacatgtgggccatcaccagcgaggagagaaccaagcacgacagacagttcgacaacctgaagcccagcggcggctacatcaccggcgaccaggccagaaacttcttcctgcagagcggcctgcccgcccccgtgctggccgagatctgggccctgagcgacctgaacaaggacggcaagatggaccagcaggagttcagcatcgccatgaagctgatcaagctgaagctgcagggccagcagctgcccgtggtgctgccccccatcatgaagcagccccccatgttcagccccctgatcagcgccagattcggcatgggcagcatgcccaacctgagcatcccccagcccctgccccccgccgcccccatcaccagcctgagcagcgccaccagcggcaccaacctgccccccctgatgatgcccacccccctggtgcccagcgtgagcaccagcagcctgcccaacggcaccgccagcctgatccagcccctgcccatcccctacagcagcagcaccctgccccacggcagcagctacagcctgatgatgggcggcttcggcggcgccagcatccagaaggcccagagcctgatcgacctgggcagcagcagcagcaccagcagcaccgccagcctgagcggcaacagccccaagaccggcaccagcgagtgggccgtgccccagcccaccagactgaagtacagacagaagttcaacaccctggacaagagcatgagcggctacctgagcggcttccaggccagaaacgccctgctgcagagcaacctgagccagacccagctggccaccatctggaccctggccgacgtggacggcgacggccagctgaaggccgaggagttcatcctggccatgcacctgaccgacatggccaaggccggccagcccctgcccctgaccctgccccccgagctggtgccccccagcttcagaggcggcaagcagatcgacagcatcaacggcaccctgcccagctaccagaagatgcaggaggaggagccccagaagaagctgcccgtgaccttcgaggacaagagaaaggccaactacgagagaggcaacatggagctggagaagagaagacaggccctgatggagcagcagcagagagaggccgagagaaaggcccagaaggagaaggaggagtgggagagaaagcagagagagctgcaggagcaggagtggaagaagcagctggagctggagaagagactggagaagcagagagagctggagagacagagagaggaggagagaagaaaggacatcgagagaagagaggccgccaagcaggagctggagagacagagaagactggagtgggagagaatcagaagacaggagctgctgaaccagaagaacagagagcaggaggagatcgtgagactgaacagcaagaagaagaacctgcacctggagctggaggccctgaacggcaagcaccagcagatcagcggcagactgcaggacgtgagactgaagaagcagacccagaagaccgagctggaggtgctggacaagcagtgcgacctggagatcatggagatcaagcagctgcagcaggagctgcaggagtaccagaacaagctgatctacctggtgcccgagaagcagctgctgaacgagagaatcaagaacatgcagttcagcaacacccccgacagcggcgtgagcctgctgcacaagaagagcctggagaaggaggagctgtgccagagactgaaggagcagctggacgccctggagaaggagaccgccagcaagctgagcgagatggacagcttcaacaaccagctgaagtgcggcaacatggacgacagcgtgctgcagtgcctgctgagcctgctgagctgcctgaacaacctgttcctgctgctgaaggagctgagagagacctacaacacccagcagctggccctggagcagctgtacaagatcaagagagacaagctgaaggagatcgagagaaagagactggagctgatgcagaagaagaagctggaggacgaggccgccagaaaggccaagcagggcaaggagaacctgtggaaggagaacctgagaaaggaggaggaggagaagcagaagagactgcaggaggagaagacccaggagaagatccaggaggaggagagaaaggccgaggagaagcagagaaaggacaaggacaccctgaaggccgaggagaagaagagagagaccgccagcgtgctggtgaactacagagccctgtaccccttcgaggccagaaaccacgacgagatgagcttcaacagcggcgacatcatccaggtggacgagaagaccgtgggcgagcccggctggctgtacggcagcttccagggcaacttcggctggttcccctgcaactacgtggagaagatgcccagcagcgagaacgagaaggccgtgagccccaagaaggccctgctgccccccaccgtgagcctgagcgccaccagcaccagcagcgagcccctgagcagcaaccagcccgccagcgtgaccgactaccagaacgtgagcttcagcaacctgaccgtgaacaccagctggcagaagaagagcgccttcaccagaaccgtgagccccggcagcgtgagccccatccacggccagggccaggtggtggagaacctgaaggcccaggccctgtgcagctggaccgccaagaaggacaaccacctgaacttcagcaagcacgacatcatcaccgtgctggagcagcaggagaactggtggttcggcgaggtgcacggcggcagaggctggttccccaagagctacgtgaagatcatccccggcagcgaggtgaagagagaggagcccgaggccctgtacgccgccgtgaacaagaagcccaccagcgccgcctacagcgtgggcgaggagtacatcgccctgtacccctacagcagcgtggagcccggcgacctgaccttcaccgagggcgaggagatcctggtgacccagaaggacggcgagtggtggaccggcagcatcggcgacagaagcggcatcttccccagcaactacgtgaagcccaaggaccaggagagcttcggcagcgccagcaagagcggcgccagcaacaagaagcccgagatcgcccaggtgaccagcgcctacgtggccagcggcagcgagcagctgagcctggcccccggccagctgatcctgatcctgaagaagaacaccagcggctggtggcagggcgagctgcaggccagaggcaagaagagacagaagggctggttccccgccagccacgtgaagctgctgggccccagcagcgagagagccacccccgccttccaccccgtgtgccaggtgatcgccatgtacgactacgccgccaacaacgaggacgagctgagcttcagcaagggccagctgatcaacgtgatgaacaaggacgaccccgactggtggcagggcgagatcaacggcgtgaccggcctgttccccagcaactacgtgaagatgaccaccgacagcgaccccagccagcagtggtgcgccgacctgcagaccctggacaccatgcagcccatcgagagaaagagacagggctacatccacgagctgatccagaccgaggagagatacatggccgacctgcagctggtggtggaggtgttccagaagagaatggccgagagcggcttcctgaccgagggcgagatggccctgatcttcgtgaactggaaggagctgatcatgagcaacaccaagctgctgaaggccctgagagtgagaaagaagaccggcggcgagaagatgcccgtgcagatgatcggcgacatcctggccgccgagctgagccacatgcaggcctacatcagattctgcagctgccagctgaacggcgccgccctgctgcagcagaagaccgacgaggacaccgacttcaaggagttcctgaagaagctggccagcgaccccagatgcaagggcatgcccctgagcagcttcctgctgaagcccatgcagagaatcaccagataccccctgctgatcagaagcatcctggagaacacccccgagagccacgccgaccacagcagcctgaagctggccctggagagagccgaggagctgtgcagccaggtgaacgagggcgtgagagagaaggagaacagcgacagactggagtggatccaggcccacgtgcagtgcgagggcctggccgagcagctgatcttcaacagcctgaccaactgcctgggccccagaaagctgctgcacagcggcaagctgtacaagaccaagagcaacaaggagctgcacggcttcctgttcaacgacttcctgctgctgacctacatggtgaagcagttcgccgtgagcagcggcagcgagaagctgttcagcagcaagagcaacgcccagttcaagatgtacaagacccccatcttcctgaacgaggtgctggtgaagctgcccaccgaccccagcagcgacgagcccgtgttccacatcagccacatcgacagagtgtacaccctgagaaccgacaacatcaacgagagaaccgcctgggtgcagaagatcaaggccgccagcgagcagtacatcgacaccgagaagaagaagagagagaaggcctaccaggccagaagccagaagaccagcggcatcggcagactgatggtgcacgtgatcgaggccaccgagctgaaggcctgcaagcccaacggcaagagcaacccctactgcgagatcagcatgggcagccagagctacaccaccagaaccatccaggacaccctgaaccccaagtggaacttcaactgccagttcttcatcaaggacctgtaccaggacgtgctgtgcctgaccctgttcgacagagaccagttcagccccgacgacttcctgggcagaaccgagatccccgtggccaagatcagaaccgagcaggagagcaagggccccatgaccagaagactgctgctgcacgaggtgcccaccggcgaggtgtgggtgagattcgacctgcagctgttcgagcagaagaccctgctgtag

SEQ ID NO: 85716 - DNA, 5013 bp, synthetic construct
  misc_feature 1..5013: note = Description of Artificial Sequence: Synthetic coding sequence
  source 1..5013: mol_type = other DNA
atgatggcccagttccccaccgccatgaacggcggccccaacatgtgggccatcaccagcgaggagagaaccaagcacgacagacagttcgacaacctgaagcccagcggcggctacatcaccggcgaccaggccagaaacttcttcctgcagagcggcctgcccgcccccgtgctggccgagatctgggccctgagcgacctgaacaaggacggcaagatggaccagcaggagttcagcatcgccatgaagctgatcaagctgaagctgcagggccagcagctgcccgtggtgctgccccccatcatgaagcagccccccatgttcagccccctgatcagcgccagattcggcatgggcagcatgcccaacctgagcatcccccagcccctgccccccgccgcccccatcaccagcctgagcagcgccaccagcggcaccaacctgccccccctgatgatgcccacccccctggtgcccagcgtgagcaccagcagcctgcccaacggcaccgccagcctgatccagcccctgcccatcccctacagcagcagcaccctgccccacggcagcagctacagcctgatgatgggcggcttcggcggcgccagcatccagaaggcccagagcctgatcgacctgggcagcagcagcagcaccagcagcaccgccagcctgagcggcaacagccccaagaccggcaccagcgagtgggccgtgccccagcccaccagactgaagtacagacagaagttcaacaccctggacaagagcatgagcggctacctgagcggcttccaggccagaaacgccctgctgcagagcaacctgagccagacccagctggccaccatctggaccctggccgacgtggacggcgacggccagctgaaggccgaggagttcatcctggccatgcacctgaccgacatggccaaggccggccagcccctgcccctgaccctgccccccgagctggtgccccccagcttcagaggcggcaagcagatcgacagcatcaacggcaccctgcccagctaccagaagatgcaggaggaggagccccagaagaagctgcccgtgaccttcgaggacaagagaaaggccaactacgagagaggcaacatggagctggagaagagaagacaggccctgatggagcagcagcagagagaggccgagagaaaggcccagaaggagaaggaggagtgggagagaaagcagagagagctgcaggagcaggagtggaagaagcagctggagctggagaagagactggagaagcagagagagctggagagacagagagaggaggagagaagaaaggacatcgagagaagagaggccgccaagcaggagctggagagacagagaagactggagtgggagagaatcagaagacaggagctgctgaaccagaagaacagagagcaggaggagatcgtgagactgaacagcaagaagaagaacctgcacctggagctggaggccctgaacggcaagcaccagcagatcagcggcagactgcaggacgtgagactgaagaagcagacccagaagaccgagctggaggtgctggacaagcagtgcgacctggagatcatggagatcaagcagctgcagcaggagctgcaggagtaccagaacaagctgatctacctggtgcccgagaagcagctgctgaacgagagaatcaagaacatgcagttcagcaacacccccgacagcggcgtgagcctgctgcacaagaagagcctggagaaggaggagctgtgccagagactgaaggagcagctggacgccctggagaaggagaccgccagcaagctgagcgagatggacagcttcaacaaccagctgaaggagctgagagagacctacaacacccagcagctggccctggagcagctgtacaagatcaagagagacaagctgaaggagatcgagagaaagagactggagctgatgcagaagaagaagctggaggacgaggccgccagaaaggccaagcagggcaaggagaacctgtggaaggagaacctgagaaaggaggaggaggagaagcagaagagactgcaggaggagaagacccaggagaagatccaggaggaggagagaaaggccgaggagaagcagagaaaggacaaggacaccctgaaggccgaggagaagaagagagagaccgccagcgtgctggtgaactacagagccctgtaccccttcgaggccagaaaccacgacgagatgagcttcaacagcggcgacatcatccaggtggacgagaagaccgtgggcgagcccggctggctgtacggcagcttccagggcaacttcggctggttcccctgcaactacgtggagaagatgcccagcagcgagaacgagaaggccgtgagccccaagaaggccctgctgccccccaccgtgagcctgagcgccaccagcaccagcagcgagcccctgagcagcaaccagcccgccagcgtgaccgactaccagaacgtgagcttcagcaacctgaccgtgaacaccagctggcagaagaagagcgccttcaccagaaccgtgagccccggcagcgtgagccccatccacggccagggccaggtggtggagaacctgaaggcccaggccctgtgcagctggaccgccaagaaggacaaccacctgaacttcagcaagcacgacatcatcaccgtgctggagcagcaggagaactggtggttcggcgaggtgcacggcggcagaggctggttccccaagagctacgtgaagatcatccccggcagcgaggtgaagagagaggagcccgaggccctgtacgccgccgtgaacaagaagcccaccagcgccgcctacagcgtgggcgaggagtacatcgccctgtacccctacagcagcgtggagcccggcgacctgaccttcaccgagggcgaggagatcctggtgacccagaaggacggcgagtggtggaccggcagcatcggcgacagaagcggcatcttccccagcaactacgtgaagcccaaggaccaggagagcttcggcagcgccagcaagagcggcgccagcaacaagaagcccgagatcgcccaggtgaccagcgcctacgtggccagcggcagcgagcagctgagcctggcccccggccagctgatcctgatcctgaagaagaacaccagcggctggtggcagggcgagctgcaggccagaggcaagaagagacagaagggctggttccccgccagccacgtgaagctgctgggccccagcagcgagagagccacccccgccttccaccccgtgtgccaggtgatcgccatgtacgactacgccgccaacaacgaggacgagctgagcttcagcaagggccagctgatcaacgtgatgaacaaggacgaccccgactggtggcagggcgagatcaacggcgtgaccggcctgttccccagcaactacgtgaagatgaccaccgacagcgaccccagccagcagtggtgcgccgacctgcagaccctggacaccatgcagcccatcgagagaaagagacagggctacatccacgagctgatccagaccgaggagagatacatggccgacctgcagctggtggtggaggtgttccagaagagaatggccgagagcggcttcctgaccgagggcgagatggccctgatcttcgtgaactggaaggagctgatcatgagcaacaccaagctgctgaaggccctgagagtgagaaagaagaccggcggcgagaagatgcccgtgcagatgatcggcgacatcctggccgccgagctgagccacatgcaggcctacatcagattctgcagctgccagctgaacggcgccgccctgctgcagcagaagaccgacgaggacaccgacttcaaggagttcctgaagaagctggccagcgaccccagatgcaagggcatgcccctgagcagcttcctgctgaagcccatgcagagaatcaccagataccccctgctgatcagaagcatcctggagaacacccccgagagccacgccgaccacagcagcctgaagctggccctggagagagccgaggagctgtgcagccaggtgaacgagggcgtgagagagaaggagaacagcgacagactggagtggatccaggcccacgtgcagtgcgagggcctggccgagcagctgatcttcaacagcctgaccaactgcctgggccccagaaagctgctgcacagcggcaagctgtacaagaccaagagcaacaaggagctgcacggcttcctgttcaacgacttcctgctgctgacctacatggtgaagcagttcgccgtgagcagcggcagcgagaagctgttcagcagcaagagcaacgcccagttcaagatgtacaagacccccatcttcctgaacgaggtgctggtgaagctgcccaccgaccccagcagcgacgagcccgtgttccacatcagccacatcgacagagtgtacaccctgagaaccgacaacatcaacgagagaaccgcctgggtgcagaagatcaaggccgccagcgagcagtacatcgacaccgagaagaagaagagagagaaggcctaccaggccagaagccagaagaccagcggcatcggcagactgatggtgcacgtgatcgaggccaccgagctgaaggcctgcaagcccaacggcaagagcaacccctactgcgagatcagcatgggcagccagagctacaccaccagaaccatccaggacaccctgaaccccaagtggaacttcaactgccagttcttcatcaaggacctgtaccaggacgtgctgtgcctgaccctgttcgacagagaccagttcagccccgacgacttcctgggcagaaccgagatccccgtggccaagatcagaaccgagcaggagagcaagggccccatgaccagaagactgctgctgcacgaggtgcccaccggcgaggtgtgggtgagattcgacctgcagctgttcgagcagaagaccctgctgtag

SEQ ID NO: 85717 - DNA, 5013 bp, synthetic construct; identical to SEQ ID NO: 85716
  misc_feature 1..5013: note = Description of Artificial Sequence: Synthetic coding sequence
  source 1..5013: mol_type = other DNA

SEQ ID NO: 85718 - DNA, 1836 bp, synthetic construct
  misc_feature 1..1836: note = Description of Artificial Sequence: Synthetic coding sequence
  source 1..1836: mol_type = other DNA
atggcccagttccccaccgccatgaacggcggccccaacatgtgggccatcaccagcgaggagagaaccaagcacgacagacagttcgacaacctgaagcccagcggcggctacatcaccggcgaccaggccagaaacttcttcctgcagagcggcctgcccgcccccgtgctggccgagatctgggccctgagcgacctgaacaaggacggcaagatggaccagcaggagttcagcatcgccatgaagctgatcaagctgaagctgcagggccagcagctgcccgtggtgctgccccccatcatgaagcagccccccatgttcagccccctgatcagcgccagattcggcatgggcagcatgcccaacctgagcatcccccagcccctgccccccgccgcccccatcaccagcctgagcagcgccaccagcggcaccaacctgccccccctgatgatgcccacccccctggtgcccagcgtgagcaccagcagcctgcccaacggcaccgccagcctgatccagcccctgcccatcccctacagcagcagcaccctgccccacggcagcagctacagcctgatgatgggcggcttcggcggcgccagcatccagaaggcccagagcctgatcgacctgggcagcagcagaagctggagcagcggcagcagcgcccacagccccgccacccacagagcccccctgagcagccccgtgcccaacagcagcaccagcagcaccgccagcctgagcggcaacagccccaagaccggcaccagcgagtgggccgtgccccagcccaccagactgaagtacagacagaagttcaacaccctggacaagagcatgagcggctacctgagcggcttccaggccagaaacgccctgctgcagagcaacctgagccagacccagctggccaccatctggaccctggccgacgtggacggcgacggccagctgaaggccgaggagttcatcctggccatgcacctgaccgacatggccaaggccggccagcccctgcccctgaccctgccccccgagctggtgccccccagcttcagaggcggcaagcagatcgacagcatcaacggcaccctgcccagctaccagaagatgcaggaggaggagccccagaagaagctgcccgtgaccttcgaggacaagagaaaggccaactacgagagaggcaacatggagctggagaagagaagacaggccctgatggagcagcagcagagagaggccgagagaaaggcccagaaggagaaggaggagtgggagagaaagcagagagagctgcaggagcaggagtggaagaagcagctggagctggagaagagactggagaagcagagagagctggagagacagagagaggaggagagaagaaaggacatcgagagaagagaggccgccaagcaggagctggagagacagagaagactggagtgggagagaatcagaagacaggagctgctgaaccagaagaacagagagcaggaggagatcgtgagactgaacagcaagaagaagaacctgcacctggagctggaggccctgaacggcaagcaccagcagatcagcggcagactgcaggacgtgagactgaagaagcagacccagaagaccgagctggaggtgctggacaagcagtgcgacctggagatcatggagatcaagcagctgcagcaggagctgcaggagtaccagaacaagctgatctacctggtgcccgagaagcagctgctgaacgagagaatcaagaacatgcagttcagcaacacccccgacagcggcgtgagcctgctgcacaagaagagcctggagtag

SEQ ID NO: 85719 - DNA, 3750 bp, synthetic construct
  misc_feature 1..3750: note = Description of Artificial Sequence: Synthetic coding sequence
  source 1..3750: mol_type = other DNA
atgatggcccagttccccaccgccatgaacggcggccccaacatgtgggccatcaccagcgaggagagaaccaagcacgacagacagttcgacaacctgaagcccagcggcggctacatcaccggcgaccaggccagaaacttcttcctgcagagcggcctgcccgcccccgtgctggccgagatctgggccctgagcgacctgaacaaggacggcaagatggaccagcaggagttcagcatcgccatgaagctgatcaagctgaagctgcagggccagcagctgcccgtggtgctgccccccatcatgaagcagccccccatgttcagccccctgatcagcgccagattcggcatgggcagcatgcccaacctgagcatcccccagcccctgccccccgccgcccccatcaccagcctgagcagcgccaccagcggcaccaacctgccccccctgatgatgcccacccccctggtgcccagcgtgagcaccagcagcctgcccaacggcaccgccagcctgatccagcccctgcccatcccctacagcagcagcaccctgccccacggcagcagctacagcctgatgatgggcggcttcggcggcgccagcatccagaaggcccagagcctgatcgacctgggcagcagcagcagcaccagcagcaccgccagcctgagcggcaacagccccaagaccggcaccagcgagtgggccgtgccccagcccaccagactgaagtacagacagaagttcaacaccctggacaagagcatgagcggctacctgagcggcttccaggccagaaacgccctgctgcagagcaacctgagccagacccagctggccaccatctggaccctggccgacgtggacggcgacggccagctgaaggccgaggagttcatcctggccatgcacctgaccgacatggccaaggccggccagcccctgcccctgaccctgccccccgagctggtgccccccagcttcagaggcggcaagcagatcgacagcatcaacggcaccctgcccagctaccagaagatgcaggaggaggagccccagaagaagctgcccgtgaccttcgaggacaagagaaaggccaactacgagagaggcaacatggagctggagaagagaagacaggccctgatggagcagcagcagagagaggccgagagaaaggcccagaaggagaaggaggagtgggagagaaagcagagagagctgcaggagcaggagtggaagaagcagctggagctggagaagagactggagaagcagagagagctggagagacagagagaggaggagagaagaaaggacatcgagagaagagaggccgccaagcaggagctggagagacagagaagactggagtgggagagaatcagaagacaggagctgctgaaccagaagaacagagagcaggaggagatcgtgagactgaacagcaagaagaagaacctgcacctggagctggaggccctgaacggcaagcaccagcagatcagcggcagactgcaggacgtgagactgaagaagcagacccagaagaccgagctggaggtgctggacaagcagtgcgacctggagatcatggagatcaagcagctgcagcaggagctgcaggagtaccagaacaagctgatctacctggtgcccgagaagcagctgctgaacgagagaatcaagaacatgcagttcagcaacacccccgacagcggcgtgagcctgctgcacaagaagagcctggagaaggaggagctgtgccagagactgaaggagcagctggacgccctggagaaggagaccgccagcaagctgagcgagatggacagcttcaacaaccagctgaagtgcggcaacatggacgacagcgtgctgcagtgcctgctgagcctgctgagctgcctgaacaacctgttcctgctgctgaaggagctgagagagacctacaacacccagcagctggccctggagcagctgtacaagatcaagagagacaagctgaaggagatcgagagaaagagactggagctgatgcagaagaagaagctggaggacgaggccgccagaaaggccaagcagggcaaggagaacctgtggaaggagaacctgagaaaggaggaggaggagaagcagaagagactgcaggaggagaagacccaggagaagatccaggaggaggagagaaaggccgaggagaagcagagaaaggacaaggacaccctgaaggccgaggagaagaagagagagaccgccagcgtgctggtgaactacagagccctgtaccccttcgaggccagaaaccacgacgagatgagcttcaacagcggcgacatcatccaggtggacgagaagaccgtgggcgagcccggctggctgtacggcagcttccagggcaacttcggctggttcccctgcaactacgtggagaagatgcccagcagcgagaacgagaaggccgtgagccccaagaaggccctgctgccccccaccgtgagcctgagcgccaccagcaccagcagcgagcccctgagcagcaaccagcccgccagcgtgaccgactaccagaacgtgagcttcagcaacctgaccgtgaacaccagctggcagaagaagagcgccttcaccagaaccgtgagccccggcagcgtgagccccatccacggccagggccaggtggtggagaacctgaaggcccaggccctgtgcagctggaccgccaagaaggacaaccacctgaacttcagcaagcacgacatcatcaccgtgctggagcagcaggagaactggtggttcggcgaggtgcacggcggcagaggctggttccccaagagctacgtgaagatcatccccggcagcgaggtgaagagagaggagcccgaggccctgtacgccgccgtgaacaagaagcccaccagcgccgcctacagcgtgggcgaggagtacatcgccctgtacccctacagcagcgtggagcccggcgacctgaccttcaccgagggcgaggagatcctggtgacccagaaggacggcgagtggtggaccggcagcatcggcgacagaagcggcatcttccccagcaactacgtgaagcccaaggaccaggagagcttcggcagcgccagcaagagcggcgccagcaacaagaagcccgagatcgcccaggtgaccagcgcctacgtggccagcggcagcgagcagctgagcctggcccccggccagctgatcctgatcctgaagaagaacaccagcggctggtggcagggcgagctgcaggccagaggcaagaagagacagaagggctggttccccgccagccacgtgaagctgctgggccccagcagcgagagagccacccccgccttccaccccgtgtgccaggtgatcgccatgtacgactacgccgccaacaacgaggacgagctgagcttcagcaagggccagctgatcaacgtgatgaacaaggacgaccccgactggtggcagggcgagatcaacggcgtgaccggcctgttccccagcaactacgtgaagatgaccaccgacagcgaccccagccagcagtggtgcgccgacctgcagaccctggacaccatgcagcccatcgagagaaagagacagggctacatccacgagctgatccagaccgaggagagatacatggccgacctgcagctggtggtggaggtgagaagactgctgctggccagcagcagaggcatctgctgcctgagctag

SEQ ID NO: 85720 - DNA, 1899 bp, synthetic construct
  misc_feature 1..1899: note = Description of Artificial Sequence: Synthetic coding sequence
  source 1..1899: mol_type = other DNA
atgaacagatacaccaccatcagacagctgggcgacggcacctacggcagcgtgctgctgggcagaagcatcgagagcggcgagctgatcgccatcaagaagatgaagagaaagttctacagctgggaggagtgcatgaacctgagagaggtgaagagcctgaagaagctgaaccacgccaacgtggtgaagctgaaggaggtgatcagagagaacgaccacctgtacttcatcttcgagtacatgaaggagaacctgtaccagctgatcaaggagagaaacaagctgttccccgagagcgccatcagaaacatcatgtaccagatcctgcagggcctggccttcatccacaagcacggcttcttccacagagacctgaagcccgagaacctgctgtgcatgggccccgagctggtgaagatcgccgacttcggcctggccagagagatcagaagcaagcccccctacaccgactacgtgagcaccagatggtacagagcccccgaggtgctgctgagaagcaccaactacagcagccccatcgacgtgtgggccgtgggctgcatcatggccgaggtgtacaccctgagacccctgttccccggcgccagcgagatcgacaccatcttcaagatctgccaggtgctgggcacccccaagaagaccgactggcccgagggctaccagctgagcagcgccatgaacttcagatggccccagtgcgtgcccaacaacctgaagaccctgatccccaacgccagcagcgaggccgtgcagctgctgagagacatgctgcagtgggaccccaagaagagacccaccgccagccaggccctgagatacccctacttccaggtgggccaccccctgggcagcaccacccagaacctgcaggacagcgagaagccccagaagggcatcctggagaaggccggcccccccccctacatcaagcccgtgccccccgcccagccccccgccaagccccacaccagaatcagcagcagacagcaccaggccagccagccccccctgcacctgacctacccctacaaggccgaggtgagcagaaccgaccaccccagccacctgcaggaggacaagcccagccccctgctgttccccagcctgcacaacaagcacccccagagcaagatcaccgccggcctggagcacaagaacggcgagatcaagcccaagagcagaagaagatggggcctgatcagcagaagcaccaaggacagcgacgactgggccgacctggacgacctggacttcagccccagcctgagcagaatcgacctgaagaacaagaagagacagagcgacgacaccctgtgcagattcgagagcgtgctggacctgaagcccagcgagcccgtgggcaccggcaacagcgcccccacccagaccagctaccagagaagagacacccccaccctgagaagcgccgccaagcagcactacctgaagcacagcagatacctgcccggcatcagcatcagaaacggcatcctgagcaaccccggcaaggagttcatcccccccaacccctggagcagcagcggcctgagcggcaagagcagcggcaccatgagcgtgatcagcaaggtgaacagcgtgggcagcagcagcaccagcagcagcggcctgaccggcaactacgtgcccagcttcctgaagaaggagatcggcagcgccatgcagagagtgcacctggcccccatccccgaccccagccccggctacagcagcctgaaggccatgagaccccaccccggcagacccttcttccacacccagcccagaagcacccccggcctgatccccagaccccccgccgcccagcccgtgcacggcagaaccgactgggccagcaagtacgccagcagaagatag

SEQ ID NO: 85721 - DNA, 1899 bp, synthetic construct; identical to SEQ ID NO: 85720
  misc_feature 1..1899: note = Description of Artificial Sequence: Synthetic coding sequence
  source 1..1899: mol_type = other DNA

SEQ ID NO: 85722 - DNA, 738 bp, synthetic construct
  misc_feature 1..738: note = Description of Artificial Sequence: Synthetic coding sequence
  source 1..738: mol_type = other DNA
atgtgcgccgaggtgggccccgccctgtgcagaggcatggagagaaacagcctgggctgctgcgaggcccccaagaagctgagcctgagcttcagcatcgaggccatcctgaagagacccgccagaagaagcgacatggacagacccgagggccccggcgaggagggccccggcgaggccgccgccagcggcagcggcctggagaagccccccaaggaccagccccaggagggcagaaagagcaagagaagagtgagaaccaccttcaccaccgagcagctgcacgagctggagaagatcttccacttcacccactaccccgacgtgcacatcagaagccagctggccgccagaatcaacctgcccgaggccagagtgcagatctggttccagaaccagagagccaagtggagaaagcaggagaagatcggcaacctgggcgccccccagcagctgagcgaggccagcgtggccctgcccaccaacctggacgtggccggccccacctggaccagcaccgccctgagaagactggccccccccaccagctgctgccccagcgcccaggaccagctggccagcgcctggttccccgcctggatcaccctgctgcccgcccacccctgggagacccagcccgtgcccggcctgcccatccaccagacctgcatccccgtgctgtgcatcctgccccccccccaccccaagtggggcagcatctgcgccaccagcacctag

SEQ ID NO: 85723 - DNA, 738 bp, synthetic construct; identical to SEQ ID NO: 85722
  misc_feature 1..738: note = Description of Artificial Sequence: Synthetic coding sequence
  source 1..738: mol_type = other DNA

SEQ ID NO: 85724 - DNA, 1749 bp, synthetic construct
  misc_feature 1..1749: note = Description of Artificial Sequence: Synthetic coding sequence
  source 1..1749: mol_type = other DNA
atggccaacgaggactgccccaaggccgccgacagccccttcagcagcgacaagcacgcccagctgatcctggcccagatcaacaagatgagaaacggccagcacttctgcgacgtgcagctgcaggtgggccaggagagcttcaaggcccacagactggtgctggccgccagcagcccctacttcgccgccctgttcaccggcggcatgaaggagagcagcaaggacgtggtgcccatcctgggcatcgaggccggcatcttccagatcctgctggacttcatctacaccggcatcgtgaacatcggcgtgaacaacgtgcaggagctgatcatcgccgccgacatgctgcagctgaccgaggtggtgcacctgtgctgcgagttcctgaagggccagatcgaccccctgaactgcatcggcatcttccagttcagcgagcagatcgcctgccacgacctgctggagttcagcgagaactacatccacgtgcacttcctggaggtgcacagcggcgaggagttcctggccctgaccaaggaccagctgatcaagatcctgagaagcgaggagctgagcatcgaggacgagtaccaggtgttcctggccgccatgcagtggatcctgaaggacctgggcaagagaagaaagcacgtggtggaggtgctggaccccatcagattccccctgctgcccccccagagactgctgaagtacatcgagggcgtgagcgacttcaacctgagagtggccctgcagaccctgctgaaggagtactgcgaggtgtgcaagagccccaaggagaacaagttctgcagcttcctgcagaccagcaaggtgagacccagaaagaaggccagaaagtacctgtacgccgtgggcggctacaccagactgcagggcggcagatggagcgacagcagagccctgagctgcgtggagagattcgacaccttcagccagtactggaccaccgtgagcagcctgcaccaggccagaagcggcctgggcgtgaccgtgctgggcggcatggtgtacgccatcggcggcgagaaggacagcatgatcttcgactgcaccgagtgctacgaccccgtgaccaagcagtggaccaccgtggccagcatgaaccaccccagatgcggcctgggcgtgtgcgtgtgctacggcgccatctacgccctgggcggctgggtgggcgccgagatcggcaacaccatcgagagattcgaccccgacgagaacaagtgggaggtggtgggcaacatggccgtgagcagatactacttcggctgctgcgagatgcagggcctgatctacgtgatcggcggcatcagcaacgagggcatcgagctgagaagcttcgaggtgtacgaccccctgagcaagagatggagccccctgccccccatgggcaccagaagagcctacctgggcgtggccgccctgaacgactgcatctacagcgtgggcggctggaacgagacccaggacgccctgcacaccgtggagaagtacagcttcgaggaggagaagtgggtggaggtggccagcatgaaggtgcccagagccggcatgtgcgtggtggccgtgaacggcctgctgtacgtgagcggcggcagaagcagcagccacgacttcctggcccccgacacccacagatacgaggtgttcagactgaagtgggagaacatgtgcatcctgttcaacgaccacaagaccctgaccaagggcatcttcaacctgtag

SEQ ID NO: 85725 - DNA, 1755 bp, synthetic construct
  misc_feature 1..1755: note = Description of Artificial Sequence: Synthetic coding sequence
  source 1..1755: mol_type = other DNA
atggccaacgaggactgccccaaggccgccgacagccccttcagcagcgacaagcacgcccagctgatcctggcccagatcaacaagatgagaaacggccagcacttctgcgacgtgcagctgcaggtgggccaggagagcttcaaggcccacagactggtgctggccgccagcagcccctacttcgccgccctgttcaccggcggcatgaaggagagcagcaaggacgtggtgcccatcctgggcatcgaggccggcatcttccagatcctgctggacttcatctacaccggcatcgtgaacatcggcgtgaacaacgtgcaggagctgatcatcgccgccgacatgctgcagctgaccgaggtggtgcacctgtgctgcgagttcctgaagggccagatcgaccccctgaactgcatcggcatcttccagttcagcgagcagatcgcctgccacgacctgctggagttcagcgagaactacatccacgtgcacttcctggaggtgcacagcggcgaggagttcctggccctgaccaaggaccagctgatcaagatcctgagaagcgaggagctgagcatcgaggacgagtaccaggtgttcctggccgccatgcagtggatcctgaaggacctgggcaagagaagaaagcacgtggtggaggtgctggaccccatcagattccccctgctgcccccccagagactgctgaagtacatcgagggcgtgagcgacttcaacctgagagtggccctgcagaccctgctgaaggagtactgcgaggtgtgcaagagccccaaggagaacaagttctgcagcttcctgcagaccagcaaggtgagacccagaaagaaggccagaaagtacctgtacgccgtgggcggctacaccagactgcagggcggcagatggagcgacagcagagccctgagctgcgtggagagattcgacaccttcagccagtactggaccaccgtgagcagcctgcaccaggccagaagcggcctgggcgtgaccgtgctgggcggcatggtgtacgccatcggcggcgagaaggacagcatgatcttcgactgcaccgagtgctacgaccccgtgaccaagcagtggaccaccgtggccagcatgaaccaccccagatgcggcctgggcgtgtgcgtgtgctacggcgccatctacgccctgggcggctgggtgggcgccgagatcggcaacaccatcgagagattcgaccccgacgagaacaagtgggaggtggtgggcaacatggccgtgagcagatactacttcggctgctgcgagatgcagggcctgatctacgtgatcggcggcatcagcaacgagggcatcgagctgagaagcttcgaggtgtacgaccccctgagcaagagatggagccccctgccccccatgggcaccagaagagcctacctgggcgtggccgccctgaacgactgcatctacagcgtgggcggctggaacgagacccaggacgccctgcacaccgtggagaagtacagcttcgaggaggagaagtgggtggaggtggccagcatgaaggtgcccagagccggcatgtgcgtggtggccgtgaacggcctgctgtacgtgagcggcggcagaagcagcagccacgacttcctggcccccggcaccctggacagcgtggaggtgtacaacccccacagcgacacctggaccgagatcggcaacatgatcaccagcagatgcgagggcggcgtggccgtgctgtag

SEQ ID NO: 85726 - DNA, 3879 bp, synthetic construct
  misc_feature 1..3879: note = Description of Artificial Sequence: Synthetic coding sequence
  source 1..3879: mol_type = other DNA
atgagagccgtgctgacctggagagacaaggccgagcactgcatcaacgacatcgccttcaagcccgacggcacccagctgatcctggccgccggcagcagactgctggtgtacgacaccagcgacggcaccctgctgcagcccctgaagggccacaaggacaccgtgtactgcgtggcctacgccaaggacggcaagagattcgccagcggcagcgccgacaagagcgtgatcatctggaccagcaagctggagggcatcctgaagtacaccagctggagcgtgatgagcagcctgcacctgcacctgcccttcctgggcctgcacaagaccgtgagagtgaccgccaccgacaaggcccccaagggccagggcggcagaatcgactgcctgagacccagcgtgcagaaccagcccggccagaagcacaacgacgccatccagtgcgtgagctacaaccccatcacccaccagctggccagctgcagcagcagcgacttcggcctgtggagccccgagcagaagagcgtgagcaagcacaagagcagcagcaagatcatctgctgcagctggaccaacgacggccagtacctggccctgggcatgttcaacggcatcatcagcatcagaaacaagaacggcgaggagaaggtgaagatcgagagacccggcggcagcctgagccccatctggagcatctgctggaaccccagcagcagatgggagagcttctggatgaacagagagaacgaggacgccgaggacgtgatcgtgaacagatacatccaggagatccccagcaccctgaagagcgccgtgtacagcagccagggcagcgaggccgaggaggaggagcccgaggaggaggacgacagccccagagacgacaacctggaggagagaaacgacatcctggccgtggccgactggggccagaaggtgagcttctaccagctgagcggcaagcagatcggcaaggacagagccctgaacttcgacccctgctgcatcagctacttcaccaagggcgagtacatcctgctgggcggcagcgacaagcaggtgagcctgttcaccaaggacggcgtgagactgggcaccgtgggcgagcagaacagctgggtgtggacctgccaggccaagcccgacagcaactacgtggtggtgggctgccaggacggcaccatcagcttctaccagctgatcttcagcaccgtgcacggcctgtacaaggacagatacgcctacagagacagcatgaccgacgtgatcgtgcagcacctgatcaccgagcagaaggtgagaatcaagtgcaaggagctggtgaagaagatcgccatctacagaaacagactggccatccagctgcccgagaagatcctgatctacgagctgtacagcgaggacctgagcgacatgcactacagagtgaaggagaagatcatcaagaagttcgagtgcaacctgctggtggtgtgcgccaaccacatcatcctgtgccaggagaagagactgcagtgcctgagcttcagcggcgtgaaggagagagagtggcagatggagagcctgatcagatacatcaaggtgatcggcggcccccccggcagagagggcctgctggtgggcctgaagaacggccagatcctgaagatcttcgtggacaacctgttcgccatcgtgctgctgaagcaggccaccgccgtgagatgcctggacatgagcgccagcagaaagaagctggccgtggtggacgagaacgacacctgcctggtgtacgacatcgacaccaaggagctgctgttccaggagcccaacgccaacagcgtggcctggaacacccagtgcgaggacatgctgtgcttcagcggcggcggctacctgaacatcaaggccagcaccttccccgtgcacagacagaagctgcagggcttcgtggtgggctacaacggcagcaagatcttctgcctgcacgtgttcagcatcagcgccgtggaggtgccccagagcgcccccatgtaccagtacctggacagaaagctgttcaaggaggcctaccagatcgcctgcctgggcgtgaccgacaccgactggagagagctggccatggaggccctggagggcctggacttcgagaccgccaagaaggccttcatcagagtgcaggacctgagatacctggagctgatcagcagcatcgaggagagaaagaagagaggcgagaccaacaacgacctgttcctggccgacgtgttcagctaccagggcaagttccacgaggccgccaagctgtacaagagaagcggccacgagaacctggccctggagatgtacaccgacctgtgcatgttcgagtacgccaaggacttcctgggcagcggcgaccccaaggagaccaagatgctgatcaccaagcaggccgactgggccagaaacatcaaggagcccaaggccgccgtggagatgtacatcagcgccggcgagcacgtgaaggccatcgagatctgcggcgaccacggctgggtggacatgctgatcgacatcgccagaaagctggacaaggccgagagagagcccctgctgctgtgcgccacctacctgaagaagctggacagccccggctacgccgccgagacctacctgaagatgggcgacctgaagagcctggtgcagctgcacgtggagacccagagatgggacgaggccttcgccctgggcgagaagcaccccgagttcaaggacgacatctacatgccctacgcccagtggctggccgagaacgacagattcgaggaggcccagaaggccttccacaaggccggcagacagagagaggccgtgcaggtgctggagcagctgaccaacaacgccgtggccgagagcagattcaacgacgccgcctactactactggatgctgagcatgcagtgcctggacatcgcccaggaccccgcccagaaggacaccatgctgggcaagttctaccacttccagagactggccgagctgtaccacggctaccacgccatccacagacacaccgaggaccccttcagcgtgcacagacccgagaccctgttcaacatcagcagattcctgctgcacagcctgcccaaggacacccccagcggcatcagcaaggtgaagatcctgttcaccctggccaagcagagcaaggccctgggcgcctacagactggccagacacgcctacgacaagctgagaggcctgtacatccccgccagattccagaagagcatcgagctgggcaccctgaccatcagagccaagcccttccacgacagcgaggagctggtgcccctgtgctacagatgcagcaccaacaaccccctgctgaacaacctgggcaacgtgtgcatcaactgcagacagcccttcatcttcagcgccagcagctacgacgtgctgcacctggtggagttctacctggaggagggcatcaccgacgaggaggccatcagcctgatcgacctggaggtgctgagacccaagagagacgacagacagctggagatcgccaacaacagcagccagatcctgagactggtggagaccaaggacagcatcggcgacgaggaccccttcaccgccaagctgagcttcgagcagggcggcagcgagttcgtgcccgtggtggtgagcagactggtgctgagaagcatgagcagaagagacgtgctgatcaagagatggcccccccccctgagatggcagtacttcagaagcctgctgcccgacgccagcatcaccatgtgccccagctgcttccagatgttccacagcgaggactacgagctgctggtgctgcagcacggctgctgcccctactgcagaagatgcaaggacgaccccggcccctag

SEQ ID NO: 85727 - DNA, 3549 bp, synthetic construct
  misc_feature 1..3549: note = Description of Artificial Sequence: Synthetic coding sequence
  source 1..3549: mol_type = other DNA
atgagagccgtgctgacctggagagacaaggccgagcactgcatcaacgacatcgccttcaagcccgacggcacccagctgatcctggccgccggcagcagactgctggtgtacgacaccagcgacggcaccctgctgcagcccctgaagggccacaaggacaccgtgtactgcgtggcctacgccaaggacggcaagagattcgccagcggcagcgccgacaagagcgtgatcatctggaccagcaagctggagggcatcctgaagtacacccacaacgacgccatccagtgcgtgagctacaaccccatcacccaccagctggccagctgcagcagcagcgacttcggcctgtggagccccgagcagaagagcgtgagcaagcacaagagcagcagcaagatcatctgctgcagctggaccaacgacggccagtacctggccctgggcatgttcaacggcatcatcagcatcagaaacaagaacggcgaggagaaggtgaagatcgagagacccggcggcagcctgagccccatctggagcatctgctggaaccccagcagagaggagagaaacgacatcctggccgtggccgactggggccagaaggtgagcttctaccagctgagcggcaagcagatcggcaaggacagagccctgaacttcgacccctgctgcatcagctacttcaccaagggcgagtacatcctgctgggcggcagcgacaagcaggtgagcctgttcaccaaggacggcgtgagactgggcaccgtgggcgagcagaacagctgggtgtggacctgccaggccaagcccgacagcaactacgtggtggtgggctgccaggacggcaccatcagcttctaccagctgatcttcagcaccgtgcacggcctgtacaaggacagatacgcctacagagacagcatgaccgacgtgatcgtgcagcacctgatcaccgagcagaaggtgagaatcaagtgcaaggagctggtgaagaagatcgccatctacagaaacagactggccatccagctgcccgagaagatcctgatctacgagctgtacagcgaggacctgagcgacatgcactacagagtgaaggagaagatcatcaagaagttcgagtgcaacctgctggtggtgtgcgccaaccacatcatcctgtgccaggagaagagactgcagtgcctgagcttcagcggcgtgaaggagagagagtggcagatggagagcctgatcagatacatcaaggtgatcggcggcccccccggcagagagggcctgctggtgggcctgaagaacggccagatcctgaagatcttcgtggacaacctgttcgccatcgtgctgctgaagcaggccaccgccgtgagatgcctggacatgagcgccagcagaaagaagctggccgtggtggacgagaacgacacctgcctggtgtacgacatcgacaccaaggagctgctgttccaggagcccaacgccaacagcgtggcctggaacacccagtgcgaggacatgctgtgcttcagcggcggcggctacctgaacatcaaggccagcaccttccccgtgcacagacagaagctgcagggcttcgtggtgggctacaacggcagcaagatcttctgcctgcacgtgttcagcatcagcgccgtggaggtgccccagagcgcccccatgtaccagtacctggacagaaagctgttcaaggaggcctaccagatcgcctgcctgggcgtgaccgacaccgactggagagagctggccatggaggccctggagggcctggacttcgagaccgccaagaaggccttcatcagagtgcaggacctgagatacctggagctgatcagcagcatcgaggagagaaagaagagaggcgagaccaacaacgacctgttcctggccgacgtgttcagctaccagggcaagttccacgaggccgccaagctgtacaagagaagcggccacgagaacctggccctggagatgtacaccgacctgtgcatgttcgagtacgccaaggacttcctgggcagcggcgaccccaaggagaccaagatgctgatcaccaagcaggccgactgggccagaaacatcaaggagcccaaggccgccgtggagatgtacatcagcgccggcgagcacgtgaaggccatcgagatctgcggcgaccacggctgggtggacatgctgatcgacatcgccagaaagctggacaaggccgagagagagcccctgctgctgtgcgccacctacctgaagaagctggacagccccggctacgccgccgagacctacctgaagatgggcgacctgaagagcctggtgcagctgcacgtggagacccagagatgggacgaggccttcgccctgggcgagaagcaccccgagttcaaggacgacatctacatgccctacgcccagtggctggccgagaacgacagattcgaggaggcccagaaggccttccacaaggccggcagacagagagaggccgtgcaggtgctggagcagctgaccaacaacgccgtggccgagagcagattcaacgacgccgcctactactactggatgctgagcatgcagtgcctggacatcgcccaggaccccgcccagaaggacaccatgctgggcaagttctaccacttccagagactggccgagctgtaccacggctaccacgccatccacagacacaccgaggaccccttcagcgtgcacagacccgagaccctgttcaacatcagcagattcctgctgcacagcctgcccaaggacacccccagcggcatcagcaaggtgaagatcctgttcaccctggccaagcagagcaaggccctgggcgcctacagactggccagacacgcctacgacaagctgagaggcctgtacatccccgccagattccagaagagcatcgagctgggcaccctgaccatcagagccaagcccttccacgacagcgaggagctggtgcccctgtgctacagatgcagcaccaacaaccccctgctgaacaacctgggcaacgtgtgcatcaactgcagacagcccttcatcttcagcgccagcagctacgacgtgctgcacctggtggagttctacctggaggagggcatcaccgacgaggaggccatcagcctgatcgacctggaggtgctgagacccaagagagacgacagacagctggagatcgccaacaacagcagccagatcctgagactggtggagaccaaggacagcatcggcgacgaggaccccttcaccgccaagctgagcttcgagcagggcggcagcgagttcgtgcccgtggtggtgagcagactggtgctgagaagcatgagcagaagagacgtgctgatcaagagatggcccccccccctgagatggcagtacttcagaagcctgctgcccgacgccagcatcaccatgtgccccagctgcttccagatgttccacagcgaggactacgagctgctggtgctgcagcacggctgctgcccctactgcagaagatgcaaggacgaccccggcccctag

SEQ ID NO: 85728 - DNA, 3726 bp, synthetic construct
  misc_feature 1..3726: note = Description of Artificial Sequence: Synthetic coding sequence
  source 1..3726: mol_type = other DNA
atgagagccgtgctgacctggagagacaaggccgagcactgcatcaacgacatcgccttcaagcccgacggcacccagctgatcctggccgccggcagcagactgctggtgtacgacaccagcgacggcaccctgctgcagcccctgaagggccacaaggacaccgtgtactgcgtggcctacgccaaggacggcaagagattcgccagcggcagcgccgacaagagcgtgatcatctggaccagcaagctggagggcatcctgaagtacacccacaacgacgccatccagtgcgtgagctacaaccccatcacccaccagctggccagctgcagcagcagcgacttcggcctgtggagccccgagcagaagagcgtgagcaagcacaagagcagcagcaagatcatctgctgcagctggaccaacgacggccagtacctggccctgggcatgttcaacggcatcatcagcatcagaaacaagaacggcgaggagaaggtgaagatcgagagacccggcggcagcctgagccccatctggagcatctgctggaaccccagcagcagatgggagagcttctggatgaacagagagaacgaggacgccgaggacgtgatcgtgaacagatacatccaggagatccccagcaccctgaagagcgccgtgtacagcagccagggcagcgaggccgaggaggaggagcccgaggaggaggacgacagccccagagacgacaacctggaggagagaaacgacatcctggccgtggccgactggggccagaaggtgagcttctaccagctgagcggcaagcagatcggcaaggacagagccctgaacttcgacccctgctgcatcagctacttcaccaagggcgagtacatcctgctgggcggcagcgacaagcaggtgagcctgttcaccaaggacggcgtgagactgggcaccgtgggcgagcagaacagctgggtgtggacctgccaggccaagcccgacagcaactacgtggtggtgggctgccaggacggcaccatcagcttctaccagctgatcttcagcaccgtgcacggcctgtacaaggacagatacgcctacagagacagcatgaccgacgtgatcgtgcagcacctgatcaccgagcagaaggtgagaatcaagtgcaaggagctggtgaagaagatcgccatctacagaaacagactggccatccagctgcccgagaagatcctgatctacgagctgtacagcgaggacctgagcgacatgcactacagagtgaaggagaagatcatcaagaagttcgagtgcaacctgctggtggtgtgcgccaaccacatcatcctgtgccaggagaagagactgcagtgcctgagcttcagcggcgtgaaggagagagagtggcagatggagagcctgatcagatacatcaaggtgatcggcggcccccccggcagagagggcctgctggtgggcctgaagaacggccagatcctgaagatcttcgtggacaacctgttcgccatcgtgctgctgaagcaggccaccgccgtgagatgcctggacatgagcgccagcagaaagaagctggccgtggtggacgagaacgacacctgcctggtgtacgacatcgacaccaaggagctgctgttccaggagcccaacgccaacagcgtggcctggaacacccagtgcgaggacatgctgtgcttcagcggcggcggctacctgaacatcaaggccagcaccttccccgtgcacagacagaagctgcagggcttcgtggtgggctacaacggcagcaagatcttctgcctgcacgtgttcagcatcagcgccgtggaggtgccccagagcgcccccatgtaccagtacctggacagaaagctgttcaaggaggcctaccagatcgcctgcctgggcgtgaccgacaccgactggagagagctggccatggaggccctggagggcctggacttcgagaccgccaagaaggccttcatcagagtgcaggacctgagatacctggagctgatcagcagcatcgaggagagaaagaagagaggcgagaccaacaacgacctgttcctggccgacgtgttcagctaccagggcaagttccacgaggccgccaagctgtacaagagaagcggccacgagaacctggccctggagatgtacaccgacctgtgcatgttcgagtacgccaaggacttcctgggcagcggcgaccccaaggagaccaagatgctgatcaccaagcaggccgactgggccagaaacatcaaggagcccaaggccgccgtggagatgtacatcagcgccggcgagcacgtgaaggccatcgagatctgcggcgaccacggctgggtggacatgctgatcgacatcgccagaaagctggacaaggccgagagagagcccctgctgctgtgcgccacctacctgaagaagctggacagccccggctacgccgccgagacctacctgaagatgggcgacctgaagagcctggtgcagctgcacgtggagacccagagatgggacgaggccttcgccctgggcgagaagcaccccgagttcaaggacgacatctacatgccctacgcccagtggctggccgagaacgacagattcgaggaggcccagaaggccttccacaaggccggcagacagagagaggccgtgcaggtgctggagcagctgaccaacaacgccgtggccgagagcagattcaacgacgccgcctactactactggatgctgagcatgcagtgcctggacatcgcccaggaccccgcccagaaggacaccatgctgggcaagttctaccacttccagagactggccgagctgtaccacggctaccacgccatccacagacacaccgaggaccccttcagcgtgcacagacccgagaccctgttcaacatcagcagattcctgctgcacagcctgcccaaggacacccccagcggcatcagcaaggtgaagatcctgttcaccctggccaagcagagcaaggccctgggcgcctacagactggccagacacgcctacgacaagctgagaggcctgtacatccccgccagattccagaagagcatcgagctgggcaccctgaccatcagagccaagcccttccacgacagcgaggagctggtgcccctgtgctacagatgcagcaccaacaaccccctgctgaacaacctgggcaacgtgtgcatcaactgcagacagcccttcatcttcagcgccagcagctacgacgtgctgcacctggtggagttctacctggaggagggcatcaccgacgaggaggccatcagcctgatcgacctggaggtgctgagacccaagagagacgacagacagctggagatcgccaacaacagcagccagatcctgagactggtggagaccaaggacagcatcggcgacgaggaccccttcaccgccaagctgagcttcgagcagggcggcagcgagttcgtgcccgtggtggtgagcagactggtgctgagaagcatgagcagaagagacgtgctgatcaagagatggcccccccccctgagatggcagtacttcagaagcctgctgcccgacgccagcatcaccatgtgccccagctgcttccagatgttccacagcgaggactacgagctgctggtgctgcagcacggctgctgcccctactgcagaagatgcaaggacgaccccggcccctag

SEQ ID NO: 85729 - DNA, 3396 bp, synthetic construct
  misc_feature 1..3396: note = Description of Artificial Sequence: Synthetic coding sequence
  source 1..3396: mol_type = other DNA
atgagagccgtgctgacctggagagacaaggccgagcactgcatcaacgacatcgccttcaagcccgacggcacccagctgatcctggccgccggcagcagactgctggtgtacgacaccagcgacggcaccctgctgcagcccctgaagggccacaaggacaccgtgtactgcgtggcctacgccaaggacggcctgtggagccccgagcagaagagcgtgagcaagcacaagagcagcagcaagatcatctgctgcagctggaccaacgacggccagtacctggccctgggcatgttcaacggcatcatcagcatcagaaacaagaacggcgaggagaaggtgaagatcgagagacccggcggcagcctgagccccatctggagcatctgctggaaccccagcagagaggagagaaacgacatcctggccgtggccgactggggccagaaggtgagcttctaccagctgagcggcaagcagatcggcaaggacagagccctgaacttcgacccctgctgcatcagctacttcaccaagggcgagtacatcctgctgggcggcagcgacaagcaggtgagcctgttcaccaaggacggcgtgagactgggcaccgtgggcgagcagaacagctgggtgtggacctgccaggccaagcccgacagcaactacgtggtggtgggctgccaggacggcaccatcagcttctaccagctgatcttcagcaccgtgcacggcctgtacaaggacagatacgcctacagagacagcatgaccgacgtgatcgtgcagcacctgatcaccgagcagaaggtgagaatcaagtgcaaggagctggtgaagaagatcgccatctacagaaacagactggccatccagctgcccgagaagatcctgatctacgagctgtacagcgaggacctgagcgacatgcactacagagtgaaggagaagatcatcaagaagttcgagtgcaacctgctggtggtgtgcgccaaccacatcatcctgtgccaggagaagagactgcagtgcctgagcttcagcggcgtgaaggagagagagtggcagatggagagcctgatcagatacatcaaggtgatcggcggcccccccggcagagagggcctgctggtgggcctgaagaacggccagatcctgaagatcttcgtggacaacctgttcgccatcgtgctgctgaagcaggccaccgccgtgagatgcctggacatgagcgccagcagaaagaagctggccgtggtggacgagaacgacacctgcctggtgtacgacatcgacaccaaggagctgctgttccaggagcccaacgccaacagcgtggcctggaacacccagtgcgaggacatgctgtgcttcagcggcggcggctacctgaacatcaaggccagcaccttccccgtgcacagacagaagctgcagggcttcgtggtgggctacaacggcagcaagatcttctgcctgcacgtgttcagcatcagcgccgtggaggtgccccagagcgcccccatgtaccagtacctggacagaaagctgttcaaggaggcctaccagatcgcctgcctgggcgtgaccgacaccgactggagagagctggccatggaggccctggagggcctggacttcgagaccgccaagaaggccttcatcagagtgcaggacctgagatacctggagctgatcagcagcatcgaggagagaaagaagagaggcgagaccaacaacgacctgttcctggccgacgtgttcagctaccagggcaagttccacgaggccgccaagctgtacaagagaagcggccacgagaacctggccctggagatgtacaccgacctgtgcatgttcgagtacgccaaggacttcctgggcagcggcgaccccaaggagaccaagatgctgatcaccaagcaggccgactgggccagaaacatcaaggagcccaaggccgccgtggagatgtacatcagcgccggcgagcacgtgaaggccatcgagatctgcggcgaccacggctgggtggacatgctgatcgacatcgccagaaagctggacaaggccgagagagagcccctgctgctgtgcgccacctacctgaagaagctggacagccccggctacgccgccgagacctacctgaagatgggcgacctgaagagcctggtgcagctgcacgtggagacccagagatgggacgaggccttcgccctgggcgagaagcaccccgagttcaaggacgacatctacatgccctacgcccagtggctggccgagaacgacagattcgaggaggcccagaaggccttccacaaggccggcagacagagagaggccgtgcaggtgctggagcagctgaccaacaacgccgtggccgagagcagattcaacgacgccgcctactactactggatgctgagcatgcagtgcctggacatcgcccaggccgaccccgcccagaaggacaccatgctgggcaagttctaccacttccagagactggccgagctgtaccacggctaccacgccatccacagacacaccgaggaccccttcagcgtgcacagacccgagaccctgttcaacatcagcagattcctgctgcacagcctgcccaaggacacccccagcggcatcagcaaggtgaagatcctgttcaccctggccaagcagagcaaggccctgggcgcctacagactggccagacacgcctacgacaagctgagaggcctgtacatccccgccagattccagaagagcatcgagctgggcaccctgaccatcagagccaagcccttccacgacagcgaggagctggtgcccctgtgctacagatgcagcaccaacaaccccctgctgaacaacctgggcaacgtgtgcatcaactgcagacagcccttcatcttcagcgccagcagctacgacgtgctgcacctggtggagttctacctggaggagggcatcaccgacgaggaggccatcagcctgatcgacctggaggtgctgagacccaagagagacgacagacagctggagatcgccaacaacagcagccagatcctgagactggtggagaccaaggacagcatcggcgacgaggaccccttcaccgccaagctgagcttcgagcagggcggcagcgagttcgtgcccgtggtggtgagcagactggtgctgagaagcatgagcagaagagacgtgctgatcaagagatggcccccccccctgagatggcagtacttcagaagcctgctgcccgacgccagcatcaccatgtgccccagctgcttccagatgttccacagcgaggactacgagctgctggtgctgcagcacggctgctgcccctactgcagaagatgcaaggacgaccccggcccctag

SEQ ID NO: 85730 - DNA, 3276 bp, synthetic construct
  misc_feature 1..3276: note = Description of Artificial Sequence: Synthetic coding sequence
  source 1..3276: mol_type = other DNA
atgttcaacggcatcatcagcatcagaaacaagaacggcgaggagaaggtgaagatcgagagacccggcggcagcctgagccccatctggagcatctgctggaaccccagcagcagatgggagagcttctggatgaacagagagaacgaggacgccgaggacgtgatcgtgaacagatacatccaggagatccccagcaccctgaagagcgccgtgtacagcagccagggcagcgaggccgaggaggaggagcccgaggaggaggacgacagccccagagacgacaacctggaggagagaaacgacatcctggccgtggccgactggggccagaaggtgagcttctaccagctgagcggcaagcagatcggcaaggacagagccctgaacttcgacccctgctgcatcagctacttcaccaagggcgagtacatcctgctgggcggcagcgacaagcaggtgagcctgttcaccaaggacggcgtgagactgggcaccgtgggcgagcagaacagctgggtgtggacctgccaggccaagcccgacagcaactacgtggtggtgggctgccaggacggcaccatcagcttctaccagctgatcttcagcaccgtgcacggcctgtacaaggacagatacgcctacagagacagcatgaccgacgtgatcgtgcagcacctgatcaccgagcagaaggtgagaatcaagtgcaaggagctggtgaagaagatcgccatctacagaaacagactggccatccagctgcccgagaagatcctgatctacgagctgtacagcgaggacctgagcgacatgcactacagagtgaaggagaagatcatcaagaagttcgagtgcaacctgctggtggtgtgcgccaaccacatcatcctgtgccaggagaagagactgcagtgcctgagcttcagcggcgtgaaggagagagagtggcagatggagagcctgatcagatacatcaaggtgatcggcggcccccccggcagagagggcctgctggtgggcctgaagaacggccagatcctgaagatcttcgtggacaacctgttcgccatcgtgctgctgaagcaggccaccgccgtgagatgcctggacatgagcgccagcagaaagaagctggccgtggtggacgagaacgacacctgcctggtgtacgacatcgacaccaaggagctgctgttccaggagcccaacgccaacagcgtggcctggaacacccagtgcgaggacatgctgtgcttcagcggcggcggctacctgaacatcaaggccagcaccttccccgtgcacagacagaagctgcagggcttcgtggtgggctacaacggcagcaagatcttctgcctgcacgtgttcagcatcagcgccgtggaggtgccccagagcgcccccatgtaccagtacctggacagaaagctgttcaaggaggcctaccagatcgcctgcctgggcgtgaccgacaccgactggagagagctggccatggaggccctggagggcctggacttcgagaccgccaagaaggccttcatcagagtgcaggacctgagatacctggagctgatcagcagcatcgaggagagaaagaagagaggcgagaccaacaacgacctgttcctggccgacgtgttcagctaccagggcaagttccacgaggccgccaagctgtacaagagaagcggccacgagaacctggccctggagatgtacaccgacctgtgcatgttcgagtacgccaaggacttcctgggcagcggcgaccccaaggagaccaagatgctgatcaccaagcaggccgactgggccagaaacatcaaggagcccaaggccgccgtggagatgtacatcagcgccggcgagcacgtgaaggccatcgagatctgcggcgaccacggctgggtggacatgctgatcgacatcgccagaaagctggacaaggccgagagagagcccctgctgctgtgcgccacctacctgaagaagctggacagccccggctacgccgccgagacctacctgaagatgggcgacctgaagagcctggtgcagctgcacgtggagacccagagatgggacgaggccttcgccctgggcgagaagcaccccgagttcaaggacgacatctacatgccctacgcccagtggctggccgagaacgacagattcgaggaggcccagaaggccttccacaaggccggcagacagagagaggccgtgcaggtgctggagcagctgaccaacaacgccgtggccgagagcagattcaacgacgccgcctactactactggatgctgagcatgcagtgcctggacatcgcccaggaccccgcccagaaggacaccatgctgggcaagttctaccacttccagagactggccgagctgtaccacggctaccacgccatccacagacacaccgaggaccccttcagcgtgcacagacccgagaccctgttcaacatcagcagattcctgctgcacagcctgcccaaggacacccccagcggcatcagcaaggtgaagatcctgttcaccctggccaagcagagcaaggccctgggcgcctacagactggccagacacgcctacgacaagctgagaggcctgtacatccccgccagattccagaagagcatcgagctgggcaccctgaccatcagagccaagcccttccacgacagcgaggagctggtgcccctgtgctacagatgcagcaccaacaaccccctgctgaacaacctgggcaacgtgtgcatcaactgcagacagcccttcatcttcagcgccagcagctacgacgtgctgcacctggtggagttctacctggaggagggcatcaccgacgaggaggccatcagcctgatcgacctggaggtgctgagacccaagagagacgacagacagctggagatcgccaacaacagcagccagatcctgagactggtggagaccaaggacagcatcggcgacgaggaccccttcaccgccaagctgagcttcgagcagggcggcagcgagttcgtgcccgtggtggtgagcagactggtgctgagaagcatgagcagaagagacgtgctgatcaagagatggcccccccccctgagatggcagtacttcagaagcctgctgcccgacgccagcatcaccatgtgccccagctgcttccagatgttccacagcgaggactacgagctgctggtgctgcagcacggctgctgcccctactgcagaagatgcaaggacgaccccggcccctag

SEQ ID NO: 85731 - DNA, 3099 bp, synthetic construct
  misc_feature 1..3099: note = Description of Artificial Sequence: Synthetic coding sequence
  source 1..3099: mol_type = other DNA
atgttcaacggcatcatcagcatcagaaacaagaacggcgaggagaaggtgaagatcgagagacccggcggcagcctgagccccatctggagcatctgctggaaccccagcagagaggagagaaacgacatcctggccgtggccgactggggccagaaggtgagcttctaccagctgagcggcaagcagatcggcaaggacagagccctgaacttcgacccctgctgcatcagctacttcaccaagggcgagtacatcctgctgggcggcagcgacaagcaggtgagcctgttcaccaaggacggcgtgagactgggcaccgtgggcgagcagaacagctgggtgtggacctgccaggccaagcccgacagcaactacgtggtggtgggctgccaggacggcaccatcagcttctaccagctgatcttcagcaccgtgcacggcctgtacaaggacagatacgcctacagagacagcatgaccgacgtgatcgtgcagcacctgatcaccgagcagaaggtgagaatcaagtgcaaggagctggtgaagaagatcgccatctacagaaacagactggccatccagctgcccgagaagatcctgatctacgagctgtacagcgaggacctgagcgacatgcactacagagtgaaggagaagatcatcaagaagttcgagtgcaacctgctggtggtgtgcgccaaccacatcatcctgtgccaggagaagagactgcagtgcctgagcttcagcggcgtgaaggagagagagtggcagatggagagcctgatcagatacatcaaggtgatcggcggcccccccggcagagagggcctgctggtgggcctgaagaacggccagatcctgaagatcttcgtggacaacctgttcgccatcgtgctgctgaagcaggccaccgccgtgagatgcctggacatgagcgccagcagaaagaagctggccgtggtggacgagaacgacacctgcctggtgtacgacatcgacaccaaggagctgctgttccaggagcccaacgccaacagcgtggcctggaacacccagtgcgaggacatgctgtgcttcagcggcggcggctacctgaacatcaaggccagcaccttccccgtgcacagacagaagctgcagggcttcgtggtgggctacaacggcagcaagatcttctgcctgcacgtgttcagcatcagcgccgtggaggtgccccagagcgcccccatgtaccagtacctggacagaaagctgttcaaggaggcctaccagatcgcctgcctgggcgtgaccgacaccgactggagagagctggccatggaggccctggagggcctggacttcgagaccgccaagaaggccttcatcagagtgcaggacctgagatacctggagctgatcagcagcatcgaggagagaaagaagagaggcgagaccaacaacgacctgttcctggccgacgtgttcagctaccagggcaagttccacgaggccgccaagctgtacaagagaagcggccacgagaacctggccctggagatgtacaccgacctgtgcatgttcgagtacgccaaggacttcctgggcagcggcgaccccaaggagaccaagatgctgatcaccaagcaggccgactgggccagaaacatcaaggagcccaaggccgccgtggagatgtacatcagcgccggcgagcacgtgaaggccatcgagatctgcggcgaccacggctgggtggacatgctgatcgacatcgccagaaagctggacaaggccgagagagagcccctgctgctgtgcgccacctacctgaagaagctggacagccccggctacgccgccgagacctacctgaagatgggcgacctgaagagcctggtgcagctgcacgtggagacccagagatgggacgaggccttcgccctgggcgagaagcaccccgagttcaaggacgacatctacatgccctacgcccagtggctggccgagaacgacagattcgaggaggcccagaaggccttccacaaggccggcagacagagagaggccgtgcaggtgctggagcagctgaccaacaacgccgtggccgagagcagattcaacgacgccgcctactactactggatgctgagcatgcagtgcctggacatcgcccaggaccccgcccagaaggacaccatgctgggcaagttctaccacttccagagactggccgagctgtaccacggctaccacgccatccacagacacaccgaggaccccttcagcgtgcacagacccgagaccctgttcaacatcagcagattcctgctgcacagcctgcccaaggacacccccagcggcatcagcaaggtgaagatcctgttcaccctggccaagcagagcaaggccctgggcgcctacagactggccagacacgcctacgacaagctgagaggcctgtacatccccgccagattccagaagagcatcgagctgggcaccctgaccatcagagccaagcccttccacgacagcgaggagctggtgcccctgtgctacagatgcagcaccaacaaccccctgctgaacaacctgggcaacgtgtgcatcaactgcagacagcccttcatcttcagcgccagcagctacgacgtgctgcacctggtggagttctacctggaggagggcatcaccgacgaggaggccatcagcctgatcgacctggaggtgctgagacccaagagagacgacagacagctggagatcgccaacaacagcagccagatcctgagactggtggagaccaaggacagcatcggcgacgaggaccccttcaccgccaagctgagcttcgagcagggcggcagcgagttcgtgcccgtggtggtgagcagactggtgctgagaagcatgagcagaagagacgtgctgatcaagagatggcccccccccctgagatggcagtacttcagaagcctgctgcccgacgccagcatcaccatgtgccccagctgcttccagatgttccacagcgaggactacgagctgctggtgctgcagcacggctgctgcccctactgcagaagatgcaaggacgaccccggcccctag

SEQ ID NO: 85732 - DNA, 3252 bp, synthetic construct
  misc_feature 1..3252: note = Description of Artificial Sequence: Synthetic coding sequence
  source 1..3252: mol_type = other DNA
atgagagccgtgctgacctggagagacaaggccgagcactgcatcaacgacatcgccttcaagcccgacggcacccagctgatcctggccgccggcagcagactgctggtgtacgacaccagcgacggcaccctgctgcagcccctgaagggccacaaggacaccgtgtactgcgtggcctacgccaaggacggcctgtggagccccgagcagaagagcgtgagcaagcacaagagcagcagcaagatcatctgctgcagagaggagagaaacgacatcctggccgtggccgactggggccagaaggtgagcttctaccagctgagcggcaagcagatcggcaaggacagagccctgaacttcgacccctgctgcatcagctacttcaccaagggcgagtacatcctgctgggcggcagcgacaagcaggtgagcctgttcaccaaggacggcgtgagactgggcaccgtgggcgagcagaacagctgggtgtggacctgccaggccaagcccgacagcaactacgtggtggtgggctgccaggacggcaccatcagcttctaccagctgatcttcagcaccgtgcacggcctgtacaaggacagatacgcctacagagacagcatgaccgacgtgatcgtgcagcacctgatcaccgagcagaaggtgagaatcaagtgcaaggagctggtgaagaagatcgccatctacagaaacagactggccatccagctgcccgagaagatcctgatctacgagctgtacagcgaggacctgagcgacatgcactacagagtgaaggagaagatcatcaagaagttcgagtgcaacctgctggtggtgtgcgccaaccacatcatcctgtgccaggagaagagactgcagtgcctgagcttcagcggcgtgaaggagagagagtggcagatggagagcctgatcagatacatcaaggtgatcggcggcccccccggcagagagggcctgctggtgggcctgaagaacggccagatcctgaagatcttcgtggacaacctgttcgccatcgtgctgctgaagcaggccaccgccgtgagatgcctggacatgagcgccagcagaaagaagctggccgtggtggacgagaacgacacctgcctggtgtacgacatcgacaccaaggagctgctgttccaggagcccaacgccaacagcgtggcctggaacacccagtgcgaggacatgctgtgcttcagcggcggcggctacctgaacatcaaggccagcaccttccccgtgcacagacagaagctgcagggcttcgtggtgggctacaacggcagcaagatcttctgcctgcacgtgttcagcatcagcgccgtggaggtgccccagagcgcccccatgtaccagtacctggacagaaagctgttcaaggaggcctaccagatcgcctgcctgggcgtgaccgacaccgactggagagagctggccatggaggccctggagggcctggacttcgagaccgccaagaaggccttcatcagagtgcaggacctgagatacctggagctgatcagcagcatcgaggagagaaagaagagaggcgagaccaacaacgacctgttcctggccgacgtgttcagctaccagggcaagttccacgaggccgccaagctgtacaagagaagcggccacgagaacctggccctggagatgtacaccgacctgtgcatgttcgagtacgccaaggacttcctgggcagcggcgaccccaaggagaccaagatgctgatcaccaagcaggccgactgggccagaaacatcaaggagcccaaggccgccgtggagatgtacatcagcgccggcgagcacgtgaaggccatcgagatctgcggcgaccacggctgggtggacatgctgatcgacatcgccagaaagctggacaaggccgagagagagcccctgctgctgtgcgccacctacctgaagaagctggacagccccggctacgccgccgagacctacctgaagatgggcgacctgaagagcctggtgcagctgcacgtggagacccagagatgggacgaggccttcgccctgggcgagaagcaccccgagttcaaggacgacatctacatgccctacgcccagtggctggccgagaacgacagattcgaggaggcccagaaggccttccacaaggccggcagacagagagaggccgtgcaggtgctggagcagctgaccaacaacgccgtggccgagagcagattcaacgacgccgcctactactactggatgctgagcatgcagtgcctggacatcgcccaggccgaccccgcccagaaggacaccatgctgggcaagttctaccacttccagagactggccgagctgtaccacggctaccacgccatccacagacacaccgaggaccccttcagcgtgcacagacccgagaccctgttcaacatcagcagattcctgctgcacagcctgcccaaggacacccccagcggcatcagcaaggtgagaaagatcctgttcaccctggccaagcagagcaaggccctgggcgcctacagactggccagacacgcctacgacaagctgagaggcctgtacatccccgccagattccagaagagcatcgagctgggcaccctgaccatcagagccaagcccttccacgacagcgaggagctggtgcccctgtgctacagatgcagcaccaacaaccccctgctgaacaacctgggcaacgtgtgcatcaactgcagacagcccttcatcttcagcgccagcagctacgacgtgctgcacctggtggagttctacctggaggagggcatcaccgacgaggaggccatcagcctgatcgacctggaggtgctgagacccaagagagacgacagacagctggagatcgccaacaacagcagccagatcctgagactggtggagaccaaggacagcatcggcgacgaggaccccttcaccgccaagctgagcttcgagcagggcggcagcgagttcgtgcccgtggtggtgagcagactggtgctgagaagcatgagcagaagagacgtgctgatcaagagatggcccccccccctgagatggcagtacttcagaagcctgctgcccgacgccagcatcaccatgtgccccagctgcttccagatgttccacagcgaggactacgagctgctggtgctgcagcacggctgctgcccctactgcagaagatgcaaggacgaccccggcccctag

SEQ ID NO: 85733 - DNA, 2886 bp, synthetic construct
  misc_feature 1..2886: note = Description of Artificial Sequence: Synthetic coding sequence
  source 1..2886: mol_type = other DNA
atgagagccgtgctgacctggagagacaaggccgagcactgcatcaacgacatcgccttcaagcccgacggcacccagctgatcctggccgccggcagcagactgctggtgtacgacaccagcgacggcaccctgctgcagcccctgaagggccacaaggacaccgtgtactgcgtggcctacgccaaggacggcaagagattcgccagcggcagcgccgacaagagcgtgatcatctggaccagcaagctggagggcatcctgaagtacacccacaacgacgccatccagtgcgtgagctacaaccccatcacccaccagctggccagctgcagcagcagcgacttcggcctgtggagccccgagcagaagagcgtgagcaagcacaagagcagcagcaagatcatctgctgcagctggaccaacgacggccagtacctggccctgggcatgttcaacggcatcatcagcatcagaaacaagaacggcgaggagaaggtgaagatcgagagacccggcggcagcctgagccccatctggagcatctgctggaaccccagcagagaggagagaaacgacatcctggccgtggccgactggggccagaaggtgagcttctaccagctgagcggcaagcagatcggcaaggacagagccctgaacttcgacccctgctgcatcagctacttcaccaagggcgagtacatcctgctgggcggcagcgacaagcaggtgagcctgttcaccaaggacggcgtgagactgggcaccgtgggcgagcagaacagctgggtgtggacctgccaggccaagcccgacagcaactacgtggtggtgggctgccaggacggcaccatcagcttctaccagctgatcttcagcaccgtgcacggcctgtacaaggacagatacgcctacagagacagcatgaccgacgtgatcgtgcagcacctgatcaccgagcagaaggtgagaatcaagtgcaaggagctggtgaagaagatcgccatctacagaaacagactggccatccagctgcccgagaagatcctgatctacgagctgtacagcgaggacctgagcgacatgcactacagagtgaaggagaagatcatcaagaagttcgagtgcaacctgctggtggtgtgcgccaaccacatcatcctgtgccaggagaagagactgcagtgcctgagcttcagcggcgtgaaggagagagagtggcagatggagagcctgatcagatacatcaaggtgatcggcggcccccccggcagagagggcctgctggtgggcctgaagaacggccagatcctgaagatcttcgtggacaacctgttcgccatcgtgctgctgaagcaggccaccgccgtgagatgcctggacatgagcgccagcagaaagaagctggccgtggtggacgagaacgacacctgcctggtgtacgacatcgacaccaaggagctgctgttccaggagcccaacgccaacagcgtggcctggaacacccagtgcgaggacatgctgtgcttcagcggcggcggctacctgaacatcaaggccagcaccttccccgtgcacagacagaagctgcagggcttcgtggtgggctacaacggcagcaagatcttctgcctgcacgtgttcagcatcagcgccgtggaggtgccccagagcgcccccatgtaccagtacctggacagaaagctgttcaaggaggcctaccagatcgcctgcctgggcgtgaccgacaccgactggagagagctggccatggaggccctggagggcctggacttcgagaccgccaagaaggccttcatcagagtgcaggacctgagatacctggagctgatcagcagcatcgaggagagaaagaagagaggcgagaccaacaacgacctgttcctggccgacgtgttcagctaccagggcaagttccacgaggccgccaagctgtacaagagaagcggccacgagaacctggccctggagatgtacaccgacctgtgcatgttcgagtacgccaaggacttcctgggcagcggcgaccccaaggagaccaagatgctgatcaccaagcaggccgactgggccagaaacatcaaggagcccaaggccgccgtggagatgtacatcagcgccggcgagcacgtgaaggccatcgagatctgcggcgaccacggctgggtggacatgctgatcgacatcgccagaaagctggacaaggccgagagagagcccctgctgctgtgcgccacctacctgaagaagctggacagccccggctacgccgccgagacctacctgaagatgggcgacctgaagagcctggtgcagctgcacgtggagacccagagatgggacgaggccttcgccctgggcgagaagcaccccgagttcaaggacgacatctacatgccctacgcccagtggctggccgagaacgacagattcgaggaggcccagaaggccttccacaaggccggcagacagagagaggccgtgcaggtgctggagcagctgaccaacaacgccgtggccgagagcagattcaacgacgccgcctactactactggatgctgagcatgcagtgcctggacatcgcccaggaccccgcccagaaggacaccatgctgggcaagttctaccacttccagagactggccgagctgtaccacggctaccacgccatccacagacacaccgaggaccccttcagcgtgcacagacccgagaccctgttcaacatcagcagattcctgctgcacagcctgcccaaggacacccccagcggcatcagcaaggtgtgcgagaacaccctgcacctgggccaggccgagcagggccccagatgcctgcaggccggccccgccagactgtag

SEQ ID NO: 85734 - DNA, 3357 bp, synthetic construct
  misc_feature 1..3357: note = Description of Artificial Sequence: Synthetic coding sequence
  source 1..3357: mol_type = other DNA
atgagagccgtgctgacctggagagacaaggccgagcactgcatcaacgacatcgccttcaagcccgacggcacccagctgatcctggccgccggcagcagactgctggtgtacgacaccagcgacggcaccctgctgcagcccctgaagggccacaaggacaccgtgtactgcgtggcctacgccaaggacgtgctgtgcatcgagggcctgtggagccccgagcagaagagcgtgagcaagcacaagagcagcagcaagatcatctgctgcagctggaccaacgacggccagtacctggccctgggcatgttcaacggcatcatcagcatcagaaacaagaacggcgaggagaaggtgaagatcgagagacccggcggcagcctgagccccatctggagcatctgctggaaccccagcagagaggagagaaacgacatcctggccgtggccgactggggccagaaggtgagcttctaccagctgagcggcaagcagatcggcaaggacagagccctgaacttcgacccctgctgcatcagctacttcaccaagggcgagtacatcctgctgggcggcagcgacaagcaggtgagcctgttcaccaaggacggcgtgagactgggcaccgtgggcgagcagaacagctgggtgtggacctgccaggccaagcccgacagcaactacgtggtggtgggctgccaggacggcaccatcagcttctaccagctgatcttcagcaccgtgcacggcctgtacaaggacagatacgcctacagagacagcatgaccgacgtgatcgtgcagcacctgatcaccgagcagaaggtgagaatcaagtgcaaggagctggtgaagaagatcgccatctacagaaacagactggccatccagctgcccgagaagatcctgatctacgagctgtacagcgaggacctgagcgacatgcactacagagtgaaggagaagatcatcaagaagttcgagtgcaacctgctggtggtgtgcgccaaccacatcatcctgtgccaggagaagagactgcagtgcctgagcttcagcggcgtgaaggagagagagtggcagatggagagcctgatcagatacatcaaggtgatcggcggcccccccggcagagagggcctgctggtgggcctgaagaacggccagatcctgaagatcttcgtggacaacctgttcgccatcgtgctgctgaagcaggccaccgccgtgagatgcctggacatgagcgccagcagaaagaagctggccgtggtggacgagaacgacacctgcctggtgtacgacatcgacaccaaggagctgctgttccaggagcccaacgccaacagcgtggcctggaacacccagtgcgaggacatgctgtgcttcagcggcggcggctacctgaacatcaaggccagcaccttccccgtgcacagacagaagctgcagggcttcgtggtgggctacaacggcagcaagatcttctgcctgcacgtgttcagcatcagcgccgtggaggtgccccagagcgcccccatgtaccagtacctggacagaaagctgttcaaggaggcctaccagatcgcctgcctgggcgtgaccgacaccgactggagagagctggccatggaggccctggagggcctggacttcgagaccgccaagaaggagagaaagaagagaggcgagaccaacaacgacctgttcctggccgacgtgttcagctaccagggcaagttccacgaggccgccaagctgtacaagagaagcggccacgagaacctggccctggagatgtacaccgacctgtgcatgttcgagtacgccaaggacttcctgggcagcggcgaccccaaggagaccaagatgctgatcaccaagcaggccgactgggccagaaacatcaaggagcccaaggccgccgtggagatgtacatcagcgccggcgagcacgtgaaggccatcgagatctgcggcgaccacggctgggtggacatgctgatcgacatcgccagaaagctggacaaggccgagagagagcccctgctgctgtgcgccacctacctgaagaagctggacagccccggctacgccgccgagacctacctgaagatgggcgacctgaagagcctggtgcagctgcacgtggagacccagagatgggacgaggccttcgccctgggcgagaagcaccccgagttcaaggacgacatctacatgccctacgcccagtggctggccgagaacgacagattcgaggaggcccagaaggccttccacaaggccggcagacagagagaggccgtgcaggtgctggagcagctgaccaacaacgccgtggccgagagcagattcaacgacgccgcctactactactggatgctgagcatgcagtgcctggacatcgcccaggccgaccccgcccagaaggacaccatgctgggcaagttctaccacttccagagactggccgagctgtaccacggctaccacgccatccacagacacaccgaggaccccttcagcgtgcacagacccgagaccctgttcaacatcagcagattcctgctgcacagcctgcccaaggacacccccagcggcatcagcaaggtgaagatcctgttcaccctggccaagcagagcaaggccctgggcgcctacagactggccagacacgcctacgacaagctgagaggcctgtacatccccgccagattccagaagagcatcgagctgggcaccctgaccatcagagccaagcccttccacgacagcgaggagctggtgcccctgtgctacagatgcagcaccaacaaccccctgctgaacaacctgggcaacgtgtgcatcaactgcagacagcccttcatcttcagcgccagcagctacgacgtgctgcacctggtggagttctacctggaggagggcatcaccgacgaggaggccatcagcctgatcgacctggaggtgctgagacccaagagagacgacagacagctggagatcgccaacaacagcagccagatcctgagactggtggagaccaaggacagcatcggcgacgaggaccccttcaccgccaagctgagcttcgagcagggcggcagcgagttcgtgcccgtggtggtgagcagactggtgctgagaagcatgagcagaagagacgtgctgatcaagagatggcccccccccctgagatggcagtacttcagaagcctgctgcccgacgccagcatcaccatgtgccccagctgcttccagatgttccacagcgaggactacgagctgctggtgctgcagcacggctgctgcccctactgcagaagatgcaaggacgaccccggcccctag

SEQ ID NO: 85735 - DNA, 5250 bp, synthetic construct
  misc_feature 1..5250: note = Description of Artificial Sequence: Synthetic coding sequence
  source 1..5250: mol_type = other DNA
atgcacctgaagcacctgagaaccctgctgagcccccaggacggcgccgccaaggtgacctgcatggcctggagccagaacaacgccaagttcgccgtgtgcaccgtggacagagtggtgctgctgtacgacgagcacggcgagagaagagacaagttcagcaccaagcccgccgacatgaagtacggcagaaagagctacatggtgaagggcatggccttcagccccgacagcaccaagatcgccatcggccagaccgacaacatcatctacgtgtacaagatcggcgaggactggggcgacaagaaggtgatctgcaacaagttcatccagaccagcgccgtgacctgcctgcagtggcccgccgagtacatcatcgtgttcggcctggccgagggcaaggtgagactggccaacaccaagaccaacaagagcagcaccatctacggcaccgagagctacgtggtgagcctgaccaccaactgcagcggcaagggcatcctgagcggccacgccgacggcaccatcgtgagatacttcttcgacgacgagggcagcggcgagagccagggcaagctggtgaaccacccctgccccccctacgccctggcctgggccaccaacagcatcgtggccgccggctgcgacagaaagatcgtggcctacggcaaggagggccacatgctgcagaccttcgactacagcagagacccccaggagagagagttcaccaccgccgtgagcagccccggcggccagagcgtggtgctgggcagctacgacagactgagagtgttcaactggatccccagaagaagcatctgggaggaggccaagcccaaggagatcaccaacctgtacaccatcaccgccctggcctggaagagagacggcagcagactgtgcgtgggcaccctgtgcggcggcgtggagcagttcgactgctgcctgagaagaagcatctacaagaacaagttcgagctgacctacgtgggccccagccaggtgatcgtgaagaacctgagcagcggcaccagagtggtgctgaagagccactacggctacgaggtggaggaggtgaagatcctgggcaaggagagatacctggtggcccacaccagcgagaccctgctgctgggcgacctgaacaccaacagactgagcgagatcgcctggcagggcagcggcggcaacgagaagtacttcttcgagaacgagaacgtgtgcatgatcttcaacgccggcgagctgaccctggtggagtacggcaacaacgacaccctgggcagcgtgagaaccgagttcatgaacccccacctgatcagcgtgagaatcaacgagagatgccagagaggcaccgaggacaacaagaagctggcctacctgatcgacatcaagaccatcgccatcgtggacctgatcggcggctacaacatcggcaccgtgagccacgagagcagagtggactggctggagctgaacgagaccggccacaagctgctgttcagagacagaaagctgagactgcacctgtacgacatcgagagctgcagcaagaccatgatcctgaacttctgcagctacatgcagtgggtgcccggcagcgacgtgctggtggcccagaacagaaacagcctgtgcgtgtggtacaacatcgaggcccccgagagagtgaccatgttcaccatcagaggcgacgtgatcggcctggagagaggcggcggcaagaccgaggtgatggtgatggagggcgtgaccaccgtggcctacaccctggacgagggcctgatcgagttcggcaccgccatcgacgacggcaactacatcagagccaccgccttcctggagaccctggagatgacccccgagaccgaggccatgtggaagaccctgagcaagctggccctggaggccagacagctgcacatcgccgagagatgcttcagcgccctgggccaggtggccaaggccagattcctgcacgagaccaacgagatcgccgaccaggtgagcagagagtacggcggcgagggcaccgacttctaccaggtgagagccagactggccatgctggagaagaactacaagctggccgagatgatcttcctggagcagaacgccgtggaggaggccatgggcatgtaccaggagctgcacagatgggacgagtgcatcgccgtggccgaggccaagggccaccccgccctggagaagctgagaagaagctactaccagtggctgatggacacccagcaggaggagagagccggcgagctgcaggagagccagggcgacggcctggccgccatcagcctgtacctgaaggccggcctgcccgccaaggccgccagactggtgctgaccagagaggagctgctggccaacaccgagctggtggagcacatcaccgccgccctgatcaagggcgagctgtacgagagagccggcgacctgttcgagaagatccacaacccccagaaggccctggagtgctacagaaagggcaacgccttcatgaaggccgtggagctggccagactggccttccccgtggaggtggtgaagctggaggaggcctggggcgaccacctggtgcagcagaagcagctggacgccgccatcaaccactacatcgaggccagatgcagcatcaaggccatcgaggccgccctgggcgccagacagtggaagaaggccatctacatcctggacctgcaggacagaaacaccgccagcaagtactaccccctggtggcccagcactacgccagcctgcaggagtacgagatcgccgaggagctgtacaccaagggcgacagaaccaaggacgccatcgacatgtacacccaggccggcagatgggagcaggcccacaagctggccatgaagtgcatgagacccgaggacgtgagcgtgctgtacatcacccaggcccaggagatggagaagcagggcaagtacagagaggccgagagactgtacgtgaccgtgcaggagcccgacctggccatcaccatgtacaagaagcacaagctgtacgacgacatgatcagactggtgggcaagcaccaccccgacctgctgagcgacacccacctgcacctgggcaaggagctggaggccgagggcagactgcaggaggccgagtaccactacctggaggcccaggagtggaaggccaccgtgaacatgtacagagccagcggcctgtgggaggaggcctacagagtggccagaacccagggcggcgccaacgcccacaagcacgtggcctacctgtgggccaagagcctgggcggcgaggccgccgtgagactgctgaacaagctgggcctgctggaggccgccgtggaccacgccgccgacaactgcagcttcgagttcgccttcgagctgagcagactggccctgaagcacaagacccccgaggtgcacctgaagtacgccatgttcctggaggacgagggcaagttcgaggaggccgaggccgagttcatcagagccggcaagcccaaggaggccgtgctgatgttcgtgcacaaccaggactgggaggccgcccagagagtggccgaggcccacgaccccgacagcgtggccgaggtgctggtgggccaggccagaggcgccctggaggagaaggacttccagaaggccgagggcctgctgctgagagcccagagacccggcctggccctgaactactacaaggaggccggcctgtggagcgacgccctgagaatctgcaaggactacgtgcccagccagctggaggccctgcaggaggagtacgagagagaggccaccaagaagggcgccagaggcgtggagggcttcgtggagcaggccagacactgggagcaggccggcgagtacagcagagccgtggactgctacctgaaggtgagagacagcggcaacagcggcctggccgagaagtgctggatgaaggccgccgagctgagcatcaagttcctgcccccccagagaaacatggaggtggtgctggccgtgggcccccagctgatcggcatcggcaagcacagcgccgccgccgagctgtacctgaacctggacctggtgaaggaggccatcgacgccttcatcgagggcgaggagtggaacaaggccaagagagtggccaaggagctggaccccagatacgaggactacgtggaccagcactacaaggagttcctgaagaaccagggcaaggtggacagcctggtgggcgtggacgtgatcgccgccctggacctgtacgtggagcagggccagtgggacaagtgcatcgagaccgccaccaagcagaactacaagatcctgcacaagtacgtggccctgtacgccacccacctgatcagagagggcagcagcgcccaggccctggccctgtacgtgcagcacggcgcccccgccaacccccagaacttcaacatctacaagagaatcttcaccgacatggtgagcagccccggcaccaactgcgccgaggcctaccacagctgggccgacctgagagacgtgctgttcaacctgtgcgagaacctggtgaagagcagcgaggccaacagccccgcccacgaggagttcaagaccatgctgctgatcgcccactactacgccaccagaagcgccgcccagagcgtgaagcagctggagaccgtggccgccagactgagcgtgagcctgctgagacacacccagctgctgcccgtggacaaggccttctacgaggccggcatcgccgccaaggccgtgggctgggacaacatggccttcatcttcctgaacagattcctggacctgaccgacgccatcgaggagggcaccctggacggcctggaccacagcgacttccaggacaccgacatccccttcgaggtgcccctgcccgccaagcagcacgtgcccgaggccgagagagaggaggtgagagactgggtgctgaccgtgagcatggaccagagactggagcaggtgctgcccagagacgagagaggcgcctacgaggccagcctggtggccgccagcaccggcgtgagagccctgccctgcctgatcaccggctaccccatcctgagaaacaagatcgagttcaagagacccggcaaggccgccaacaaggacaactggaacaagttcctgatggccatcaagaccagccacagccccgtgtgccaggacgtgctgaagttcatcagccagtggtgcggcggcctgcccagcaccagcttcagcttccagtag

SEQ ID NO: 85736 - DNA, 1536 bp, synthetic construct
  misc_feature 1..1536: note = Description of Artificial Sequence: Synthetic coding sequence
  source 1..1536: mol_type = other DNA
atggcctggagccagaacaacgccaagttcgccgtgtgcaccgtggacagagtggtgctgctgtacgacgagcacggcgagagaagagacaagttcagcaccaagcccgccgacatgaagtacggcagaaagagctacatggtgaagggcatggccttcagccccgacagcaccaagatcgccatcggccagaccgacaacatcatctacgtgtacaagatcggcgaggactggggcgacaagaaggtgatctgcaacaagttcatccagaccagcgccgtgacctgcctgcagtggcccgccgagtacatcatcgtgttcggcctggccgagggcaaggtgagactggccaacaccaagaccaacaagagcagcaccatctacggcaccgagagctacgtggtgagcctgaccaccaactgcagcggcaagggcatcctgagcggccacgccgacggcaccatcgtgagatacttcttcgacgacgagggcagcggcgagagccagggcaagctggtgaaccacccctgccccccctacgccctggcctgggccaccaacagcatcgtggccgccggctgcgacagaaagatcgtggcctacggcaaggagggccacatgctgcagaccttcgactacagcagagacccccaggagagagagttcaccaccgccgtgagcagccccggcggccagagcgtggtgctgggcagctacgacagactgagagtgttcaactggatccccagaagaagcatctgggaggaggccaagcccaaggagatcaccaacctgtacaccatcaccgccctggcctggaagagagacggcagcagactgtgcgtgggcaccctgtgcggcggcgtggagcagttcgactgctgcctgagaagaagcatctacaagaacaagttcgagctgacctacgtgggccccagccaggtgatcgtgaagaacctgagcagcggcaccagagtggtgctgaagagccactacggctacgaggtggaggaggtgaagatcctgggcaaggagagatacctggtggcccacaccagcgagaccctgctgctgggcgacctgaacaccaacagactgagcgagatcgcctggcagggcagcggcggcaacgagaagtacttcttcgagaacgagaacgtgtgcatgatcttcaacgccggcgagctgaccctggtggagtacggcaacaacgacaccctgggcagcgtgagaaccgagttcatgaacccccacctgatcagcgtgagaatcaacgagagatgccagagaggcaccgaggacaacaagaagctggcctacctgatcgacatcaagaccatcgccatcgtggacctgatcggcggctacaacatcggcaccgtgagccacgagagcagagtggactggctggagctgaacgagaccggccacaagctgctgttcagagacagaaagctgagagtgagaagagccaccaaggccctgggcatcggctggcccaccgagggcgtgagacaggccgccaccagagactag

SEQ ID NO: 85737 - DNA, 369 bp, synthetic construct
  misc_feature 1..369: note = Description of Artificial Sequence: Synthetic coding sequence
  source 1..369: mol_type = other DNA
atgacccacctgctgctgaccgccaccgtgacccccagcgagcagaacagcagcagagagcccggctgggagaccgccatggccaaggacatcctgggcgaggccggcctgcacttcgacgagctgaacaagctgagagtgctggaccccgaggtgacccagcagaccatcgagctgaaggaggagtgcaaggacttcgtggacaagatcggccagttccagaagatcgtgggcggcctgatcgagctggtggaccagctggccaaggaggccgagaacgagaagatgaaggtgagaagcgcctgcctgccccccaccagctggcccggcaccctggtgcactaccccctgatccccctgcccagctag

SEQ ID NO: 85738 - DNA, 447 bp, synthetic construct
  misc_feature 1..447: note = Description of Artificial Sequence: Synthetic coding sequence
  source 1..447: mol_type = other DNA
atggccaaggacatcctgggcgaggccggcctgcacttcgacgagctgaacaagctgagagtgctggaccccgaggtgacccagcagaccatcgagctgaaggaggagtgcaaggacttcgtggacaagatcggccagttccagaagatcgtgggcggcctgatcgagctggtggaccagctggccaaggaggccgagaacgagaagatgaagagcctggccgtgagccccagactggagtgcaccggcgccatcagcgcccactgcaagctgtgcctgagcgacagcagcgacagccccaccagccccagcagagtgggcggcaccaccggccacagatgcagcgagctggcccagatctacagcaaggccgagagaagcagcaccgccgccaccagcagccccaacagcagaaaggagaacgccgccagaaaggtgagcggctag

SEQ ID NO: 85739 - DNA, 399 bp, synthetic construct
  misc_feature 1..399: note = Description of Artificial Sequence: Synthetic coding sequence
  source 1..399: mol_type = other DNA
atggccaaggacatcctgggcgaggccggcctgcacttcgacgagctgaacaagctgagagtgctggaccccgaggtgacccagcagaccatcgagctgaaggaggagtgcaaggacttcgtggacaagatcggccagttccagaagatcgtgggcggcctgatcgagctggtggaccagctggccaaggaggccgagaacgagaagatgaaggccatcggcgccagaaacctgctgaagagcatcgccaagcagagagaggcccagcagcagcagctgcaggccctgatcgccgagaagaagatgcagctggagagatacagagtggagtacgaggccctgtgcaaggtggaggccgagcagaacgagttcatcgaccagttcatcttccagaagtag

SEQ ID NO: 85740 - DNA, 216 bp, synthetic construct
  misc_feature 1..216: note = Description of Artificial Sequence: Synthetic coding sequence
  source 1..216: mol_type = other DNA
gacatcctgggcgaggccggcctgcacttcgacgagctgaacaagctgagagtgctggaccccgaggtgacccagcagaccatcgagctgaaggaggagtgcaaggacttcgtggacaagatcggccagttccagaagatcgtgggcggcctgatcgagctggtggaccagctggccaaggaggccgagaacgagaagatgaaggtgagcggctag

SEQ ID NO: 85741 - DNA, 345 bp, synthetic construct
  misc_feature 1..345: note = Description of Artificial Sequence: Synthetic coding sequence
  source 1..345: mol_type = other DNA
atggccaaggacatcctgggcgaggccggcctgcacttcgacgagctgaacaagctgagagtgctggaccccgaggtgacccagcagaccatcgagctgaaggaggagtgcaaggacttcgtggacaagatcggccagttccagaagatcgtgggcggcctgatcgagctggtggaccagctggccaaggaggccgagaacgagaagatgaaggccatcggcgccagaaacctgctgaagagcatcgccaagcagagagaggcccagcagcagcagctgcaggccctgatcgccgagaagaagatgcagctggagagaaacgagctgaagatcagcctgctgtag

SEQ ID NO: 85742 - DNA, 477 bp, synthetic construct
  misc_feature 1..477: note = Description of Artificial Sequence: Synthetic coding sequence
  source 1..477: mol_type = other DNA
atgacccacctgctgctgaccgccaccgtgacccccagcgagcagaacagcagcagagagcccggctgggagaccgccatggccaaggacatcctgggcgaggccggcctgcacttcgacgagctgaacaagctgagagtgctggaccccgaggtgacccagcagaccatcgagctgaaggaggagtgcaaggacttcgtggacaagatcggccagttccagaagatcgtgggcggcctgatcgagctggtggaccagctggccaaggaggccgagaacgagaagatgaaggccatcggcgccagaaacctgctgaagagcatcgccaagcagagagaggcccagcagcagcagctgcaggccctgatcgccgagaagaagatgcagctggagagatacagagtggagtacgaggccctgtgcaaggtggaggccgagcagaacgagttcatcgaccagttcatcttccagaagtag

SEQ ID NO: 85743 - DNA, 399 bp, synthetic construct; identical to SEQ ID NO: 85739
  misc_feature 1..399: note = Description of Artificial Sequence: Synthetic coding sequence
  source 1..399: mol_type = other DNA

SEQ ID NO: 85744 - DNA, 642 bp, synthetic construct
  misc_feature 1..642: note = Description of Artificial Sequence: Synthetic coding sequence
  source 1..642: mol_type = other DNA
atggaggacctgctggacctggacgaggagctgagatacagcctggccaccagcagagccaagatgggcagaagagcccagcaggagagcgcccaggccgagaaccacctgaacggcaagaacagcagcctgaccctgaccggcgagaccagcagcgccaagctgcccagatgcagacagggcggctgggccggcgacagcgtgaaggccagcaacggcacccagaccggcaagcagcagctggacctgaacgcctgctaccacaagacccaccacagagacctgggcctggccagcctggaggaggccgacatccccatcatccccgacctggaggaggtgcaggaggaggacttcgtgctgcaggtggccgccccccccagcatccagatcaagagagtgatgacctacagagacctggacaacgacctgatgaagtacagcgccatccagaccctggacggcgagatcgacctgaagctgctgaccaaggtgctggcccccgagcacgaggtgagagaggacgacgtgggctgggactgggaccacctgttcaccgaggtgagcagcgaggtgctgaccgagtgggaccccctgcagaccgagaaggaggaccccgccggccaggccagacacacctag

SEQ ID NO: 85745 - DNA, 627 bp, synthetic construct
  misc_feature 1..627: note = Description of Artificial Sequence: Synthetic coding sequence
  source 1..627: mol_type = other DNA
atggaggacctgctggacctggacgaggagctgagatacagcctggccaccagcagagccaagatgggcagaagagcccagcaggagagcgcccaggccgagaaccacctgaacggcaagaacagcagcctgaccctgaccggcgagaccagcagcgccaagctgcccagatgcagacagggcggctgggccggcgacagcgtgaaggccagcaagttcagaagaaaggccagcgaggagatcgaggacttcagactgagaccccagagcctgaacggcagcgactacggcggcgacatccccatcatccccgacctggaggaggtgcaggaggaggacttcgtgctgcaggtggccgccccccccagcatccagatcaagagagtgatgacctacagagacctggacaacgacctgatgaagtacagcgccatccagaccctggacggcgagatcgacctgaagctgctgaccaaggtgctggcccccgagcacgaggtgagagaggacgacgtgggctgggactgggaccacctgttcaccgaggtgagcagcgaggtgctgaccgagtgggaccccctgcagaccgagaaggaggaccccgccggccaggccagacacacctag

SEQ ID NO: 85746 - DNA, 342 bp, synthetic construct
  misc_feature 1..342: note = Description of Artificial Sequence: Synthetic coding sequence
  source 1..342: mol_type = other DNA
atggaggacctgctggacctggacgaggagctgagatacagcctggccaccagcagagccaagatgggcagaagagcccagcaggagagcgcccaggccgagaaccacctgaacggcaagaacagcagcctgaccctgaccggcgagaccagcagcgccaagctgcccagatgcagacagggcggctgggccggcgacagcgtgaaggccagcaagttcagaagaaaggccagcgaggagatcgaggagtacgtgagcagcatcctgatcctgatggtgagctacgtggacctgggccagcagtgcagcctgggcggccacgacctgttccacctgtgctag

SEQ ID NO: 85747 - DNA, 1290 bp, synthetic construct
  misc_feature 1..1290: note = Description of Artificial Sequence: Synthetic coding sequence
  source 1..1290: mol_type = other DNA
atgaccgccgccctggccgtggtgaccaccagcggcctggaggacggcgtgcccagaagcagaggcgagggcaccggcgaggtggtgctggagagaggccccggcgccgcctaccacatgttcgtggtgatggaggacctggtggagaagctgaagctgctgagatacgaggaggagttcctgagaaagagcaacctgaaggcccccagcagacactacttcgccctgcccaccaaccccggcgagcagttctacatgttctgcaccctggccgcctggctgatcaacaaggccggcagacccttcgagcagccccaggagtacgacgaccccaacgccaccatcagcaacatcctgagcgagctgagaagcttcggcagaaccgccgacttcccccccagcaagctgaagagcggctacggcgagcacgtgtgctacgtgctggactgcttcgccgaggaggccctgaagtacatcggcttcacctggaagagacccatctaccccgtggaggagctggaggaggagagcgtggccgaggacgacgccgagctgaccctgaacaaggtggacgaggagttcgtggaggaggagaccgacaacgaggagaacttcatcgacctgaacgtgctgaaggcccagacctaccacctggacatgaacgagaccgccaagcaggaggacatcctggagagcaccaccgacgccgccgagtggagcctggaggtggagagagtgctgccccagctgaaggtgaccatcagaaccgacaacaaggactggagaatccacgtggaccagatgcaccagcacagaagcggcatcgagagcgccctgaaggagaccaagggcttcctggacaagctgcacaacgagatcaccagaaccctggagaagatcagcagcagagagaagtacatcaacaaccagctggagaacctggtgcaggagtacagagccgcccaggcccagctgagcgaggccaaggagagataccagcagggcaacggcggcgtgaccgagagaaccagactgctgagcgaggtgatggaggagctggagaaggtgaagcaggagatggaggagaagggcagcagcatgaccgacggcgcccccctggtgaagatcaagcagagcctgaccaagctgaagcaggagaccgtggagatggacatcagaatcggcatcgtggagcacaccctgctgcagagcaagctgaaggagaagagcaacatgaccagaaacatgcacgccaccgtgatccccgagcccgccaccggcttctactag

SEQ ID NO: 85748 - DNA, 2334 bp, synthetic construct
  misc_feature 1..2334: note = Description of Artificial Sequence: Synthetic coding sequence
  source 1..2334: mol_type = other DNA
atgagactgaagatcagcctgctgaaggagcccaagcaccaggagctggtgagctgcgtgggctggaccaccgccgaggagctgtacagctgcagcgacgaccaccagatcgtgaagtggaacctgctgaccagcgagaccacccagatcgtgaagctgcccgacgacatctaccccatcgacttccactggttccccaagagcctgggcgtgaagaagcagacccaggccgagagcttcgtgctgaccagcagcgacggcaagttccacctgatcagcaagctgggcagagtggagaagagcgtggaggcccactgcggcgccgtgctggccggcagatggaactacgagggcaccgccctggtgaccgtgggcgaggacggccagatcaagatctggagcaagaccggcatgctgagaagcaccctggcccagcagggcacccccgtgtacagcgtggcctggggccccgacagcgagaaggtgctgtacaccgccggcaagcagctgatcatcaagcccctgcagcccaacgccaaggtgctgcagtggaaggcccacgacggcatcatcctgaaggtggactggaacagcgtgaacgacctgatcctgagcgccggcgaggactgcaagtacaaggtgtgggacagctacggcagacccctgtacaacagccagccccacgagcaccccatcaccagcgtggcctgggcccccgacggcgagctgttcgccgtgggcagcttccacaccctgagactgtgcgacaagaccggctggagctacgccctggagaagcccaacaccggcagcatcttcaacatcgcctggagcatcgacggcacccagatcgccggcgcctgcggcaacggccacgtggtgttcgcccacgtggtggagcagcactgggagtggaagaacttccaggtgaccctgaccaagagaagagccatgcaggtgagaaacgtgctgaacgacgccgtggacctgctggagttcagagacagagtgatcaaggccagcctgaactacgcccacctggtggtgagcaccagcctgcagtgctacgtgttcagcaccaagaactggaacacccccatcatcttcgacctgaaggagggcaccgtgagcctgatcctgcaggccgagagacacttcctgctggtggacggcagcagcatctacctgtacagctacgagggcagattcatcagcagccccaagttccccggcatgagaaccgacatcctgaacgcccagaccgtgagcctgagcaacgacaccatcgccatcagagacaaggccgacgagaagatcatcttcctgttcgaggccagcaccggcaagcccctgggcgacggcaagttcctgagccacaagaacgagatcctggagatcgccctggaccagaagggcctgaccaacgacagaaagatcgccttcatcgacaagaacagagacctgtgcatcaccagcgtgaagagattcggcaaggaggagcagatcatcaagctgggcaccatggtgcacaccctggcctggaacgacacctgcaacatcctgtgcggcctgcaggacaccagattcatcgtgtggtactaccccaacaccgtgtacgtggacagagacatcctgcccaagaccctgtacgagagagacgccagcgagttcagcaagaacccccacatcgtgagcttcgtgggcaaccaggtgaccatcagaagagccgacggcagcctggtgcacatcagcatcaccccctaccccgccatcctgcacgagtacgtgagcagcagcaagtgggaggacgccgtgagactgtgcagattcgtgaaggagcagaccatgtgggcctgcctggccgccatggccgtggccaacagagacatgaccaccgccgagatcgcctacgccgccatcggcgagatcgacaaggtgcagtacatcaacagcatcaagaacctgcccagcaaggagagcaagatggcccacatcctgctgttcagcggcaacatccaggaggccgagatcgtgctgctgcaggccggcctggtgtaccaggccatccagatcaacatcaacctgtacaactgggagagagccctggagctggccgtgaagtacaagacccacgtggacaccgtgctggcctacagacagaagttcctggagaccttcggcaagcaggagaccaacaagagatacctgcactacgccgagggcctgcagatcgactgggagaagatcaaggccaagatcgagatggagatcaccaaggagagagagcagagcagcagcagccagagcagcaagagcatcggcctgaagccctag

SEQ ID NO: 85749 - DNA, 195 bp, synthetic construct
  misc_feature 1..195: note = Description of Artificial Sequence: Synthetic coding sequence
  source 1..195: mol_type = other DNA
atgagactgaagatcagcctgctgaaggagcccaagcaccaggagctggtgagctgcgtgggctggaccaccgccgaggagctgtacagctgcagcgacgaccaccagatcgtgaagtggaacctgctgaccagcgagaccacccagatcgtgaagctgcccgacgacatctaccccatcgacttccactggtag

SEQ ID NO: 85750 - DNA, 1923 bp, synthetic construct
  misc_feature 1..1923: note = Description of Artificial Sequence: Synthetic coding sequence
  source 1..1923: mol_type = other DNA
atgctgagaagcaccctggcccagcagggcacccccgtgtacagcgtggcctggggccccgacagcgagaaggtgctgtacaccgccggcaagcagctgatcatcaagcccctgcagcccaacgccaaggtgctgcagtggaaggcccacgacggcatcatcctgaaggtggactggaacagcgtgaacgacctgatcctgagcgccggcgaggactgcaagtacaaggtgtgggacagctacggcagacccctgtacaacagccagccccacgagcaccccatcaccagcgtggcctgggcccccgacggcgagctgttcgccgtgggcagcttccacaccctgagactgtgcgacaagaccggctggagctacgccctggagaagcccaacaccggcagcatcttcaacatcgcctggagcatcgacggcacccagatcgccggcgcctgcggcaacggccacgtggtgttcgcccacgtggtggagcagcactgggagtggaagaacttccaggtgaccctgaccaagagaagagccatgcaggtgagaaacgtgctgaacgacgccgtggacctgctggagttcagagacagagtgatcaaggccagcctgaactacgcccacctggtggtgagcaccagcctgcagtgctacgtgttcagcaccaagaactggaacacccccatcatcttcgacctgaaggagggcaccgtgagcctgatcctgcaggccgagagacacttcctgctggtggacggcagcagcatctacctgtacagctacgagggcagattcatcagcagccccaagttccccggcatgagaaccgacatcctgaacgcccagaccgtgagcctgagcaacgacaccatcgccatcagagacaaggccgacgagaagatcatcttcctgttcgaggccagcaccggcaagcccctgggcgacggcaagttcctgagccacaagaacgagatcctggagatcgccctggaccagaagggcctgaccaacgacagaaagatcgccttcatcgacaagaacagagacctgtgcatcaccagcgtgaagagattcggcaaggaggagcagatcatcaagctgggcaccatggtgcacaccctggcctggaacgacacctgcaacatcctgtgcggcctgcaggacaccagattcatcgtgtggtactaccccaacaccgtgtacgtggacagagacatcctgcccaagaccctgtacgagagagacgccagcgagttcagcaagaacccccacatcgtgagcttcgtgggcaaccaggtgaccatcagaagagccgacggcagcctggtgcacatcagcatcaccccctaccccgccatcctgcacgagtacgtgagcagcagcaagtgggaggacgccgtgagactgtgcagattcgtgaaggagcagaccatgtgggcctgcctggccgccatggccgtggccaacagagacatgaccaccgccgagatcgcctacgccgccatcggcgagatcgacaaggtgcagtacatcaacagcatcaagaacctgcccagcaaggagagcaagatggcccacatcctgctgttcagcggcaacatccaggaggccgagatcgtgctgctgcaggccggcctggtgtaccaggccatccagatcaacatcaacctgtacaactgggagagagccctggagctggccgtgaagtacaagacccacgtggacaccgtgctggcctacagacagaagttcctggagaccttcggcaagcaggagaccaacaagagatacctgcactacgccgagggcctgcagatcgactgggagaagatcaaggccaagatcgagatggagatcaccaaggagagagagcagagcagcagcagccagagcagcaagagcatcggcctgaagccctag

SEQ ID NO: 85751 - DNA, 366 bp, synthetic construct
  misc_feature 1..366: note = Description of Artificial Sequence: Synthetic coding sequence
  source 1..366: mol_type = other DNA
atgagactgaagatcagcctgctgaaggagcccaagcaccaggagctggtgagctgcgtgggctggaccaccgccgaggagctgtacagctgcagcgacgaccaccagatcgtgaagtggaacctgctgaccagcgagaccacccagatcgtgaagctgcccgacgacatctaccccatcgacttccactggttccccaagagcctgggcgtgaagaagcagacccaggccgagagcttcgtgctgaccagcagcgacggcaagttccacctgatcagcaagctgggcagagtggagaagagcgtggaggcccactgcggcgccgtgctggccggcagatggaactacgagggcaccgccctgtag

SEQ ID NO: 85752 - DNA, 1923 bp, synthetic construct; identical to SEQ ID NO: 85750
  misc_feature 1..1923: note = Description of Artificial Sequence: Synthetic coding sequence
  source 1..1923: mol_type = other DNA

SEQ ID NO: 85753 - DNA, 540 bp, synthetic construct
  misc_feature 1..540: note = Description of Artificial Sequence: Synthetic coding sequence
  source 1..540: mol_type = other DNA
atgagactgaagatcagcctgctgaaggagcccaagcaccaggagctggtgagctgcgtgggctggaccaccgccgaggagctgtacagctgcagcgacgaccaccagatcgtgaagtggaacctgctgaccagcgagaccacccagatcgtgaagctgcccgacgacatctaccccatcgacttccactggttccccaagagcctgggcgtgaagaagcagacccaggccgagagcttcgtgctgaccagcagcgacggcaagttccacctgatcagcaagctgggcagagtggagaagagcgtggaggcccactgcggcgccgtgctggccggcagatggaactacgagggcaccgccctggtgaccgtgggcgaggacggccagatcaagatctggagcaagaccggcatgctgagaagcaccctggcccagcagggcacccccgtgtacagcgtggcctggggccccgacagcgagaaggtgctgtacaccgccggcaagcagctgatcatcaagcccctgcagcccaacgcctag

SEQ ID NO: 85754 - DNA, 1227 bp, synthetic construct
  misc_feature 1..1227: note = Description of Artificial Sequence: Synthetic coding sequence
  source 1..1227: mol_type = other DNA
atggccagcgtggccagctgcgacagcagacccagcagcgacgagctgcccggcgaccccagcagccaggaggaggacgaggactacgacttcgaggacagagtgagcgacagcggcagctacagcagcgccagcagcgactacgacgacctggagcccgagtggctggacagcgtgcagaagaacggcgagctgttctacctggagctgagcgaggacgaggaggagagcctgctgcccgagacccccaccgtgaaccacgtgagattcagcgagaacgagatcatcatcgaggacgactacaaggagagaaagaagtacgagcccaagctgaagcagttcaccaagatcctgagaagaaagagactgctgcccaagagatgcaacaagaagaacagcaacgacaacggccccgtgagcatcctgaagcaccagagcaaccagaagaccggcgtgatcgtgcagcagagatacaaggacgtgaacgtgtacgtgaaccccaagaagctgaccgtgatcaaggccaaggagcagctgaagctgctggaggtgctggtgggcatcatccaccagaccaagtggagctggagaagaaccggcaagcagggcgacggcgagagactggtggtgcacggcctgctgcccggcggcagcgccatgaagagcggccaggtgctgatcggcgacgtgctggtggccgtgaacgacgtggacgtgaccaccgagaacatcgagagagtgctgagctgcatccccggccccatgcaggtgaagctgaccttcgagaacgcctacgacgtgaagagagagaccagccaccccagacagaagaagacccagagcaacaccagcgacctggtgaagctgctgtggggcgaggaggtggagggcatccagcagagcggcctgaacaccccccacatcatcatgtacctgaccctgcagctggacagcgagaccagcaaggaggagcaggagatcctgtaccactaccccatgagcgaggccagccagaagctgaagagcgtgagaggcatcttcctgaccctgtgcgacatgctggagaacgtgaccggcacccaggtgaccagcagcagcctgctgctgaacggcaagcagatccacgtggcctactggaaggagagcgacaagctgctgctgatcggcctgcccgccgaggagatcgagctgcccagcagcgcccacacccacggcgagagaaactag

SEQ ID NO: 85755 - DNA, 2829 bp, synthetic construct
  misc_feature 1..2829: note = Description of Artificial Sequence: Synthetic coding sequence
  source 1..2829: mol_type = other DNA
atggccagcgtggccagctgcgacagcagacccagcagcgacgagctgcccggcgaccccagcagccaggaggaggacgaggactacgacttcgaggacagagtgagcgacagcggcagctacagcagcgccagcagcgactacgacgacctggagcccgagtggctggacagcgtgcagaagaacggcgagctgttctacctggagctgagcgaggacgaggaggagagcctgctgcccgagacccccaccgtgaaccacgtgagattcagcgagaacgagatcatcatcgaggacgactacaaggagagaaagaagtacgagcccaagctgaagcagttcaccaagatcctgagaagaaagagactgctgcccaagagatgcaacaagaagaacagcaacgacaacggccccgtgagcatcctgaagcaccagagcaaccagaagaccggcgtgatcgtgcagcagagatacaaggacgtgaacgtgtacgtgaaccccaagaagctgaccgtgatcaaggccaaggagcagctgaagctgctggaggtgctggtgggcatcatccaccagaccaagtggagctggagaagaaccggcaagcagggcgacggcgagagactggtggtgcacggcctgctgcccggcggcagcgccatgaagagcggccaggtgctgatcggcgacgtgctggtggccgtgaacgacgtggacgtgaccaccgagaacatcgagagagtgctgagctgcatccccggccccatgcaggtgaagctgaccttcgagaacgcctacgacgtgaagagagagaccagccaccccagacagaagaagacccagagcaacaccagcgacctggtgaagctgctgtggggcgaggaggtggagggcatccagcagagcggcctgaacaccccccacatcatcatgtacctgaccctgcagctggacagcgagaccagcaaggaggagcaggagatcctgtaccactaccccatgagcgaggccagccagaagctgaagagcgtgagaggcatcttcctgaccctgtgcgacatgctggagaacgtgaccggcacccaggtgaccagcagcagcctgctgctgaacggcaagcagatccacgtggcctactggaaggagagcgacaagctgctgctgatcggcctgcccgccgaggaggtgcccctgcccagactgagaaacatgatcgagaacgtgatccagaccctgaagttcatgtacggcagcctggacagcgccttctgccagatcgagaacgtgcccagactggaccacttcttcaacctgttcttccagagagccctgcagcccgccaagctgcacagcagcgccagccccagcgcccagcagtacgacgccagcagcgccgtgctgctggacaacctgcccggcgtgagatggctgaccctgcccctggagatcaagatggagctggacatggccctgagcgacctggaggccgccgacttcgccgagctgagcgaggactactacgacatgagaagactgtacaccatcctgggcagcagcctgttctacaagggctacctgatctgcagccacctgcccaaggacgacctgatcgacatcgccgtgtactgcagacactactgcctgctgcccctggccgccaagcagagaatcggccagctgatcatctggagagaggtgttcccccagcaccacctgagacccctggccgacagcagcaccgaggtgttccccgagcccgagggcagatacttcctgctggtggtgggcctgaagcactacatgctgtgcgtgctgctggaggccggcggctgcgccagcaaggccatcggcagccccggccccgactgcgtgtacgtggaccaggtgaagaccaccctgcaccagctggacggcgtggacagcagaatcgacgagagactggccagcagccccgtgccctgcctgagctgcgccgactggttcctgaccggcagcagagagaagaccgacagcctgaccaccagccccatcctgagcagactgcagggcaccagcaaggtggccaccagccccacctgcagaagaaccctgttcggcgactacagcctgaagaccagaaagcccagccccagctgcagcagcggcggcagcgacaacggctgcgagggcggcgaggacgacggcttcagcccccacaccacccccgacgccgtgagaaagcagagagagagccagggcagcgacggcctggaggagagcggcaccctgctgaaggtgaccaagaagaagagcaccctgcccaaccccttccacctgggcaacctgaagaaggacctgcccgagaaggagctggagatctacaacaccgtgaagctgaccagcggccccgagaacaccctgttccactacgtggccctggagaccgtgcagggcatcttcatcacccccaccctggaggaggtggcccagctgagcggcagcatccacccccagctgatcaagaacttccaccagtgctgcctgagcatcagagccgtgttccagcagaccctggtggaggagaagaagaagggcctgaacagcggcgaccacagcgacagcgccaagagcgtgagcagcctgaaccccgtgaaggagcacggcgtgctgttcgagtgcagccccggcaactggaccgaccagaagaaggccccccccgtgatggcctactgggtggtgggcagactgttcctgcaccccaagccccaggagctgtacgtgtgcttccacgacagcgtgaccgagatcgccatcgagatcgccttcaagctgttcttcggcctgaccctgtag

SEQ ID NO: 85756 - DNA, 2688 bp, synthetic construct
  misc_feature 1..2688: note = Description of Artificial Sequence: Synthetic coding sequence
  source 1..2688: mol_type = other DNA
atgaacaagagcgagaacctgctgttcgccggcagcagcctggccagccaggtgcacgccgccgccgtgaacggcgacaagggcgccctgcagagactgatcgtgggcaacagcgccctgaaggacaaggaggaccagttcggcagaacccccctgatgtactgcgtgctggccgacagactggactgcgccgacgccctgctgaaggccggcgccgacgtgaacaagaccgaccacagccagagaaccgccctgcacctggccgcccagaagggcaactacagattcatgaagctgctgctgaccagaagagccaactggatgcagaaggacctggaggagatgacccccctgcacctgaccaccagacacagaagccccaagtgcctggccctgctgctgaagttcatggcccccggcgaggtggacacccaggacaagaacaagcagaccgccctgcactggagcgcctactacaacaaccccgagcacgtgaagctgctgatcaagcacgacagcaacatcggcatccccgacgtggagggcaagatccccctgcactgggccgccaaccacaaggaccccagcgccgtgcacaccgtgagatgcatcctggacgccgcccccaccgagagcctgctgaactggcaggactacgagggcagaacccccctgcacttcgccgtggccgacggcaacgtgaccgtggtggacgtgctgaccagctacgagagctgcaacatcaccagctacgacaacctgttcagaacccccctgcactgggccgccctgctgggccacgcccagatcgtgcacctgctgctggagagaaacaagagcggcaccatccccagcgacagccagggcgccacccccctgcactacgccgcccagagcaacttcgccgagaccgtgaaggtgttcctgaagcaccccagcgtgaaggacgacagcgacctggagggcagaaccagcttcatgtgggccgccggcaagggcagcgacgacgtgctgagaaccatgctgagcctgaagagcgacatcgacatcaacatggccgacaagtacggcggcaccgccctgcacgccgccgccctgagcggccacgtgagcaccgtgaagctgctgctggagaacaacgcccaggtggacgccaccgacgtgatgaagcacacccccctgttcagagcctgcgagatgggccacaaggacgtgatccagaccctgatcaagggcggcgccagagtggacctggtggaccaggacggccacagcctgctgcactgggccgccctgggcggcaacgccgacgtgtgccagatcctgatcgagaacaagatcaaccccaacgtgcaggactacgccggcagaacccccctgcagtgcgccgcctacggcggctacatcaactgcatggccgtgctgatggagaacaacgccgaccccaacatccaggacaaggagggcagaaccgccctgcactggagctgcaacaacggctacctggacgccatcaagctgctgctggacttcgccgccttccccaaccagatggagaacaacgaggagagatacacccccctggactacgccctgctgggcgagagacacgaggtgatccagttcatgctggagcacggcgccctgagcatcgccgccatccaggacatcgccgccttcaagatccaggccgtgtacaagggctacaaggtgagaaaggccttcagagacagaaagaacctgctgatgaagcacgagcagctgagaaaggacgccgccgccaagaagagagaggaggagaacaagagaaaggaggccgagcagcagaagggcagaagaagccccgacagctgcagaccccaggccctgccctgcctgcccagcacccaggacgtgcccagcagacagagcagagcccccagcaagcagccccccgccggcaacgtggcccagggccccgagcccagagacagcagaggcagccccggcggcagcctgggcggcgccctgcagaaggagcagcacgtgagcagcgacctgcagggcaccaacagcagaagacccaacgagaccgccagagagcacagcaagggccagagcgcctgcgtgcacttcagacccaacgagggcagcgacggcagcagacaccccggcgtgcccagcgtggagaagagcagagagctgagactgcagatcatccagagagagagaagaagaaaggagctgttcagaaagaagaacaaggccgccgccgtgatccagagagcctggagaagctaccagctgagaaagcacctgagccacctgagacacatgaagcagctgggcgccggcgacgtggacagatggagacaggagagcaccgccctgctgctgcaggtgtggagaaaggagctggagctgaagttcccccagaccaccgccgtgagcaaggcccccaagagccccagcaagggcaccagcggcaccaagagcaccaagcacagcgtgctgaagcagatctacggctgcagccacgagggcaagatccaccaccccaccagaagcgtgaaggccagcagcgtgctgagactgaacagcgtgagcaacctgcagtgcatccacctgctggagaacagcggcagaagcaagaacttcagctacaacctgcagagcgccacccagcccaagaacaagaccaagccctag

SEQ ID NO: 85757 - DNA, 3198 bp, synthetic construct
  misc_feature 1..3198: note = Description of Artificial Sequence: Synthetic coding sequence
  source 1..3198: mol_type = other DNA
atgaacaagagcgagaacctgctgttcgccggcagcagcctggccagccaggtgcacgccgccgccgtgaacggcgacaagggcgccctgcagagactgatcgtgggcaacagcgccctgaaggacaaggaggaccagttcggcagaacccccctgatgtactgcgtgctggccgacagactggactgcgccgacgccctgctgaaggccggcgccgacgtgaacaagaccgaccacagccagagaaccgccctgcacctggccgcccagaagggcaactacagattcatgaagctgctgctgaccagaagagccaactggatgcagaaggacctggaggagatgacccccctgcacctgaccaccagacacagaagccccaagtgcctggccctgctgctgaagttcatggcccccggcgaggtggacacccaggacaagaacaagcagaccgccctgcactggagcgcctactacaacaaccccgagcacgtgaagctgctgatcaagcacgacagcaacatcggcatccccgacgtggagggcaagatccccctgcactgggccgccaaccacaaggaccccagcgccgtgcacaccgtgagatgcatcctggacgccgcccccaccgagagcctgctgaactggcaggactacgagggcagaacccccctgcacttcgccgtggccgacggcaacgtgaccgtggtggacgtgctgaccagctacgagagctgcaacatcaccagctacgacaacctgttcagaacccccctgcactgggccgccctgctgggccacgcccagatcgtgcacctgctgctggagagaaacaagagcggcaccatccccagcgacagccagggcgccacccccctgcactacgccgcccagagcaacttcgccgagaccgtgaaggtgttcctgaagcaccccagcgtgaaggacgacagcgacctggagggcagaaccagcttcatgtgggccgccggcaagggcagcgacgacgtgctgagaaccatgctgagcctgaagagcgacatcgacatcaacatggccgacaagtacggcggcaccgccctgcacgccgccgccctgagcggccacgtgagcaccgtgaagctgctgctggagaacaacgcccaggtggacgccaccgacgtgatgaagcacacccccctgttcagagcctgcgagatgggccacaaggacgtgatccagaccctgatcaagggcggcgccagagtggacctggtggaccaggacggccacagcctgctgcactgggccgccctgggcggcaacgccgacgtgtgccagatcctgatcgagaacaagatcaaccccaacgtgcaggactacgccggcagaacccccctgcagtgcgccgcctacggcggctacatcaactgcatggccgtgctgatggagaacaacgccgaccccaacatccaggacaaggagggcagaaccgccctgcactggagctgcaacaacggctacctggacgccatcaagctgctgctggacttcgccgccttccccaaccagatggagaacaacgaggagagatacacccccctggactacgccctgctgggcgagagacacgaggtgatccagttcatgctggagcacggcgccctgagcatcgccgccatccaggacatcgccgccttcaagatccaggccgtgtacaagggctacaaggtgagaaaggccttcagagacagaaagaacctgctgatgaagcacgagcagctgagaaaggacgccgccgccaagaagagagaggaggagaacaagagaaaggaggccgagcagcagaagggcagaagaagccccgacagctgcagaccccaggccctgccctgcctgcccagcacccaggacgtgcccagcagacagagcagagcccccagcaagcagccccccgccggcaacgtggcccagggccccgagcccagagacagcagaggcagccccggcggcagcctgggcggcgccctgcagaaggagcagcacgtgagcagcgacctgcagggcaccaacagcagaagacccaacgagaccgccagagagcacagcaagggccagagcgcctgcgtgcacttcagacccaacgagggcagcgacggcagcagacaccccggcgtgcccagcgtggagaagagcagaggcgagaccgccggcgacgagagatgcgccaagggcaagggcttcgtgaagcagcccagctgcatcagagtggccggccccgacgagaagggcgaggacagcagaagagccgccgccagcctgcccccccacgacagccactggaagcccagcagaagacacgacaccgagcccaaggccaagtgcgccccccagaagagaagaacccaggagctgagaggcggcagatgcagccccgccggcagcagcagacccggcagcgccagaggcgaggccgtgcacgccggccagaaccccccccaccacagaacccccagaaacaaggtgacccaggccaagctgaccggcggcctgtacagccacctgccccagagcaccgaggagctgagaagcggcgccagaagactggagaccagcaccctgagcgaggacttccaggtgagcaaggagaccgaccccgcccccggccccctgagcggccagagcgtgaacatcgacctgctgcccgtggagctgagactgcagatcatccagagagagagaagaagaaaggagctgttcagaaagaagaacaaggccgccgccgtgatccagagagcctggagaagctaccagctgagaaagcacctgagccacctgagacacatgaagcagctgggcgccggcgacgtggacagatggagacaggagagcaccgccctgctgctgcaggtgtggagaaaggagctggagctgaagttcccccagaccaccgccgtgagcaaggcccccaagagccccagcaagggcaccagcggcaccaagagcaccaagcacagcgtgctgaagcagatctacggctgcagccacgagggcaagatccaccaccccaccagaagcgtgaaggccagcagcgtgctgagactgaacagcgtgagcaacctgcagtgcatccacctgctggagaacagcggcagaagcaagaacttcagctacaacctgcagagcgccacccagcccaagaacaagaccaagccctag

SEQ ID NO: 85758 - DNA, 306 bp, synthetic construct
  misc_feature 1..306: note = Description of Artificial Sequence: Synthetic coding sequence
  source 1..306: mol_type = other DNA
atgaacaagagcgagaacctgctgttcgccggcagcagcctggccagccaggtgcacgccgccgccgtgaacggcgacaagggcgccctgcagagactgatcgtgggcaacagcgccctgaaggacaaggaggaccagttcggcagaacccccctgatgtactgcgtgctggccgacagactggactgcgccgacgccctgctgaaggccggcgccgacgtgaacaagaccgaccacagccagagaaccgccctgcacctggccgcccagaaggccctgagaaccatcagcaccggcagaatctag

SEQ ID NO: 85759 - DNA, 2967 bp, synthetic construct
  misc_feature 1..2967: note = Description of Artificial Sequence: Synthetic coding sequence
  source 1..2967: mol_type = other DNA
atgaagctgctgctgaccagaagagccaactggatgcagaaggacctggaggagatgacccccctgcacctgaccaccagacacagaagccccaagtgcctggccctgctgctgaagttcatggcccccggcgaggtggacacccaggacaagaacaagcagaccgccctgcactggagcgcctactacaacaaccccgagcacgtgaagctgctgatcaagcacgacagcaacatcggcatccccgacgtggagggcaagatccccctgcactgggccgccaaccacaaggaccccagcgccgtgcacaccgtgagatgcatcctggacgccgcccccaccgagagcctgctgaactggcaggactacgagggcagaacccccctgcacttcgccgtggccgacggcaacgtgaccgtggtggacgtgctgaccagctacgagagctgcaacatcaccagctacgacaacctgttcagaacccccctgcactgggccgccctgctgggccacgcccagatcgtgcacctgctgctggagagaaacaagagcggcaccatccccagcgacagccagggcgccacccccctgcactacgccgcccagagcaacttcgccgagaccgtgaaggtgttcctgaagcaccccagcgtgaaggacgacagcgacctggagggcagaaccagcttcatgtgggccgccggcaagggcagcgacgacgtgctgagaaccatgctgagcctgaagagcgacatcgacatcaacatggccgacaagtacggcggcaccgccctgcacgccgccgccctgagcggccacgtgagcaccgtgaagctgctgctggagaacaacgcccaggtggacgccaccgacgtgatgaagcacacccccctgttcagagcctgcgagatgggccacaaggacgtgatccagaccctgatcaagggcggcgccagagtggacctggtggaccaggacggccacagcctgctgcactgggccgccctgggcggcaacgccgacgtgtgccagatcctgatcgagaacaagatcaaccccaacgtgcaggactacgccggcagaacccccctgcagtgcgccgcctacggcggctacatcaactgcatggccgtgctgatggagaacaacgccgaccccaacatccaggacaaggagggcagaaccgccctgcactggagctgcaacaacggctacctggacgccatcaagctgctgctggacttcgccgccttccccaaccagatggagaacaacgaggagagatacacccccctggactacgccctgctgggcgagagacacgaggtgatccagttcatgctggagcacggcgccctgagcatcgccgccatccaggacatcgccgccttcaagatccaggccgtgtacaagggctacaaggtgagaaaggccttcagagacagaaagaacctgctgatgaagcacgagcagctgagaaaggacgccgccgccaagaagagagaggaggagaacaagagaaaggaggccgagcagcagaagggcagaagaagccccgacagctgcagaccccaggccctgccctgcctgcccagcacccaggacgtgcccagcagacagagcagagcccccagcaagcagccccccgccggcaacgtggcccagggccccgagcccagagacagcagaggcagccccggcggcagcctgggcggcgccctgcagaaggagcagcacgtgagcagcgacctgcagggcaccaacagcagaagacccaacgagaccgccagagagcacagcaagggccagagcgcctgcgtgcacttcagacccaacgagggcagcgacggcagcagacaccccggcgtgcccagcgtggagaagagcagaggcgagaccgccggcgacgagagatgcgccaagggcaagggcttcgtgaagcagcccagctgcatcagagtggccggccccgacgagaagggcgaggacagcagaagagccgccgccagcctgcccccccacgacagccactggaagcccagcagaagacacgacaccgagcccaaggccaagtgcgccccccagaagagaagaacccaggagctgagaggcggcagatgcagccccgccggcagcagcagacccggcagcgccagaggcgaggccgtgcacgccggccagaaccccccccaccacagaacccccagaaacaaggtgacccaggccaagctgaccggcggcctgtacagccacctgccccagagcaccgaggagctgagaagcggcgccagaagactggagaccagcaccctgagcgaggacttccaggtgagcaaggagaccgaccccgcccccggccccctgagcggccagagcgtgaacatcgacctgctgcccgtggagctgagactgcagatcatccagagagagagaagaagaaaggagctgttcagaaagaagaacaaggccgccgccgtgatccagagagcctggagaagctaccagctgagaaagcacctgagccacctgagacacatgaagcagctgggcgccggcgacgtggacagatggagacaggagagcaccgccctgctgctgcaggtgtggagaaaggagctggagctgaagttcccccagaccaccgccgtgagcaaggcccccaagagccccagcaagggcaccagcggcaccaagagcaccaagcacagcgtgctgaagcagatctacggctgcagccacgagggcaagatccaccaccccaccagaagcgtgaaggccagcagcgtgctgagactgaacagcggcaaggccgccaccgccaagcagatggtgggcaagaacatgggcaagcacttccccctgttccacccccagagacagaagaccctggagcagatctggcccggcttcagcaacggccacctgatcagctgggactactactgcagccagcacctgagcccctag

SEQ ID NO: 85760 - DNA, 3723 bp, synthetic construct
  misc_feature 1..3723: note = Description of Artificial Sequence: Synthetic coding sequence
  source 1..3723: mol_type = other DNA
atgagcgtgaaggagggcgcccagagaaagtgggccgccctgaaggagaagctgggcccccaggacagcgaccccaccgaggccaacctggagagcgccgaccccgagctgtgcatcagactgctgcagatgcccagcgtggtgaactacagcggcctgagaaagagactggagggcagcgacggcggctggatggtgcagttcctggagcagagcggcctggacctgctgctggaggccctggccagactgagcggcagaggcgtggccagaatcagcgacgccctgctgcagctgacctgcgtgagctgcgtgagagccgtgatgaacagcagacagggcatcgagtacatcctgagcaaccagggctacgtgagacagctgagccaggccctggacaccagcaacgtgatggtgaagaagcaggtgttcgagctgctggccgccctgtgcatctacagccccgagggccacgtgctgaccctggacgccctggaccactacaagaccgtgtgcagccagcagtacagattcagcatcgtgatgaacgagctgagcggcagcgacaacgtgccctacgtggtgaccctgctgagcgtgatcaacgccgtgatcctgggccccgaggacctgagagccagaacccagctgagaaacgagttcatcggcctgcagctgctggacgtgctggccagactgagagacctggaggacgccgacctgctgatccagctggaggccttcgaggaggccaaggccgaggacgaggaggagctgctgagagtgagcggcggcgtggacatgagcagccaccaggaggtgttcgccagcctgttccacaaggtgagctgcagccccgtgagcgcccagctgctgagcgtgctgcagggcctgctgcacctggagcccaccctgagaagcagccagctgctgtgggaggccctggagagcctggtgaacagagccgtgctgctggccagcgacgcccaggagtgcaccctggaggaggtggtggagagactgctgagcgtgaagggcagacccagacccagccccctggtgaaggcccacaagagcgtgcaggccaacctggaccagagccagagaggcagcagcccccagaacaccaccacccccaagcccagcgtggagggccagcagcccgccgccgccgccgcctgcgagcccgtggaccacgcccagagcgagagcatcctgaaggtgagccagcccagagccctggagcagcaggccagcaccccccccccccccccccccccccccctgctgcccggcagcagcgccgagcccccccccccccccccccccccccccctgcccagcgtgggcgccaaggccctgcccaccgcccccccccccccccccctgcccggcctgggcgccatggccccccccgccccccccctgcccccccccctgcccggcagctgcgagttcctgccccccccccccccccccctgcccggcctgggctgcccccccccccccccccccctgctgcccggcatgggctggggccccccccccccccccccccccctgctgccctgcacctgcagcccccccgtggccggcggcatggaggaggtgatcgtggcccaggtggaccacggcctgggcagcgcctgggtgcccagccacagaagagtgaacccccccaccctgagaatgaagaagctgaactggcagaagctgcccagcaacgtggccagagagcacaacagcatgtgggccagcctgagcagccccgacgccgaggccgtggagcccgacttcagcagcatcgagagactgttcagcttccccgccgccaagcccaaggagcccaccatggtggcccccagagccagaaaggagcccaaggagatcaccttcctggacgccaagaagagcctgaacctgaacatcttcctgaagcagttcaagtgcagcaacgaggaggtggccgccatgatcagagccggcgacaccaccaagttcgacgtggaggtgctgaagcagctgctgaagctgctgcccgagaagcacgagatcgagaacctgagagccttcaccgaggagagagccaagctggccagcgccgaccacttctacctgctgctgctggccatcccctgctaccagctgagaatcgagtgcatgctgctgtgcgagggcgccgccgccgtgctggacatggtgagacccaaggcccagctggtgctggccgcctgcgagagcctgctgaccagcagacagctgcccatcttctgccagctgatcctgagaatcggcaacttcctgaactacggcagccacaccggcgacgccgacggcttcaagatcagcaccctgctgaagctgaccgagaccaagagccagcagaacagagtgaccctgctgcaccacgtgctggaggaggccgagaagagccaccccgacctgctgcagctgcccagagacctggagcagcccagccaggccgccggcatcaacctggagatcatcagaagcgaggccagcagcaacctgaagaagctgctggagaccgagagaaaggtgagcgccagcgtggccgaggtgcaggagcagtacaccgagagactgcaggccagcatcagcgccttcagagccctggacgagctgttcgaggccatcgagcagaagcagagagagctggccgactacctgtgcgaggacgcccagcagctgagcctggaggacaccttcagcaccatgaaggccttcagagacctgttcctgagagccctgaaggagaacaaggacagaaaggagcaggccgccaaggccgagagaagaaagcagcagctggccgaggaggaggccagaagacccagaggcgaggacggcaagcccgtgagaaagggccccggcaagcaggaggaggtgtgcgtgatcgacgccctgctggccgacatcagaaagggcttccagctgagaaagaccgccagaggcagaggcgacaccgacggcggcagcaaggccgccagcatggacccccccagagccaccgagcccgtggccaccagcaaccccgccggcgaccccgtgggcagcaccagatgccccgccagcgagcccggcctggacgccaccaccgccagcgagagcagaggctgggacctggtggacgccgtgacccccggcccccagcccaccctggagcagctggaggagggcggccccagacccctggagagaagaagcagctggtacgtggacgccagcgacgtgctgaccaccgaggacccccagtgcccccagcccctggagggcgcctggcccgtgaccctgggcgacgcccaggccctgaagcccctgaagttcagcagcaaccagccccccgccgccggcagcagcagacaggacgccaaggaccccaccagcctgctgggcgtgctgcaggccgaggccgacagcaccagcgagggcctggaggacgccgtgcacagcagaggcgccagaccccccgccgccggccccggcggcgacgaggacgaggacgaggaggacaccgcccccgagagcgccctggacaccagcctggacaagagcttcagcgaggacgccgtgaccgacagcagcggcagcggcaccctgcccagagccagaggcagagccagcaagggcaccggcaagagaagaaagaagagacccagcagaagccaggagggcctgagacccagacccaaggccaagtag

SEQ ID NO: 85761 - DNA, 3750 bp, synthetic construct
  misc_feature 1..3750: note = Description of Artificial Sequence: Synthetic coding sequence
  source 1..3750: mol_type = other DNA
atgagcgtgaaggagggcgcccagagaaagtgggccgccctgaaggagaagctgggcccccaggacagcgaccccaccgaggccaacctggagagcgccgaccccgagctgtgcatcagactgctgcagatgcccagcgtggtgaactacagcggcctgagaaagagactggagggcagcgacggcggctggatggtgcagttcctggagcagagcggcctggacctgctgctggaggccctggccagactgagcggcagaggcgtggccagaatcagcgacgccctgctgcagctgacctgcgtgagctgcgtgagagccgtgatgaacagcagacagggcatcgagtacatcctgagcaaccagggctacgtgagacagctgagccaggccctggacaccagcaacgtgatggtgaagaagcaggtgttcgagctgctggccgccctgtgcatctacagccccgagggccacgtgctgaccctggacgccctggaccactacaagaccgtgtgcagccagcagtacagattcagcatcgtgatgaacgagctgagcggcagcgacaacgtgccctacgtggtgaccctgctgagcgtgatcaacgccgtgatcctgggccccgaggacctgagagccagaacccagctgagaaacgagttcatcggcctgcagctgctggacgtgctggccagactgagagacctggaggacgccgacctgctgatccagctggaggccttcgaggaggccaaggccgaggacgaggaggagctgctgagagtgagcggcggcgtggacatgagcagccaccaggaggtgttcgccagcctgttccacaaggtgagctgcagccccgtgagcgcccagctgctgagcgtgctgcagggcctgctgcacctggagcccaccctgagaagcagccagctgctgtgggaggccctggagagcctggtgaacagagccgtgctgctggccagcgacgcccaggagtgcaccctggaggaggtggtggagagactgctgagcgtgaagggcagacccagacccagccccctggtgaaggcccacaagagcgtgcaggccaacctggaccagagccagagaggcagcagcccccagaacaccaccacccccaagcccagcgtggagggccagcagcccgccgccgccgccgcctgcgagcccgtggaccacgcccagagcgagagcatcctgaaggtgagccagcccagagccctggagcagcaggccagcaccccccccccccccccccccccccccctgctgcccggcagcagcgccgagcccccccccccccccccccccccccccctgcccagcgtgggcgccaaggccctgcccaccgcccccccccccccccccctgcccggcctgggcgccatggccccccccgccccccccctgcccccccccctgcccggcagctgcgagttcctgccccccccccccccccccctgcccggcctgggctgcccccccccccccccccccctgctgcccggcatgggctggggccccccccccccccccccccccctgctgccctgcacctgcagcccccccgtggccggcggcatggaggaggtgatcgtggcccaggtggaccacggcctgggcagcgcctgggtgcccagccacagaagagtgaacccccccaccctgagaatgaagaagctgaactggcagaagctgcccagcaacgtggccagagagcacaacagcatgtgggccagcctgagcagccccgacgccgaggccgtggagcccgacttcagcagcatcgagagactgttcagcttccccgccgccaagcccaaggagcccaccatggtggcccccagagccagaaaggagcccaaggagatcaccttcctggacgccaagaagagcctgaacctgaacatcttcctgaagcagttcaagtgcagcaacgaggaggtggccgccatgatcagagccggcgacaccaccaagttcgacgtggaggtgctgaagcagctgctgaagctgctgcccgagaagcacgagatcgagaacctgagagccttcaccgaggagagagccaagctggccagcgccgaccacttctacctgctgctgctggccatcccctgctaccagctgagaatcgagtgcatgctgctgtgcgagggcgccgccgccgtgctggacatggtgagacccaaggcccagctggtgctggccgcctgcgagagcctgctgaccagcagacagctgcccatcttctgccagctgatcctgagaatcggcaacttcctgaactacggcagccacaccggcgacgccgacggcttcaagatcagcaccctgctgaagctgaccgagaccaagagccagcagaacagagtgaccctgctgcaccacgtgctggaggaggccgagaagagccaccccgacctgctgcagctgcccagagacctggagcagcccagccaggccgccggcatcaacctggagatcatcagaagcgaggccagcagcaacctgaagaagctgctggagaccgagagaaaggtgagcgccagcgtggccgaggtgcaggagcagtacaccgagagactgcaggccagcatcagcgccttcagagccctggacgagctgttcgaggccatcgagcagaagcagagagagctggccgactacctgtgcgaggacgcccagcagctgagcctggaggacaccttcagcaccatgaaggccttcagagacctgttcctgagagccctgaaggagaacaaggacagaaaggagcaggccgccaaggccgagagaagaaagcagcagctggccgaggaggaggccagaagacccagaggcgaggacggcaagcccgtgagaaagggccccggcaagcaggaggaggtgtgcgtgatcgacgccctgctggccgacatcagaaagggcttccagctgagaaagaccgccagaggcagaggcgacaccgacggcggcagcaaggccgccagcatggacccccccagagccaccgagcccgtggccaccagcaaccccgccggcgaccccgtgggcagcaccagatgccccgccagcgagcccggcctggacgccaccaccgccagcgagagcagaggctgggacctggtggacgccgtgacccccggcccccagcccaccctggagcagctggaggagggcggccccagacccctggagagaagaagcagctggtacgtggacgccagcgacgtgctgaccaccgaggacccccagtgcccccagcccctggagggcgcctggcccgtgaccctgggcgacgcccaggccctgaagcccctgaagttcagcagcaaccagccccccgccgccggcagcagcagacaggacgccaaggaccccaccagcctgctgggcgtgctgcaggccgaggccgacagcaccagcgagggcctggaggacgccgtgcacagcagaggcgccagaccccccgccgccggccccggcggcgacgaggacgaggacgaggaggacaccgcccccgagagcgccctggacaccagcctggacaagagcttcagcgaggacgccgtgaccgacagcagcggcagcggcaccctgcccagagccagaggcagagccagcaagggcaccggcaagagaagaaagaagagacccagcagaagccaggaggaggtgccccccgacagcgacgacaacaagaccaagaagctgtgcgtgatccagtag

SEQ ID NO: 85762 - DNA, 705 bp, synthetic construct
  misc_feature 1..705: note = Description of Artificial Sequence: Synthetic coding sequence
  source 1..705: mol_type = other DNA
atgagcgtgaaggagggcgcccagagaaagtgggccgccctgaaggagaagctgggcccccaggacagcgaccccaccgaggccaacctggagagcgccgaccccgagctgtgcatcagactgctgcagatgcccagcgtggtgaactacagcggcctgagaaagagactggagggcagcgacggcggctggatggtgcagttcctggagcagagcggcctggacctgctgctggaggccctggccagactgagcggcagaggcgtggccagaatcagcgacgccctgctgcagctgacctgcgtgagctgcgtgagagccgtgatgaacagcagacagggcatcgagtacatcctgagcaaccagggctacgtgagacagctgagccaggccctggacaccagcaacgtgatggtgaagaagcaggtgttcgagctgctggccgccctgtgcatctacagccccgagggccacgtgctgaccctggacgccctggaccactacaagaccgtgtgcagccagcagtacagattcagcatcgtgatgaacgagctgagcggcagcgacaacgtgccctacgtggtgaccctgctgagcgtgatcaacgccgtgatcctgggccccgaggacctgagagccagaacccagctgagaaacgagttcatcggcctgcagctgctggacgtgctggccagactgagatag

SEQ ID NO: 85763 - DNA, 1758 bp, synthetic construct
  misc_feature 1..1758: note = Description of Artificial Sequence: Synthetic coding sequence
  source 1..1758: mol_type = other DNA
atgagccagcagcacaccctgcccgtgaccctgagccccgccctgagccaggagctgctgaagaccgtgcccccccccgtgaacacccaccaggagcagatgaagcagcccacccccctgccccccccctgccagaaggtgcccgtggagctgcccgtggaggtgcccagcaagcaggaggagaagcacatgaccgccgtgaagggcctgcccgagcaggagtgcgagcagcagcagaaggagccccaggagcaggagctgcagcagcagcactgggagcagcacgaggagtaccagaaggccgagaaccccgagcagcagctgaagcaggagaagacccagagagaccagcagctgaacaagcagctggaggaggagaagaagctgctggaccagcagctggaccaggagctggtgaagagagacgagcagctgggcatgaagaaggagcagctgctggagctgcccgagcagcaggagggccacctgaagcacctggagcagcaggagggccagctgaagcaccccgagcagcaggagggccagctggagctgcccgagcagcaggagggccagctggagctgcccgagcagcaggagggccagctggagctgcccgagcagcaggagggccagctggagctgcccgagcagcaggagggccagctggagctgcccgagcagcaggagggccagctggagctgccccagcagcaggagggccagctggagctgagcgagcagcaggagggccagctggagctgagcgagcagcaggagggccagctgaagcacctggagcaccaggagggccagctggaggtgcccgaggagcagatgggccagctgaagtacctggagcagcaggagggccagctgaagcacctggaccagcaggagaagcagcccgagctgcccgagcagcagatgggccagctgaagcacctggagcagcaggagggccagcccaagcacctggagcagcaggagggccagctggagcagctggaggagcaggagggccagctgaagcacctggagcagcaggagggccagctggagcacctggagcaccaggagggccagctgggcctgcccgagcagcaggtgctgcagctgaagcagctggagaagcagcagggccagcccaagcacctggaggaggaggagggccagctgaagcacctggtgcagcaggagggccagctgaagcacctggtgcagcaggagggccagctggagcagcaggagagacaggtggagcacctggagcagcaggtgggccagctgaagcacctggaggagcaggagggccagctgaagcacctggagcagcagcagggccagctggaggtgcccgagcagcaggtgggccagcccaagaacctggagcaggaggagaagcagctggagctgcccgagcagcaggagggccaggtgaagcacctggagaagcaggaggcccagctggagctgcccgagcagcaggtgggccagcccaagcacctggagcagcaggagaagcacctggagcaccccgagcagcaggacggccagctgaagcacctggagcagcaggagggccagctgaaggacctggagcagcagaagggccagctggagcagcccgtgttcgcccccgcccccggccaggtgcaggacatccagcccgccctgcccaccaagggcgaggtgctgctgcccgtggagcaccagcagcagaagcaggaggtgcagtggccccccaagcacaagtag

SEQ ID NO: 85764 - DNA, 1320 bp, synthetic construct
  misc_feature 1..1320: note = Description of Artificial Sequence: Synthetic coding sequence
  source 1..1320: mol_type = other DNA
atgaagaaggagcagctgctggagctgcccgagcagcaggagggccacctgaagcacctggagcagcaggagggccagctgaagcaccccgagcagcaggagggccagctggagctgcccgagcagcaggagggccagctggagctgcccgagcagcaggagggccagctggagctgcccgagcagcaggagggccagctggagctgcccgagcagcaggagggccagctggagctgcccgagcagcaggagggccagctggagctgccccagcagcaggagggccagctggagctgagcgagcagcaggagggccagctggagctgagcgagcagcaggagggccagctgaagcacctggagcaccaggagggccagctggaggtgcccgaggagcagatgggccagctgaagtacctggagcagcaggagggccagctgaagcacctggaccagcaggagaagcagcccgagctgcccgagcagcagatgggccagctgaagcacctggagcagcaggagggccagcccaagcacctggagcagcaggagggccagctggagcagctggaggagcaggagggccagctgaagcacctggagcagcaggagggccagctggagcacctggagcaccaggagggccagctgggcctgcccgagcagcaggtgctgcagctgaagcagctggagaagcagcagggccagcccaagcacctggaggaggaggagggccagctgaagcacctggtgcagcaggagggccagctgaagcacctggtgcagcaggagggccagctggagcagcaggagagacaggtggagcacctggagcagcaggtgggccagctgaagcacctggaggagcaggagggccagctgaagcacctggagcagcagcagggccagctggaggtgcccgagcagcaggtgggccagcccaagaacctggagcaggaggagaagcagctggagctgcccgagcagcaggagggccaggtgaagcacctggagaagcaggaggcccagctggagctgcccgagcagcaggtgggccagcccaagcacctggagcagcaggagaagcacctggagcaccccgagcagcaggacggccagctgaagcacctggagcagcaggagggccagctgaaggacctggagcagcagaagggccagctggagcagcccgtgttcgcccccgcccccggccaggtgcaggacatccagcccgccctgcccaccaagggcgaggtgctgctgcccgtggagcaccagcagcagaagcaggaggtgcagtggccccccaagcacaagtag

SEQ ID NO: 85765 - DNA, 1914 bp, synthetic construct
  misc_feature 1..1914: note = Description of Artificial Sequence: Synthetic coding sequence
  source 1..1914: mol_type = other DNA
atgggcctgctgagccagggcagccccctgagctgggaggagaccaagagacacgccgaccacgtgagaagacacggcatcctgcagttcctgcacatctaccacgccgtgaaggacagacacaaggacgtgctgaagtggggcgacgaggtggagtacatgctggtgagcttcgaccacgagaacaagaaggtgagactggtgctgagcggcgagaaggtgctggagaccctgcaggagaagggcgagagaaccaaccccaaccaccccaccctgtggagacccgagtacggcagctacatgatcgagggcacccccggccagccctacggcggcaccatgagcgagttcaacaccgtggaggccaacatgagaaagagaagaaaggaggccaccagcatcctggaggagaaccaggccctgtgcaccatcaccagcttccccagactgggctgccccggcttcaccctgcccgaggtgaagcccaaccccgtggagggcggcgccagcaagagcctgttcttccccgacgaggccatcaacaagcaccccagattcagcaccctgaccagaaacatcagacacagaagaggcgagaaggtggtgatcaacgtgcccatcttcaaggacaagaacacccccagccccttcatcgagaccttcaccgaggacgacgaggccagcagagccagcaagcccgaccacatctacatggacgccatgggcttcggcatgggcaactgctgcctgcaggtgaccttccaggcctgcagcatcagcgaggccagatacctgtacgaccagctggccaccatctgccccatcgtgatggccctgagcgccgccagccccttctacagaggctacgtgagcgacatcgactgcagatggggcgtgatcagcgccagcgtggacgacagaaccagagaggagagaggcctggagcccctgaagaacaacaactacagaatcagcaagagcagatacgacagcatcgacagctacctgagcaagtgcggcgagaagtacaacgacatcgacctgaccatcgacaaggagatctacgagcagctgctgcaggagggcatcgaccacctgctggcccagcacgtggcccacctgttcatcagagaccccctgaccctgttcgaggagaagatccacctggacgacgccaacgagagcgaccacttcgagaacatccagagcaccaactggcagaccatgagattcaagccccccccccccaacagcgacatcggctggagagtggagttcagacccatggaggtgcagctgaccgacttcgagaacagcgcctacgtggtgttcgtggtgctgctgaccagagtgatcctgagctacaagctggacttcctgatccccctgagcaaggtggacgagaacatgaaggtggcccagaagagagacgccgtgctgcagggcatgttctacttcagaaaggacatctgcaagggcggcaacgccgtggtggacggctgcggcaaggcccagaacagcaccgagctggccgccgaggagtacaccctgatgagcatcgacaccatcatcaacggcaaggagggcgtgttccccggcctgatccccatcctgaacagctacctggagaacatggaggtggacgtggacaccagatgcagcatcctgaactacctgaagctgatcaagaagagagccagcggcgagctgatgaccgtggccagatggatgagagagttcatcgccaaccaccccgactacaagcaggacagcgtgatcaccgacgagatgaactacagcctgatcctgaagtgcaaccagatcgccaacgagctgtgcgagtgccccgagctgctgggcagcgccttcagaaaggtgaagtacagcggcagcaagaccgacagcagcaactag

SEQ ID NO: 85766 - DNA, 870 bp, synthetic construct
  misc_feature 1..870: note = Description of Artificial Sequence: Synthetic coding sequence
  source 1..870: mol_type = other DNA
atgtacttcctgacccccatcctggtggccatcctgtgcatcctggtggtgtggatcttcaagaacgccgacagaagcatggagaagaagaagggcgagcccagaaccagagccgaggccagaccctgggtggacgaggacctgaaggacagcagcgacctgcaccaggccgaggaggacgccgacgagtggcaggagagcgaggagaacgtggagcacatccccttcagccacaaccactaccccgagaaggagatggtgaagagaagccaggagttctacgagctgctgaacaagagaagaagcgtgagattcatcagcaacgagcaggtgcccatggaggtgatcgacaacgtgatcagaaccgccggcaccgcccccagcggcgcccacaccgagccctggaccttcgtggtggtgaaggaccccgacgtgaagcacaagatcagaaagatcatcgaggaggaggaggagatcaactacatgaagagaatgggccacagatgggtgaccgacctgaagaagctgagaaccaactggatcaaggagtacctggacaccgcccccatcctgatcctgatcttcaagcaggtgcacggcttcgccgccaacggcaagaagaaggtgcactactacaacgagatcagcgtgagcatcgcctgcggcatcctgctggccgccctgcagaacgccggcctggtgaccgtgaccaccacccccctgaactgcggccccagactgagagtgctgctgggcagacccgcccacgagaagctgctgatgctgctgcccgtgggctaccccagcaaggaggccaccgtgcccgacctgaagagaaagcccctggaccagatcatggtgaccgtgtag

SEQ ID NO: 85767 - DNA, 813 bp, synthetic construct
  misc_feature 1..813: note = Description of Artificial Sequence: Synthetic coding sequence
  source 1..813: mol_type = other DNA
atgtacttcctgacccccatcctggtggccatcctgtgcatcctggtggtgtggatcttcaagaacgccgacagaagcatggagaagaagaagggcgagcccagaaccagagccgaggccagaccctgggtggacgaggacctgaaggacagcagcgacctgcaccaggccgaggaggacgccgacgagtggcaggagagcgaggagaacgtggagcacatccccttcagccacaaccactaccccgagaaggagatggtgaagagaagccaggagttctacgagctgctgaacaagagaagaagcgtgagattcatcagcaacgagcaggtgcccatggaggtgatcgacaacgtgatcagaaccgccggcaccgcccccagcggcgcccacaccgagccctggaccttcgtggtggtgaaggaccccgacgtgaagcacaagatcagaaagatcatcgaggaggaggaggagatcaactacatgaagagaatgggccacagatgggtgaccgacctgaagaagctgagaaccaactggatcaaggagtacctggacaccgcccccatcctgatcctgatcttcaagcaggtgcacggcttcgccgccaacggcaagaagaaggtgcactactacaacgagatcagcgtgagcatcgcctgcggcatcctgctggccgccctgcaggtgaacaacggcatcaccatgagacaccagaccgccagacacagacacctgatcgagggccccggcagaagcagcgaggcctgcagcaagctgagcagccagggctgccccggcttctactgctag

SEQ ID NO: 85768 - DNA, 744 bp, synthetic construct
  misc_feature 1..744: note = Description of Artificial Sequence: Synthetic coding sequence
  source 1..744: mol_type = other DNA
atgtacttcctgacccccatcctggtggccatcctgtgcatcctggtggtgtggatcttcaagaacgccgacagaagcatggagaagaagaagggcgagcccagaaccagagccgaggccagaccctgggtggacgaggacctgaaggacagcagcgacctgcaccaggccgaggaggacgccgacgagtggcaggagagcgaggagaacgtggagcacatccccttcagccacaaccactaccccgagaaggagatggtgaagagaagccaggagttctacgagctgctgaacaagagaagaagcgtgagattcatcagcaacgagcaggtgcccatggaggtgatcgacaacgtgatcagaaccgccggcaccgcccccagcggcgcccacaccgagccctggaccttcgtggtggtgaaggaccccgacgtgaagcacaagatcagaaagatcatcgaggaggaggaggagatcaactacatgaagagaatgggccacagatgggtgaccgacctgaagaagctgagaaccaactggatcaaggagtacctggacaccgcccccatcctgatcctgatcttcaagcaggtgcacggcttcgccgccaacggcaagaagaaggtgcactactacaacgagatcagcgtgagcatcgcctgcggcatcctgctggccgccctgcaggtgttcggcaagatcatcctgaaggagctggccctgatcagcttcctgaacctgtag

SEQ ID NO: 85769 - DNA, 855 bp, synthetic construct
  misc_feature 1..855: note = Description of Artificial Sequence: Synthetic coding sequence
  source 1..855: mol_type = other DNA
atgtacttcctgacccccatcctggtggccatcctgtgcatcctggtggtgtggatcttcaagaacgccgacagaagcatggagaagaagaagggcgagcccagaaccagagccgaggccagaccctgggtggacgaggacctgaaggacagcagcgacctgcaccaggccgaggaggacgccgacgagtggcaggagagcgaggagaacgtggagcacatccccttcagccacaaccactaccccgagaaggagatggtgaagagaagccaggagttctacgagctgctgaacaagagaagaagcgtgagattcatcagcaacgagcaggtgcccatggaggtgatcgacaacgtgatcagaaccgccggcaccgcccccagcggcgcccacaccgagccctggaccttcgtggtggtgaaggaccccgacgtgaagcacaagatcagaaagatcatcgaggaggaggaggagatcaactacatgaagagaatgggccacagatgggtgaccgacctgaagaagctgagaaccaactggatcaaggagtacctggacaccgcccccatcctgatcctgatcttcaagcaggtgcacggcttcgccgccaacggcaagaagaaggtgcactactacaacgagatcagcgtgagcatcgcctgcggcatcctgctggccgccctgcaggtgaacaacggcatcaccatgagacaccagaccgccagacacagacacctgatcgagggccccggcagaagcagcgaggcctgcagcaagctgagcagccagggctgccccggcgccagcgccgccggcagcctgttccacttcgccatcgagttcgccgccccctag

SEQ ID NO: 85770 - DNA, 2850 bp, synthetic construct
  misc_feature 1..2850: note = Description of Artificial Sequence: Synthetic coding sequence
  source 1..2850: mol_type = other DNA
atggagccccccggcagaagcagcagaagcaccgccagccacaccctgcaccagtactgctgccccacccaggtgctggacagcatgaagctgacccccagcggcagactggccgagagcagcgtggagggcgacgcccccggcagcgacctgagcaccgccgtggacagccccggcagccagcccccctacagactgagccagctgccccccagcagcagccacatgggcggcccccccgccggcgtgggcctgccctgggcccagagagccagactgcagcccgccagcgtggccctgagaaagcaggaggaggaggagatcaagagaagcaaggccctgagcgacagctacgagctgagcaccgacctgcaggacaagaaggtggagatgctggagagaaagtacggcggcagcttcctgagcagaagagccgccagaaccatccagaccgccttcagacagtacagaatgaacaagaacttcgagagactgagaagcagcgccagcgagagcagaatgagcagaagaatcatcctgagcaacatgagaatgcagttcagcttcgaggagtacgagaaggcccagaaccccgcctacttcgagggcaagcccgccagcctggacgagggcgccatggccggcgccagaagccacagactggagagaggcctgccctacggcggcagctgcggcggcggcatcgacggcggcggcagcagcgtgaccaccagcggcgagttcagcaacgacatcaccgagctggaggacagcttcagcaagcaggtgaagagcctggccgagagcatcgacgaggccctgaactgccaccccagcggccccatgagcgaggagcccggcagcgcccagctggagaagagagagagcaaggagcagcaggaggacagcagcgccaccagcttcagcgacctgcccctgtacctggacgacaccgtgccccagcagagccccgagagactgcccagcaccgagccccccccccagggcagacccgagttctgggcccccgcccccctgccccccgtgcccccccccgtgcccagcggcaccagagaggacggcagcagagaggagggcaccagaagaggccccggctgcctggagtgcagagacttcagactgagagccgcccacctgcccctgctgaccatcgagccccccagcgacagcagcgtggacctgagcgacagaagcgacagaggcagcgtgcacagacagctggtgtacgaggccgacggctgcagcccccacggcaccctgaagcacaagggcccccccggcagagcccccatcccccacagacactaccccgcccccgagggccccgcccccgccccccccggccccctgccccccgcccccaacagcggcaccggccccagcggcgtggccggcggcagaagactgggcaagtgcgaggccgccggcgagaacagcgacggcggcgacaacgagagcctggagagcagcagcaacagcaacgagaccatcaactgcagcagcggcagcagcagcagagacagcctgagagagccccccgccaccggcctgtgcaagcagacctaccagagagagaccagacacagctgggacagccccgccttcaacaacgacgtggtgcagagaagacactacagaatcggcctgaacctgttcaacaagaagcccgagaagggcatccagtacctgatcgagagaggcttcctgagcgacacccccgtgggcgtggcccacttcatcctggagagaaagggcctgagcagacagatgatcggcgagttcctgggcaacagacagaagcagttcaacagagacgtgctggactgcgtggtggacgagatggacttcagcagcatggacctggacgacgccctgagaaagttccagagccacatcagagtgcagggcgaggcccagaaggtggagagactgatcgaggccttcagccagagatactgcgtgtgcaaccccgccctggtgagacagttcagaaaccccgacaccatcttcatcctggccttcgccatcatcctgctgaacaccgacatgtacagccccagcgtgaaggccgagagaaagatgaagctggacgacttcatcaagaacctgagaggcgtggacaacggcgaggacatccccagagacctgctggtgggcatctaccagagaatccagggcagagagctgagaaccaacgacgaccacgtgagccaggtgcaggccgtggagagaatgatcgtgggcaagaagcccgtgctgagcctgccccacagaagactggtgtgctgctgccagctgtacgaggtgcccgaccccaacagaccccagagactgggcctgcaccagagagaggtgttcctgttcaacgacctgctggtggtgaccaagatcttccagaagaagaagatcctggtgacctacagcttcagacagagcttccccctggtggagatgcacatgcagctgttccagaacagctactaccagttcggcatcaagctgctgagcgccgtgcccggcggcgagagaaaggtgctgatcatcttcaacgcccccagcctgcaggacagactgagattcaccagcgacctgagagagagcatcgccgaggtgcaggagatggagaagtacagagtggagagcgagctggagaagcagaagggcatgatgagacccaacgccagccagcccggcggcgccaaggacagcgtgaacggcaccatggccagaagcagcctggaggacacctacggcgccggcgacggcctgaagagaggcgccctgagcagcagcctgagagacctgagcgacgccggcgtgtgctactag

SEQ ID NO: 85771 - DNA, 4437 bp, synthetic construct
  misc_feature 1..4437: note = Description of Artificial Sequence: Synthetic coding sequence
  source 1..4437: mol_type = other DNA
atggaggccggcagcggcccccccggcggccccggcagcgagagccccaacagagccgtggagtacctgctggagctgaacaacatcatcgagagccagcagcagctgctggagacccagagaagaagaatcgaggagctggagggccagctggaccagctgacccaggagaacagagacctgagagaggagagccagctgcacagaggcgagctgcacagagacccccacggcgccagagacagccccggcagagagagccagtaccagaacctgagagagacccagttccaccacagagagctgagagagagccagttccaccaggccgccagagacgtgggctaccccaacagagagggcgcctaccagaacagagaggccgtgtacagagacaaggagagagacgccagctaccccctgcaggacaccaccggctacaccgccagagagagagacgtggcccagtgccacctgcaccacgagaaccccgccctgggcagagagagaggcggcagagaggccggccccgcccaccccggcagagagaaggaggccggctacagcgccgccgtgggcgtgggccccagaccccccagagagagaggccagctgagcagaggcgccagcagaagcagcagccccggcgccggcggcggccacagcaccagcaccagcaccagccccgccaccaccctgcagagaaacgtggagggcgacgcccccggcagcgacctgagcaccgccgtggacagccccggcagccagcccccctacagactgagccagctgccccccagcagcagccacatgggcggcccccccgccggcgtgggcctgccctgggcccagagagccagactgcagcccgccagcgtggccctgagaaagcaggaggaggaggagatcaagagaagcaaggccctgagcgacagctacgagctgagcaccgacctgcaggacaagaaggtggagatgctggagagaaagtacggcggcagcttcctgagcagaagagccgccagaaccatccagaccgccttcagacagtacagaatgaacaagaacttcgagagactgagaagcagcgccagcgagagcagaatgagcagaagaatcatcctgagcaacatgagaatgcagttcagcttcgaggagtacgagaaggcccagaaccccgcctacttcgagggcaagcccgccagcctggacgagggcgccatggccggcgccagaagccacagactggagagaggcctgccctacggcggcagctgcggcggcggcatcgacggcggcggcagcagcgtgaccaccagcggcgagttcagcaacgacatcaccgagctggaggacagcttcagcaagcaggtgaagagcctggccgagagcatcgacgaggccctgaactgccaccccagcggccccatgagcgaggagcccggcagcgcccagctggagaagagagagagcaaggagcagcaggaggacagcagcgccaccagcttcagcgacctgcccctgtacctggacgacaccgtgccccagcagagccccgagagactgcccagcaccgagccccccccccagggcagacccgagttctgggcccccgcccccctgccccccgtgcccccccccgtgcccagcggcaccagagaggacggcagcagagaggagggcaccagaagaggccccggctgcctggagtgcagagacttcagactgagagccgcccacctgcccctgctgaccatcgagccccccagcgacagcagcgtggacctgagcgacagaagcgacagaggcagcgtgcacagacagctggtgtacgaggccgacggctgcagcccccacggcaccctgaagcacaagggcccccccggcagagcccccatcccccacagacactaccccgcccccgagggccccgcccccgccccccccggccccctgccccccgcccccaacagcggcaccggccccagcggcgtggccggcggcagaagactgggcaagtgcgaggccgccggcgagaacagcgacggcggcgacaacgagagcctggagagcagcagcaacagcaacgagaccatcaactgcagcagcggcagcagcagcagagacagcctgagagagccccccgccaccggcctgtgcaagcagacctaccagagagagaccagacacagctgggacagccccgccttcaacaacgacgtggtgcagagaagacactacagaatcggcctgaacctgttcaacaagaagcccgagaagggcatccagtacctgatcgagagaggcttcctgagcgacacccccgtgggcgtggcccacttcatcctggagagaaagggcctgagcagacagatgatcggcgagttcctgggcaacagacagaagcagttcaacagagacgtgctggactgcgtggtggacgagatggacttcagcagcatggacctggacgacgccctgagaaagttccagagccacatcagagtgcagggcgaggcccagaaggtggagagactgatcgaggccttcagccagagatactgcgtgtgcaaccccgccctggtgagacagttcagaaaccccgacaccatcttcatcctggccttcgccatcatcctgctgaacaccgacatgtacagccccagcgtgaaggccgagagaaagatgaagctggacgacttcatcaagaacctgagaggcgtggacaacggcgaggacatccccagagacctgctggtgggcatctaccagagaatccagggcagagagctgagaaccaacgacgaccacgtgagccaggtgcaggccgtggagagaatgatcgtgggcaagaagcccgtgctgagcctgccccacagaagactggtgtgctgctgccagctgtacgaggtgcccgaccccaacagaccccagagactgggcctgcaccagagagaggtgttcctgttcaacgacctgctggtggtgaccaagatcttccagaagaagaagatcctggtgacctacagcttcagacagagcttccccctggtggagatgcacatgcagctgttccagaacagctactaccagttcggcatcaagctgctgagcgccgtgcccggcggcgagagaaaggtgctgatcatcttcaacgcccccagcctgcaggacagactgagattcaccagcgacctgagagagagcatcgccgaggtgcaggagatggagaagtacagagtggagagcgagctggagaagcagaagggcatgatgagacccaacgccagccagcccggcggcgccaaggacagcgtgaacggcaccatggccagaagcagcctggaggacacctacggcgccggcgacggcctgaagagaggcgccctgagcagcagcctgagagacctgagcgacgccggcaagagaggcagaagaaacagcgtgggcagcctggacagcaccatcgagggcagcgtgatcagcagccccagaccccaccagagaatgcccccccccccccccccccccccccccgaggagtacaagagccagagacccgtgagcaacagcagcagcttcctgggcagcctgttcggcagcaagagaggcaagggccccttccagatgccccccccccccaccggccaggccagcgccagcagcagcagcgccagcagcacccaccaccaccaccaccaccaccaccacggccacagccacggcggcctgggcgtgctgcccgacggccagagcaagctgcaggccctgcacgcccagtactgccagggccccggccccgccccccccccctacctgcccccccagcagcccagcctgcccccccccccccagcagcccccccccctgccccagctgggcagcatcccccccccccccgccagcgccccccccgtgggcccccacagacacttccacgcccacggccccgtgcccggcccccagcactacaccctgggcagacccggcagagcccccagaagaggcgccggcggccacccccagttcgccccccacggcagacaccccctgcaccagcccaccagccccctgcccctgtacagccccgccccccagcacccccccgcccacaagcagggccccaagcacttcatcttcagccaccacccccagatgatgcccgccgccggcgccgccggcggccccggcagcagaccccccggcggcagctacagccacccccaccacccccagagccccctgagcccccacagccccatccccccccaccccagctacccccccctgcccccccccagcccccacaccccccacagccccctgccccccaccagcccccacggccccctgcacgccagcggcccccccggcaccgccaacccccccagcgccaaccccaaggccaagcccagcagaatcagcaccgtggtgtag

SEQ ID NO: 85772 - DNA, 4467 bp, synthetic construct
  misc_feature 1..4467: note = Description of Artificial Sequence: Synthetic coding sequence
  source 1..4467: mol_type = other DNA
atggaggccggcagcggcccccccggcggccccggcagcgagagccccaacagagccgtggagtacctgctggagctgaacaacatcatcgagagccagcagcagctgctggagacccagagaagaagaatcgaggagctggagggccagctggaccagctgacccaggagaacagagacctgagagaggagagccagctgcacagaggcgagctgcacagagacccccacggcgccagagacagccccggcagagagagccagtaccagaacctgagagagacccagttccaccacagagagctgagagagagccagttccaccaggccgccagagacgtgggctaccccaacagagagggcgcctaccagaacagagaggccgtgtacagagacaaggagagagacgccagctaccccctgcaggacaccaccggctacaccgccagagagagagacgtggcccagtgccacctgcaccacgagaaccccgccctgggcagagagagaggcggcagagaggccggccccgcccaccccggcagagagaaggaggccggctacagcgccgccgtgggcgtgggccccagaccccccagagagagaggccagctgagcagaggcgccagcagaagcagcagccccggcgccggcggcggccacagcaccagcaccagcaccagccccgccaccaccctgcagagaaagagcgacggcgagaacagcagaaccgtgagcgtggagggcgacgcccccggcagcgacctgagcaccgccgtggacagccccggcagccagcccccctacagactgagccagctgccccccagcagcagccacatgggcggcccccccgccggcgtgggcctgccctgggcccagagagccagactgcagcccgccagcgtggccctgagaaagcaggaggaggaggagatcaagagaagcaaggccctgagcgacagctacgagctgagcaccgacctgcaggacaagaaggtggagatgctggagagaaagtacggcggcagcttcctgagcagaagagccgccagaaccatccagaccgccttcagacagtacagaatgaacaagaacttcgagagactgagaagcagcgccagcgagagcagaatgagcagaagaatcatcctgagcaacatgagaatgcagttcagcttcgaggagtacgagaaggcccagaaccccgcctacttcgagggcaagcccgccagcctggacgagggcgccatggccggcgccagaagccacagactggagagaggcctgccctacggcggcagctgcggcggcggcatcgacggcggcggcagcagcgtgaccaccagcggcgagttcagcaacgacatcaccgagctggaggacagcttcagcaagcaggtgaagagcctggccgagagcatcgacgaggccctgaactgccaccccagcggccccatgagcgaggagcccggcagcgcccagctggagaagagagagagcaaggagcagcaggaggacagcagcgccaccagcttcagcgacctgcccctgtacctggacgacaccgtgccccagcagagccccgagagactgcccagcaccgagccccccccccagggcagacccgagttctgggcccccgcccccctgccccccgtgcccccccccgtgcccagcggcaccagagaggacggcagcagagaggagggcaccagaagaggccccggctgcctggagtgcagagacttcagactgagagccgcccacctgcccctgctgaccatcgagccccccagcgacagcagcgtggacctgagcgacagaagcgacagaggcagcgtgcacagacagctggtgtacgaggccgacggctgcagcccccacggcaccctgaagcacaagggcccccccggcagagcccccatcccccacagacactaccccgcccccgagggccccgcccccgccccccccggccccctgccccccgcccccaacagcggcaccggccccagcggcgtggccggcggcagaagactgggcaagtgcgaggccgccggcgagaacagcgacggcggcgacaacgagagcctggagagcagcagcaacagcaacgagaccatcaactgcagcagcggcagcagcagcagagacagcctgagagagccccccgccaccggcctgtgcaagcagacctaccagagagagaccagacacagctgggacagccccgccttcaacaacgacgtggtgcagagaagacactacagaatcggcctgaacctgttcaacaagaagcccgagaagggcatccagtacctgatcgagagaggcttcctgagcgacacccccgtgggcgtggcccacttcatcctggagagaaagggcctgagcagacagatgatcggcgagttcctgggcaacagacagaagcagttcaacagagacgtgctggactgcgtggtggacgagatggacttcagcagcatggacctggacgacgccctgagaaagttccagagccacatcagagtgcagggcgaggcccagaaggtggagagactgatcgaggccttcagccagagatactgcgtgtgcaaccccgccctggtgagacagttcagaaaccccgacaccatcttcatcctggccttcgccatcatcctgctgaacaccgacatgtacagccccagcgtgaaggccgagagaaagatgaagctggacgacttcatcaagaacctgagaggcgtggacaacggcgaggacatccccagagacctgctggtgggcatctaccagagaatccagggcagagagctgagaaccaacgacgaccacgtgagccaggtgcaggccgtggagagaatgatcgtgggcaagaagcccgtgctgagcctgccccacagaagactggtgtgctgctgccagctgtacgaggtgcccgaccccaacagaccccagagactgggcctgcaccagagagaggtgttcctgttcaacgacctgctggtggtgaccaagatcttccagaagaagaagatcctggtgacctacagcttcagacagagcttccccctggtggagatgcacatgcagctgttccagaacagctactaccagttcggcatcaagctgctgagcgccgtgcccggcggcgagagaaaggtgctgatcatcttcaacgcccccagcctgcaggacagactgagattcaccagcgacctgagagagagcatcgccgaggtgcaggagatggagaagtacagagtggagagcgagctggagaagcagaagggcatgatgagacccaacgccagccagcccggcggcgccaaggacagcgtgaacggcaccatggccagaagcagcctggaggacacctacggcgccggcgacggcctgaagagaggcgccctgagcagcagcctgagagacctgagcgacgccggcaagagaggcagaagaaacagcgtgggcagcctggacagcaccatcgagggcagcgtgatcagcagccccagaccccaccagagaatgcccccccccccccccccccccccccccgaggagtacaagagccagagacccgtgagcaacagcagcagcttcctgggcagcctgttcggcagcaagagaggcaagggccccttccagatgccccccccccccaccggccaggccagcgccagcagcagcagcgccagcagcacccaccaccaccaccaccaccaccaccacggccacagccacggcggcctgggcgtgctgcccgacggccagagcaagctgcaggccctgcacgcccagtactgccagggccccggccccgccccccccccctacctgcccccccagcagcccagcctgcccccccccccccagcagcccccccccctgccccagctgggcagcatcccccccccccccgccagcgccccccccgtgggcccccacagacacttccacgcccacggccccgtgcccggcccccagcactacaccctgggcagacccggcagagcccccagaagaggcgccggcggccacccccagttcgccccccacggcagacaccccctgcaccagcccaccagccccctgcccctgtacagccccgccccccagcacccccccgcccacaagcagggccccaagcacttcatcttcagccaccacccccagatgatgcccgccgccggcgccgccggcggccccggcagcagaccccccggcggcagctacagccacccccaccacccccagagccccctgagcccccacagccccatccccccccaccccagctacccccccctgcccccccccagcccccacaccccccacagccccctgccccccaccagcccccacggccccctgcacgccagcggcccccccggcaccgccaacccccccagcgccaaccccaaggccaagcccagcagaatcagcaccgtggtgtag

SEQ ID NO: 85773 - DNA, 3549 bp, synthetic construct
  misc_feature 1..3549: note = Description of Artificial Sequence: Synthetic coding sequence
  source 1..3549: mol_type = other DNA
atggagagcctgctggagaaccccgtgagagccgtgctgtacctgaaggagctgaccgccatcgtgcagaaccagcagagcctgatccacacccagagagagagaatcgacgagctggagagaagactggacgagctgagcgccgagaacagaagcctgtgggagcaccagcagctgctgcaggcccagcccccccccggcctggtgccccccagcagcgcccccctgcccgccgcccccgccaccgcccccgccgccgccgccagagcccaggagcccctgcaggaccagggccagagaagcgccgccgccccccaccccgcccccgacagaccccccagacagcaccacggccagctgctggagcagccccagagaggccccggcagcagagcccacaccccccagagcccccacaagcacctgggcacccagggcgccgtgaccgacaaggagaaggagagaccccccagctgctgcgccgccgccggcgccctgctgcagcacaagagccccagcgccctgggcaagggcgtgctgagcagaagacccgagaacgagaccgtgctgcaccagttctgctgccccgccgccgacgcctgcagcgacctggccagccagagcgacggcagctgcacccaggccggcggcggcatggaggacagcgtggtggccgccgccgccgtggccgccggcagacccagcgcccacgcccccaaggcccaggcccaggagctgcaggaggaggaggagagacccggcgccggcgccgccagccccagagccggcccccagcacaaggccagccccggcagacagcagcccgccctggccaccgccctgtgcccccacgcccccgccgccagcgactacgagctgagcctggacctgaagaacaagcagatcgagatgctggagcacaagtacggcggccacctggtgagcagaagagccgcctgcaccatccagaccgccttcagacagtaccagctgagcaagaacttcgagaagatcagaaacagcctgctggagagcagactgcccagaagaatcagcctgagaaaggtgagaagccccaccgccgagagcctggccgccgagaaggccctgatggagggctacggcctggtgggcctgcccctggtgagaagccccagcctgccccccaccttcgccggcaccctgaccgagctggaggacagcttcaccgagcaggtgcagagcctggccaagagcatcgacgacgccctgagcacctggagcctgaagaccatgtgcagcctgagagagagcggcgcctaccagctgcaccaggccctgcaggccgccgccggcccccccggcctggaggccgagggcagagcccccgagagcgccggccccggccccggcgacgacgccgccgagacccccggcctgccccccgcccacagcggcaccctgatgatggccttcagagacgtgaccgtgcagatcgccaaccagaacatcagcgtgagcagcagcaccgccctgagcgtggccaactgcctgggcgcccagaccgtgcaggcccccgccgagcccgccgccggcaaggccgagcagggcgagaccagcggcagagaggcccccgaggcccccgccgtgggcagagaggacgccagcgccgaggacagctgcgccgaggccgccgccagcggcgccgccgacggcgccaccgcccccaagaccgaggaggaggaggaggaggaggagaccgccgaggtgggcagaggcgccgaggccgaggccggcgacctggagcagctgagcagcagcagcaccagcaccaagagcgccaagagcggcagcgaggccagcgccagcgccagcaaggacgccctgcaggccatgatcctgagcctgcccagataccactgcgagaaccccgccagctgcaagagccccaccctgagcaccgacaccctgagaaagagactgtacagaatcggcctgaacctgttcaacatcaaccccgacaagggcatccagttcctgatcagcagaggcttcatccccgacacccccatcggcgtggcccacttcctgctgcagagaaagggcctgagcagacagatgatcggcgagttcctgggcaacagcaagaagcagttcaacagagacgtgctggactgcgtggtggacgagatggacttcagcagcatggagctggacgaggccctgagaaagttccaggcccacatcagagtgcagggcgaggcccagaaggtggagagactgatcgaggccttcagccagagatactgcatgtgcaaccccgaggtggtgcagcagttccacaaccccgacaccatcttcatcctggccttcgccatcatcctgctgaacaccgacatgtacagccccaacatcaagcccgacagaaagatgatgctggaggacttcatcagaaacctgagaggcgtggacgacggcgccgacatccccagagagctggtggtgggcatctacgagagaatccagcagaaggagctgaagagcaacgaggaccacgtgacctacgtgaccaaggtggagaagagcatcgtgggcatgaagaccgtgctgagcgtgccccacagaagactggtgtgctgcagcagactgttcgaggtgaccgacgtgaacaagctgcagaagcaggccgcccaccagagagaggtgttcctgttcaacgacctgctggtgatcctgaagctgtgccccaagaagaagagcagcagcacctacaccttctgcaagagcgtgggcctgctgggcatgcagttccagctgttcgagaacgagtactacagccacggcatcaccctggtgacccccctgagcggcagcgagaagaagcaggtgctgcacttctgcgccctgggcagcgacgagatgcagaagttcgtggaggacctgaaggagagcatcgccgaggtgaccgagctggagcagatcagaatcgagtgggagctggagaagcagcagggcaccaagaccctgagcttcaagccctgcggcgcccagggcgacccccagagcaagcagggcagccccaccgccaagagagaggccgccctgagagagagacccgccgagagcaccgtggaggtgagcatccacaacagactgcagaccagccagcacaacagcggcctgggcgccgagagaggcgcccccgtgcccccccccgacctgcagcccagcccccccagacagcagaccccccccctgcccccccccccccccaccccccccggcaccctggtgcagtgccagcagatcgtgaaggtgatcgtgctggacaagccctgcctggccagaatggagcccctgctgagccaggccctgagctgctacaccagcagcagcagcgacagctgcggcagcacccccctgggcggccccggcagccccgtgaaggtgacccaccagccccccctgcccccccccccccccccctacaaccacccccaccagttctgcccccccggcagcctgctgcacggccacagatacagcagcggcagcagaagcctggtgtag

SEQ ID NO: 85774 - DNA, 2280 bp, synthetic construct
  misc_feature 1..2280: note = Description of Artificial Sequence: Synthetic coding sequence
  source 1..2280: mol_type = other DNA
atgctggagcacaagtacggcggccacctggtgagcagaagagccgcctgcaccatccagaccgccttcagacagtaccagctgagcaagaacttcgagaagatcagaaacagcctgctggagagcagactgcccagaagaatcagcctgagaaaggtgagaagccccaccgccgagagcctggccgccgagaaggccctgatggagggctacggcctggtgggcctgcccctggtgagaagccccagcctgccccccaccttcgccggcaccctgaccgagctggaggacagcttcaccgagcaggtgcagagcctggccaagagcatcgacgacgccctgagcacctggagcctgaagaccatgtgcagcctgagagagagcggcgcctaccagctgcaccaggccctgcaggccgccgccggcccccccggcctggaggccgagggcagagcccccgagagcgccggccccggccccggcgacgacgccgccgagacccccggcctgccccccgcccacagcggcaccctgatgatggccttcagagacgtgaccgtgcagatcgccaaccagaacatcagcgtgagcagcagcaccgccctgagcgtggccaactgcctgggcgcccagaccgtgcaggcccccgccgagcccgccgccggcaaggccgagcagggcgagaccagcggcagagaggcccccgaggcccccgccgtgggcagagaggacgccagcgccgaggacagctgcgccgaggccgccgccagcggcgccgccgacggcgccaccgcccccaagaccgaggaggaggaggaggaggaggagaccgccgaggtgggcagaggcgccgaggccgaggccggcgacctggagcagctgagcagcagcagcaccagcaccaagagcgccaagagcggcagcgaggccagcgccagcgccagcaaggacgccctgcaggccatgatcctgagcctgcccagataccactgcgagaaccccgccagctgcaagagccccaccctgagcaccgacaccctgagaaagagactgtacagaatcggcctgaacctgttcaacatcaaccccgacaagggcatccagttcctgatcagcagaggcttcatccccgacacccccatcggcgtggcccacttcctgctgcagagaaagggcctgagcagacagatgatcggcgagttcctgggcaacagcaagaagcagttcaacagagacgtgctggactgcgtggtggacgagatggacttcagcagcatggagctggacgaggccctgagaaagttccaggcccacatcagagtgcagggcgaggcccagaaggtggagagactgatcgaggccttcagccagagatactgcatgtgcaaccccgaggtggtgcagcagttccacaaccccgacaccatcttcatcctggccttcgccatcatcctgctgaacaccgacatgtacagccccaacatcaagcccgacagaaagatgatgctggaggacttcatcagaaacctgagaggcgtggacgacggcgccgacatccccagagagctggtggtgggcatctacgagagaatccagcagaaggagctgaagagcaacgaggaccacgtgacctacgtgaccaaggtggagaagagcatcgtgggcatgaagaccgtgctgagcgtgccccacagaagactggtgtgctgcagcagactgttcgaggtgaccgacgtgaacaagctgcagaagcaggccgcccaccagagagaggtgttcctgttcaacgacctgctggtgatcctgaagctgtgccccaagaagaagagcagcagcacctacaccttctgcaagagcgtgggcctgctgggcatgcagttccagctgttcgagaacgagtactacagccacggcatcaccctggtgacccccctgagcggcagcgagaagaagcaggtgctgcacttctgcgccctgggcagcgacgagatgcagaagttcgtggaggacctgaaggagagcatcgccgaggtgaccgagctggagcagatcagaatcgagtgggagctggagaagcagcagggcaccaagaccctgagcttcaagccctgcggcgcccagggcgacccccagagcaagcagggcagccccaccgccaagagagaggccgccctgagagagagacccgccgagagcaccgtggaggtgctgatcaacgccagccccgccagactgaccatcctgcccatcagcagagacaccatcaagagctactgctag

SEQ ID NO: 85775 - DNA, 3549 bp, synthetic construct; identical to SEQ ID NO: 85773
  misc_feature 1..3549: note = Description of Artificial Sequence: Synthetic coding sequence
  source 1..3549: mol_type = other DNA

SEQ ID NO: 85776 - DNA, 1797 bp, synthetic construct
  misc_feature 1..1797: note = Description of Artificial Sequence: Synthetic coding sequence
  source 1..1797: mol_type = other DNA
atgaagcccaccggcaccgaccccagaatcctgagcatcgccgccgaggtggccaagagccccgagcagaacgtgcccgtgatcctgctgaagctgaaggagatcatcaacatcacccccctgggcagcagcgagctgaagaagatcaagcaggacatctactgctacgacctgatccagtactgcctgctggtgctgagccaggactacagcagaatccagggcggctggaccaccatcagccagctgacccagatcctgagccactgctgcgtgggcctggagcccggcgaggacgccgaggagttctacaacgagctgctgcccagcgccgccgagaacttcctggtgctgggcagacagctgcagacctgcttcatcaacgccgccaaggccgaggagaaggacgagctgctgcacttcttccagatcgtgaccgacagcctgttctggctgctgggcggccacgtggagctgatccagaacgtgctgcagagcgaccacttcctgcacctgctgcaggccgacaacgtgcagatcggcagcgccgtgatgatgatgctgcagaacatcctgcagatcaacagcggcgacctgctgagaatcggcagaaaggccctgtacagcatcctggacgaggtgatcttcaagctgttcagcacccccagccccgtgatcagaagcaccgccaccaagctgctgctgctgatggccgagagccaccaggagatcctgatcctgctgagacagagcacctgctacaagggcctgagaagactgctgagcaagcaggagaccggcaccgagttcagccaggagctgagacagctggtgggcctgctgagccccatggtgtaccaggaggtggaggagcagaagctgcaccaggccgcctgcctgatccaggcctactggaagggcttccagaccagaaagagactgaagaagctgcccagcgccgtgatcgccctgcagagaagcttcagaagcaagagaagcaagatgctgctggagatcaacagacagaaggaggaggaggacctgaagctgcagctgcagctgcagagacagagagccatgagactgagcagagagctgcagctgagcatgctggagatcgtgcaccccggccaggtggagaagcactacagagagatggaggagaagagcgccctgatcatccagaagcactggagaggctacagagagagaaagaacttccaccagcagagacagagcctgatcgagtacaaggccgccgtgaccctgcagagagccgccctgaagttcctggccaagtgcagaaagaagaagaagctgttcgccccctggagaggcctgcaggagctgaccgacgccagaagagtggagctgaagaagagagtggacgactacgtgagaagacacctgggcagccccatgagcgacgtggtgagcagagagctgcacgcccaggcccaggagagactgcagcactacttcatgggcagagccctggaggagagagcccagcagcacagagaggccctgatcgcccagatcagcaccaacgtggagcagctgatgaaggcccccagcctgaaggaggccgagggcaaggagcccgagctgttcctgagcagaagcagacccgtggccgccaaggccaagcaggcccacctgaccaccctgaagcacatccaggccccctggtggaagaagctgggcgaggagagcggcgacgagatcgacgtgcccaaggacgagctgagcatcgagctggagaacctgttcatcggcggcaccaagcccccctag

SEQ ID NO: 85777 - DNA, 1398 bp, synthetic construct
  misc_feature 1..1398: note = Description of Artificial Sequence: Synthetic coding sequence
  source 1..1398: mol_type = other DNA
atgaagcccaccggcaccgaccccagaatcctgagcatcgccgccgaggtggccaagagccccgagcagaacgtgcccgtgatcctgctgaagctgaaggagatcatcaacatcacccccctgggcagcagcgagctgaagaagatcaagcaggacatctactgctacgacctgatccagtactgcctgctggtgctgagccaggactacagcagaatccagggcggctggaccaccatcagccagctgacccagatcctgagccactgctgcgtgggcctggagcccggcgaggacgccgaggagttctacaacgagctgctgcccagcgccgccgagaacttcctggtgctgggcagacagctgcagacctgcttcatcaacgccgccaaggccgaggagaaggacgagctgctgcacttcttccagatcgtgaccgacagcctgttctggctgctgggcggccacgtggagctgatccagaacgtgctgcagagcgaccacttcctgcacctgctgcaggccgacaacgtgcagatcggcagcgccgtgatgatgatgctgcagaacatcctgcagatcaacagaagcaagagaagcaagatgctgctggagatcaacagacagaaggaggaggaggacctgaagctgcagctgcagctgcagagacagagagccatgagactgagcagagagctgcagctgagcatgctggagatcgtgcaccccggccaggtggagaagcactacagagagatggaggagaagagcgccctgatcatccagaagcactggagaggctacagagagagaaagaacttccaccagcagagacagagcctgatcgagtacaaggccgccgtgaccctgcagagagccgccctgaagttcctggccaagtgcagaaagaagaagaagctgttcgccccctggagaggcctgcaggagctgaccgacgccagaagagtggagctgaagaagagagtggacgactacgtgagaagacacctgggcagccccatgagcgacgtggtgagcagagagctgcacgcccaggcccaggagagactgcagcactacttcatgggcagagccctggaggagagagcccagcagcacagagaggccctgatcgcccagatcagcaccaacgtggagcagctgatgaaggcccccagcctgaaggaggccgagggcaaggagcccgagctgttcctgagcagaagcagacccgtggccgccaaggccaagcaggcccacctgaccaccctgaagcacatccaggccccctggtggaagaagctgggcgaggagagcggcgacgagatcgacgtgcccaaggacgagctgagcatcgagctggagaacctgttcatcggcggcaccaagcccccctag

SEQ ID NO: 85778 - DNA, 264 bp, synthetic construct
  misc_feature 1..264: note = Description of Artificial Sequence: Synthetic coding sequence
  source 1..264: mol_type = other DNA
atgaagcccaccggcaccgaccccagaatcctgagcatcgccgccgaggtggccaagagccccgagcagaacgtgcccgtgatcctgctgaagctgaaggagatcatcaacatcacccccctgggcagcagcgagctgaagaagatcaagcaggacatctactgctacgacctgatccagtactgcctgctggtgctgagccaggactacagcagaatccagggcggctggaccaccatcagccagctgacccagatcctgtag

SEQ ID NO: 85779 - DNA, 1332 bp, synthetic construct
  misc_feature 1..1332: note = Description of Artificial Sequence: Synthetic coding sequence
  source 1..1332: mol_type = other DNA
atggaggaggacagcctggaggacagcaacctgccccccaaggtgtggcacagcgagatgaccgtgagcgtgaccggcgagccccccagcaccgtggaggaggagggcatccccaaggagaccgacatcgagatcatccccgagatccccgagaccctggagcccctgagcctgcccgacgtgctgagaatcagcgccgtgctggaggacaccaccgaccagctgagcatcctgaactacatcatgcccgtgcagtacgagggcagacagagcatctgcgtgaagagcagagagatgaacctggagggcaccaacctggacaagctgcccatggccagcaccatcaccaagatccccagccccctgatcaccgaggagggccccaacctgcccgagatcagacacagaggcagattcgccgtggagttcaacaagatgcaggacctggtgttcaagaagcccaccagacagaccatcatgaccaccgagaccctgaagaagatccagatcgacagacagttcttcagcgacgtgatcgccgacaccatcaaggagctgcaggacagcgccacctacaacagcctgctgcaggccctgagcaaggagagagagaacaagatgcacttctacgacatcatcgccagagaggagaagggcagaaagcagatcatcagcctgcagaagcagctgatcaacgtgaagaaggagtggcagttcgaggtgcagagccagaacgagtacatcgccaacctgaaggaccagctgcaggagatgaaggccaagagcaacctggagaacagatacatgaagaccaacaccgagctgcagatcgcccagacccagaagaagtgcaacagaaccgaggagctgctggtggaggagatcgagaagctgagaatgaagaccgaggaggaggccagaacccacaccgagatcgagatgttcctgagaaaggagcagcagaagctggaggagagactggagttctggatggagaagtacgacaaggacaccgagatgaagcagaacgagctgaacgccctgaaggccaccaaggccagcgacctggcccacctgcaggacctggccaagatgatcagagagtacgagcaggtgatcatcgaggacagaatcgagaaggagagaagcaagaagaaggtgaagcaggacctgctggagctgaagagcgtgatcaagctgcaggcctggtggagaggcaccatgatcagaagagagatcggcggcttcaagatgcccaaggacaaggtggacagcaaggacagcaagggcaagggcaagggcaaggacaagagaagaggcaagaagaagtag

SEQ ID NO: 85780 - DNA, 165 bp, synthetic construct
  misc_feature 1..165: note = Description of Artificial Sequence: Synthetic coding sequence
  source 1..165: mol_type = other DNA
atggaggaggacagcctggaggacagcaacctgccccccaaggtgtggcacagcgagatgaccgtgagcgtgaccggcgagccccccagcaccgtggaggaggagggcatccccaaggagaccgacatcgagatcatccccgagatccccgagaccctggagtag

SEQ ID NO: 85781 - DNA, 1332 bp, synthetic construct; identical to SEQ ID NO: 85779
  misc_feature 1..1332: note = Description of Artificial Sequence: Synthetic coding sequence
  source 1..1332: mol_type = other DNA

SEQ ID NO: 85782 - DNA, 4974 bp, synthetic construct
  misc_feature 1..4974: note = Description of Artificial Sequence: Synthetic coding sequence
  source 1..4974: mol_type = other DNA
atgagcgccgccgacgaggtggacggcctgggcgtggccagaccccactacggcagcgtgctggacaacgagagactgaccgccgaggagatggacgagagaagaagacagaacgtggcctacgagtacctgtgccacctggaggaggccaagagatggatggaggcctgcctgggcgaggacctgccccccaccaccgagctggaggagggcctgagaaacggcgtgtacctggccaagctgggcaacttcttcagccccaaggtggtgagcctgaagaagatctacgacagagagcagaccagatacaaggccaccggcctgcacttcagacacaccgacaacgtgatccagtggctgaacgccatggacgagatcggcctgcccaagatcttctaccccgagaccaccgacatctacgacagaaagaacatgcccagatgcatctactgcatccacgccctgagcctgtacctgttcaagctgggcctggccccccagatccaggacctgtacggcaaggtggacttcaccgaggaggagatcaacaacatgaagaccgagctggagaagtacggcatccagatgcccgccttcagcaagatcggcggcatcctggccaacgagctgagcgtggacgaggccgccctgcacgccgccgtgatcgccatcaacgaggccatcgacagaagaatccccgccgacaccttcgccgccctgaagaaccccaacgccatgctggtgaacctggaggagcccctggccagcacctaccaggacatcctgtaccaggccaagcaggacaagatgaccaacgccaagaacagaaccgagaacagcgagagagagagagacgtgtacgaggagctgctgacccaggccgagatccagggcaacatcaacaaggtgaacaccttcagcgccctggccaacatcgacctggccctggagcagggcgacgccctggccctgttcagagccctgcagagccccgccctgggcctgagaggcctgcagcagcagaacagcgactggtacctgaagcagctgctgagcgacaagcagcagaagagacagagcggccagaccgaccccctgcagaaggaggagctgcagagcggcgtggacgccgccaacagcgccgcccagcagtaccagagaagactggccgccgtggccctgatcaacgccgccatccagaagggcgtggccgagaagaccgtgctggagctgatgaaccccgaggcccagctgccccaggtgtaccccttcgccgccgacctgtaccagaaggagctggccaccctgcagagacagagccccgagcacaacctgacccaccccgagctgagcgtggccgtggagatgctgagcagcgtggccctgatcaacagagccctggagagcggcgacgtgaacaccgtgtggaagcagctgagcagcagcgtgaccggcctgaccaacatcgaggaggagaactgccagagatacctggacgagctgatgaagctgaaggcccaggcccacgccgagaacaacgagttcatcacctggaacgacatccaggcctgcgtggaccacgtgaacctggtggtgcaggaggagcacgagagaatcctggccatcggcctgatcaacgaggccctggacgagggcgacgcccagaagaccctgcaggccctgcagatccccgccgccaagctggagggcgtgctggccgaggtggcccagcactaccaggacaccctgatcagagccaagagagagaaggcccaggagatccaggacgagagcgccgtgctgtggctggacgagatccagggcggcatctggcagagcaacaaggacacccaggaggcccagaagttcgccctgggcatcttcgccatcaacgaggccgtggagagcggcgacgtgggcaagaccctgagcgccctgagaagccccgacgtgggcctgtacggcgtgatccccgagtgcggcgagacctaccacagcgacctggccgaggccaagaagaagaagctggccgtgggcgacaacaacagcaagtgggtgaagcactgggtgaagggcggctactactactaccacaacctggagacccaggagggcggctgggacgagccccccaacttcgtgcagaacagcatgcagctgagcagagaggagatccagagcagcatcagcggcgtgaccgccgcctacaacagagagcagctgtggctggccaacgagggcctgatcaccagactgcaggccagatgcagaggctacctggtgagacaggagttcagaagcagaatgaacttcctgaagaagcagatccccgccatcacctgcatccagagccagtggagaggctacaagcagaagaaggcctaccaggacagactggcctacctgagaagccacaaggacgaggtggtgaagatccagagcctggccagaatgcaccaggccagaaagagatacagagacagactgcagtacttcagagaccacatcaacgacatcatcaagatccaggccttcatcagagccaacaaggccagagacgactacaagaccctgatcaacgccgaggacccccccatggtggtggtgagaaagttcgtgcacctgctggaccagagcgaccaggacttccaggaggagctggacctgatgaagatgagagaggaggtgatcaccctgatcagaagcaaccagcagctggagaacgacctgaacctgatggacatcaagatcggcctgctggtgaagaacaagatcaccctgcaggacgtggtgagccacagcaagaagctgaccaagaagaacaaggagcagctgagcgacatgatgatgatcaacaagcagaagggcggcctgaaggccctgagcaaggagaagagagagaagctggaggcctaccagcacctgttctacctgctgcagaccaaccccacctacctggccaagctgatcttccagatgccccagaacaagagcaccaagttcatggacagcgtgatcttcaccctgtacaactacgccagcaaccagagagaggagtacctgctgctgagactgttcaagaccgccctgcaggaggagatcaagagcaaggtggaccagatccaggagatcgtgaccggcaaccccaccgtgatcaagatggtggtgagcttcaacagaggcgccagaggccagaacgccctgagacagatcctggcccccgtggtgaaggagatcatggacgacaagagcctgaacatcaagaccgaccccgtggacatctacaagagctgggtgaaccagatggagagccagaccggcgaggccagcaagctgccctacgacgtgacccccgagcaggccctggcccacgaggaggtgaagaccagactggacagcagcatcagaaacatgagagccgtgaccgacaagttcctgagcgccatcgtgagcagcgtggacaagatcccctacggcatgagattcatcgccaaggtgctgaaggacagcctgcacgagaagttccccgacgccggcgaggacgagctgctgaagatcatcggcaacctgctgtactacagatacatgaaccccgccatcgtggcccccgacgccttcgacatcatcgacctgagcgccggcggccagctgaccaccgaccagagaagaaacctgggcagcatcgccaagatgctgcagcacgccgccagcaacaagatgttcctgggcgacaacgcccacctgagcatcatcaacgagtacctgagccagagctaccagaagttcagaagattcttccagaccgcctgcgacgtgcccgagctgcaggacaagttcaacgtggacgagtacagcgacctggtgaccctgaccaagcccgtgatctacatcagcatcggcgagatcatcaacacccacaccctgctgctggaccaccaggacgccatcgcccccgagcacaacgaccccatccacgagctgctggacgacctgggcgaggtgcccaccatcgagagcctgatcggcgagagcagcggcaacctgaacgaccccaacaaggaggccctggccaagaccgaggtgagcctgaccctgaccaacaagttcgacgtgcccggcgacgagaacgccgagatggacgccagaaccatcctgctgaacaccaagagactgatcgtggacgtgatcagattccagcccggcgagaccctgaccgagatcctggagacccccgccaccagcgagcaggaggccgagcaccagagagccatgcagagaagagccatcagagacgccaagacccccgacaagatgaagaagagcaagagcgtgaaggaggacagcaacctgaccctgcaggagaagaaggagaagatccagaccggcctgaagaagctgaccgagctgggcaccgtggaccccaagaacaagtaccaggagctgatcaacgacatcgccagagacatcagaaaccagagaagatacagacagagaagaaaggccgagctggtgaagctgcagcagacctacgccgccctgaacagcaaggccaccttctacggcgagcaggtggactactacaagagctacatcaagacctgcctggacaacctggccagcaagggcaaggtgagcaagaagcccagagagatgaagggcaagaagagcaagaagatcagcctgaagtacaccgccgccagactgcacgagaagggcgtgctgctggagatcgaggacctgcaggtgaaccagttcaagaacgtgatcttcgagatcagccccaccgaggaggtgggcgacttcgaggtgaaggccaagttcatgggcgtgcagatggagaccttcatgctgcactaccaggacctgctgcagctgcagtacgagggcgtggccgtgatgaagctgttcgacagagccaaggtgaacgtgaacctgctgatcttcctgctgaacaagaagttctacggcaagtag

SEQ ID NO: 85783 - DNA, 4728 bp, synthetic construct
  misc_feature 1..4728: note = Description of Artificial Sequence: Synthetic coding sequence
  source 1..4728: mol_type = other DNA
atgccccacgaggagctgcccagcctgcagagacccagatacggcagcatcgtggacgacgagagactgagcgccgaggagatggacgagagaagaagacagaacatcgcctacgagtacctgtgccacctggaggaggccaagagatggatggaggtgtgcctggtggaggagctgccccccaccaccgagctggaggagggcctgagaaacggcgtgtacctggccaagctggccaagttcttcgcccccaagatggtgagcgagaagaagatctacgacgtggagcagaccagatacaagaagagcggcctgcacttcagacacaccgacaacaccgtgcagtggctgagagccatggagagcatcggcctgcccaagatcttctaccccgagaccaccgacgtgtacgacagaaagaacatccccagaatgatctactgcatccacgccctgagcctgtacctgttcaagctgggcatcgccccccagatccaggacctgctgggcaaggtggacttcaccgaggaggagatcagcaacatgagaaaggagctggagaagtacggcatccagatgcccagcttcagcaagatcggcggcatcctggccaacgagctgagcgtggacgaggccgccctgcacgccgccgtgatcgccatcaacgaggccgtggagaagggcatcgccgagcagaccgtggtgaccctgagaaaccccaacgccgtgctgaccctggtggacgacaacctggcccccgagtaccagaaggagctgtgggacgccaagaagaagaaggaggagaacgccagactgaagaacagctgcatcagcgaggaggagagagacgcctacgaggagctgctgacccaggccgagatccagggcaacatcaacaaggtgaacagacaggccgccgtggaccacatcaacgccgtgatccccgagggcgaccccgagaacaccctgctggccctgaagaagcccgaggcccagctgcccgccgtgtaccccttcgccgccgccatgtaccagaacgagctgttcaacctgcagaagcagaacaccatgaactacctggcccacgaggagctgctgatcgccgtggagatgctgagcgccgtggccctgctgaaccaggccctggagagcaacgacctggtgagcgtgcagaaccagctgagaagccccgccatcggcctgaacaacctggacaaggcctacgtggagagatacgccaacaccctgctgagcgtgaagctggaggtgctgagccagggccaggacaacctgagctggaacgagatccagaactgcatcgacatggtgaacgcccagatccaggaggagaacgacagagtggtggccgtgggctacatcaacgaggccatcgacgagggcaaccccctgagaaccctggagaccctgctgctgcccaccgccaacatcagcgacgtggaccccgcccacgcccagcactaccaggacgtgctgtaccacgccaagagccagaagctgggcgacagcgagagcgtgagcaaggtgctgtggctggacgagatccagcaggccgtggacgacgccaacgtggacaaggacagagccaagcagtgggtgaccctggtggtggacgtgaaccagtgcctggagggcaagaagagcagcgacatcctgagcgtgctgaagagcagcaccagcaacgccaacgacatcatccccgagtgcgccgacaagtactacgacgccctggtgaaggccaaggagctgaagagcgagagagtgagcagcgacggcagctggctgaagctgaacctgcacaagaagtacgactactactacaacaccgacagcaaggagagcagctgggtgacccccgagagctgcctgtacaaggagagctggctgaccggcaaggagatcgaggacatcatcgaggaggtgaccgtgggctacatcagagagaacatctggagcgccagcgaggagctgctgctgagattccaggccaccagcagcggccccatcctgagagaggagttcgaggccagaaagagcttcctgcacgagcaggaggagaacgtggtgaagatccaggccttctggaagggctacaagcagagaaaggagtacatgcacagaagacagaccttcatcgacaacaccgacagcatcgtgaagatccagagctggttcagaatggccaccgccagaaagagctacctgagcagactgcagtacttcagagaccacaacaacgagatcgtgaagatccagagcctgctgagagccaacaaggccagagacgactacaagaccctggtgggcagcgagaacccccccctgaccgtgatcagaaagttcgtgtacctgctggaccagagcgacctggacttccaggaggagctggaggtggccagactgagagaggaggtggtgaccaagatcagagccaaccagcagctggagaaggacctgaacctgatggacatcaagatcggcctgctggtgaagaacagaatcaccctggaggacgtgatcagccacagcaagaagctgaacaagaagaagggcggcgagatggagatcctgaacaacaccgacaaccagggcatcaagagcctgagcaaggagagaagaaagaccctggagacctaccagcagctgttctacctgctgcagaccaaccccctgtacctggccaagctgatcttccagatgccccagaacaagagcaccaagttcatggacaccgtgatcttcaccctgtacaactacgccagcaaccagagagaggagtacctgctgctgaagctgttcaagaccgccctggaggaggagatcaagagcaaggtggaccaggtgcaggacatcgtgaccggcaaccccaccgtgatcaagatggtggtgagcttcaacagaggcgccagaggccagaacaccctgagacagctgctggcccccgtggtgaaggagatcatcgacgacaagagcctgatcatcaacaccaaccccgtggaggtgtacaaggcctgggtgaaccagctggagacccagaccggcgaggccagcaagctgccctacgacgtgaccaccgagcaggccctgacctaccccgaggtgaagaacaagctggaggccagcatcgagaacctgagaagagtgaccgacaaggtgctgaacagcatcatcagcagcctggacctgctgccctacggcctgagatacatcgccaaggtgctgaagaacagcatccacgagaagttccccgacgccaccgaggacgagctgctgaagatcgtgggcaacctgctgtactacagatacatgaaccccgccatcgtggcccccgacggcttcgacatcatcgacatgaccgccggcggccagatcaacagcgaccagagaagaaacctgggcagcgtggccaaggtgctgcagcacgccgccagcaacaagctgttcgagggcgagaacgagcacctgagcagcatgaacaactacctgagcgagacctaccaggagttcagaaagtacttcaaggaggcctgcaacgtgcccgagcccgaggagaagttcaacatggacaagtacaccgacctggtgaccgtgagcaagcccgtgatctacatcagcatcgaggagatcatcagcacccacagcctgctgctggagcaccaggacgccatcgcccccgagaagaacgacctgctgagcgagctgctgggcagcctgggcgaggtgcccaccgtggagagcttcctgggcgagggcgccgtggaccccaacgaccccaacaaggccaacaccctgagccagctgagcaagaccgagatcagcctggtgctgaccagcaagtacgacatcgaggacggcgaggccatcgacagcagaagcctgatgatcaagaccaagaagctgatcatcgacgtgatcagaaaccagcccggcaacaccctgaccgagatcctggagacccccgccaccgcccagcaggaggtggaccacgccaccgacatggtgagcagagccatgatcgacagcagaacccccgaggagatgaagcacagccagagcatgatcgaggacgcccagctgcccctggagcagaagaagagaaagatccagagaaacctgagaaccctggagcagaccggccacgtgagcagcgagaacaagtaccaggacatcctgaacgagatcgccaaggacatcagaaaccagagaatctacagaaagctgagaaaggccgagctggccaagctgcagcagaccctgaacgccctgaacaagaaggccgccttctacgaggagcagatcaactactacgacacctacatcaagacctgcctggacaacctgaagagaaagaacaccagaagaagcatcaagctggacggcaagggcgagcccaagggcgccaagagagccaagcccgtgaagtacaccgccgccaagctgcacgagaagggcgtgctgctggacatcgacgacctgcagaccaaccagttcaagaacgtgaccttcgacatcatcgccaccgaggacgtgggcatcttcgacgtgagaagcaagttcctgggcgtggagatggagaaggtgcagctgaacatccaggacctgctgcagatgcagtacgagggcgtggccgtgatgaagatgttcgacaaggtgaaggtgaacgtgaacctgctgatctacctgctgaacaagaagttctacggcaagtag

SEQ ID NO: 85784 - DNA, 3234 bp, synthetic construct
  misc_feature 1..3234: note = Description of Artificial Sequence: Synthetic coding sequence
  source 1..3234: mol_type = other DNA
atggtgaacgcccagatccaggaggagaacgacagagtggtggccgtgggctacatcaacgaggccatcgacgagggcaaccccctgagaaccctggagaccctgctgctgcccaccgccaacatcagcgacgtggaccccgcccacgcccagcactaccaggacgtgctgtaccacgccaagagccagaagctgggcgacagcgagagcgtgagcaaggtgctgtggctggacgagatccagcaggccgtggacgacgccaacgtggacaaggacagagccaagcagtgggtgaccctggtggtggacgtgaaccagtgcctggagggcaagaagagcagcgacatcctgagcgtgctgaagagcagcaccagcaacgccaacgacatcatccccgagtgcgccgacaagtactacgacgccctggtgaaggccaaggagctgaagagcgagagagtgagcagcgacggcagctggctgaagctgaacctgcacaagaagtacgactactactacaacaccgacagcaaggagagcagctgggtgacccccgagagctgcctgtacaaggagagctggctgaccggcaaggagatcgaggccttctggaagggctacaagcagagaaaggagtacatgcacagaagacagaccttcatcgacaacaccgacagcatcgtgaagatccagagctggttcagaatggccaccgccagaaagagctacctgagcagactgcagtacttcagagaccacaacaacgagatcgtgaagatccagagcctgctgagagccaacaaggccagagacgactacaagaccctggtgggcagcgagaacccccccctgaccgtgatcagaaagttcgtgtacctgctggaccagagcgacctggacttccaggaggagctggaggtggccagactgagagaggaggtggtgaccaagatcagagccaaccagcagctggagaaggacctgaacctgatggacatcaagatcggcctgctggtgaagaacagaatcaccctggaggacgtgatcagccacagcaagaagctgaacaagaagaagggcggcgagatggagatcctgaacaacaccgacaaccagggcatcaagagcctgagcaaggagagaagaaagaccctggagacctaccagcagctgttctacctgctgcagaccaaccccctgtacctggccaagctgatcttccagatgccccagaacaagagcaccaagttcatggacaccgtgatcttcaccctgtacaactacgccagcaaccagagagaggagtacctgctgctgaagctgttcaagaccgccctggaggaggagatcaagagcaaggtggaccaggtgcaggacatcgtgaccggcaaccccaccgtgatcaagatggtggtgagcttcaacagaggcgccagaggccagaacaccctgagacagctgctggcccccgtggtgaaggagatcatcgacgacaagagcctgatcatcaacaccaaccccgtggaggtgtacaaggcctgggtgaaccagctggagacccagaccggcgaggccagcaagctgccctacgacgtgaccaccgagcaggccctgacctaccccgaggtgaagaacaagctggaggccagcatcgagaacctgagaagagtgaccgacaaggtgctgaacagcatcatcagcagcctggacctgctgccctacggcctgagatacatcgccaaggtgctgaagaacagcatccacgagaagttccccgacgccaccgaggacgagctgctgaagatcgtgggcaacctgctgtactacagatacatgaaccccgccatcgtggcccccgacggcttcgacatcatcgacatgaccgccggcggccagatcaacagcgaccagagaagaaacctgggcagcgtggccaaggtgctgcagcacgccgccagcaacaagctgttcgagggcgagaacgagcacctgagcagcatgaacaactacctgagcgagacctaccaggagttcagaaagtacttcaaggaggcctgcaacgtgcccgagcccgaggagaagttcaacatggacaagtacaccgacctggtgaccgtgagcaagcccgtgatctacatcagcatcgaggagatcatcagcacccacagcctgctgctggagcaccaggacgccatcgcccccgagaagaacgacctgctgagcgagctgctgggcagcctgggcgaggtgcccaccgtggagagcttcctgggcgagggcgccgtggaccccaacgaccccaacaaggccaacaccctgagccagctgagcaagaccgagatcagcctggtgctgaccagcaagtacgacatcgaggacggcgaggccatcgacagcagaagcctgatgatcaagaccaagaagctgatcatcgacgtgatcagaaaccagcccggcaacaccctgaccgagatcctggagacccccgccaccgcccagcaggaggtggaccacgccaccgacatggtgagcagagccatgatcgacagcagaacccccgaggagatgaagcacagccagagcatgatcgaggacgcccagctgcccctggagcagaagaagagaaagatccagagaaacctgagaaccctggagcagaccggccacgtgagcagcgagaacaagtaccaggacatcctgaacgagatcgccaaggacatcagaaaccagagaatctacagaaagctgagaaaggccgagctggccaagctgcagcagaccctgaacgccctgaacaagaaggccgccttctacgaggagcagatcaactactacgacacctacatcaagacctgcctggacaacctgaagagaaagaacaccagaagaagcatcaagctggacggcaagggcgagcccaagggcgccaagagagccaagcccgtgaagtacaccgccgccaagctgcacgagaagggcgtgctgctggacatcgacgacctgcagaccaaccagttcaagaacgtgaccttcgacatcatcgccaccgaggacgtgggcatcttcgacgtgagaagcaagttcctgggcgtggagatggagaaggtgcagctgaacatccaggacctgctgcagatgcagtacgagggcgtggccgtgatgaagatgttcgacaaggtgaaggtgaacgtgaacctgctgatctacctgctgaacaagaagttctacggcaagtag

SEQ ID NO: 85785 - DNA, 3216 bp, synthetic construct
  misc_feature 1..3216: note = Description of Artificial Sequence: Synthetic coding sequence
  source 1..3216: mol_type = other DNA
atgcacagcctgcccggcgtggtggccgtgggctacatcaacgaggccatcgacgagggcaaccccctgagaaccctggagaccctgctgctgcccaccgccaacatcagcgacgtggaccccgcccacgcccagcactaccaggacgtgctgtaccacgccaagagccagaagctgggcgacagcgagagcgtgagcaaggtgctgtggctggacgagatccagcaggccgtggacgacgccaacgtggacaaggacagagccaagcagtgggtgaccctggtggtggacgtgaaccagtgcctggagggcaagaagagcagcgacatcctgagcgtgctgaagagcagcaccagcaacgccaacgacatcatccccgagtgcgccgacaagtactacgacgccctggtgaaggccaaggagctgaagagcgagagagtgagcagcgacggcagctggctgaagctgaacctgcacaagaagtacgactactactacaacaccgacagcaaggagagcagctgggtgacccccgagagctgcctgtacaaggagagctggctgaccggcaaggagatcgaggccttctggaagggctacaagcagagaaaggagtacatgcacagaagacagaccttcatcgacaacaccgacagcatcgtgaagatccagagctggttcagaatggccaccgccagaaagagctacctgagcagactgcagtacttcagagaccacaacaacgagatcgtgaagatccagagcctgctgagagccaacaaggccagagacgactacaagaccctggtgggcagcgagaacccccccctgaccgtgatcagaaagttcgtgtacctgctggaccagagcgacctggacttccaggaggagctggaggtggccagactgagagaggaggtggtgaccaagatcagagccaaccagcagctggagaaggacctgaacctgatggacatcaagatcggcctgctggtgaagaacagaatcaccctggaggacgtgatcagccacagcaagaagctgaacaagaagaagggcggcgagatggagatcctgaacaacaccgacaaccagggcatcaagagcctgagcaaggagagaagaaagaccctggagacctaccagcagctgttctacctgctgcagaccaaccccctgtacctggccaagctgatcttccagatgccccagaacaagagcaccaagttcatggacaccgtgatcttcaccctgtacaactacgccagcaaccagagagaggagtacctgctgctgaagctgttcaagaccgccctggaggaggagatcaagagcaaggtggaccaggtgcaggacatcgtgaccggcaaccccaccgtgatcaagatggtggtgagcttcaacagaggcgccagaggccagaacaccctgagacagctgctggcccccgtggtgaaggagatcatcgacgacaagagcctgatcatcaacaccaaccccgtggaggtgtacaaggcctgggtgaaccagctggagacccagaccggcgaggccagcaagctgccctacgacgtgaccaccgagcaggccctgacctaccccgaggtgaagaacaagctggaggccagcatcgagaacctgagaagagtgaccgacaaggtgctgaacagcatcatcagcagcctggacctgctgccctacggcctgagatacatcgccaaggtgctgaagaacagcatccacgagaagttccccgacgccaccgaggacgagctgctgaagatcgtgggcaacctgctgtactacagatacatgaaccccgccatcgtggcccccgacggcttcgacatcatcgacatgaccgccggcggccagatcaacagcgaccagagaagaaacctgggcagcgtggccaaggtgctgcagcacgccgccagcaacaagctgttcgagggcgagaacgagcacctgagcagcatgaacaactacctgagcgagacctaccaggagttcagaaagtacttcaaggaggcctgcaacgtgcccgagcccgaggagaagttcaacatggacaagtacaccgacctggtgaccgtgagcaagcccgtgatctacatcagcatcgaggagatcatcagcacccacagcctgctgctggagcaccaggacgccatcgcccccgagaagaacgacctgctgagcgagctgctgggcagcctgggcgaggtgcccaccgtggagagcttcctgggcgagggcgccgtggaccccaacgaccccaacaaggccaacaccctgagccagctgagcaagaccgagatcagcctggtgctgaccagcaagtacgacatcgaggacggcgaggccatcgacagcagaagcctgatgatcaagaccaagaagctgatcatcgacgtgatcagaaaccagcccggcaacaccctgaccgagatcctggagacccccgccaccgcccagcaggaggtggaccacgccaccgacatggtgagcagagccatgatcgacagcagaacccccgaggagatgaagcacagccagagcatgatcgaggacgcccagctgcccctggagcagaagaagagaaagatccagagaaacctgagaaccctggagcagaccggccacgtgagcagcgagaacaagtaccaggacatcctgaacgagatcgccaaggacatcagaaaccagagaatctacagaaagctgagaaaggccgagctggccaagctgcagcagaccctgaacgccctgaacaagaaggccgccttctacgaggagcagatcaactactacgacacctacatcaagacctgcctggacaacctgaagagaaagaacaccagaagaagcatcaagctggacggcaagggcgagcccaagggcgccaagagagccaagcccgtgaagtacaccgccgccaagctgcacgagaagggcgtgctgctggacatcgacgacctgcagaccaaccagttcaagaacgtgaccttcgacatcatcgccaccgaggacgtgggcatcttcgacgtgagaagcaagttcctgggcgtggagatggagaaggtgcagctgaacatccaggacctgctgcagatgcagtacgagggcgtggccgtgatgaagatgttcgacaaggtgaaggtgaacgtgaacctgctgatctacctgctgaacaagaagttctacggcaagtag

SEQ ID NO: 85786 - DNA, 1134 bp, synthetic construct
  misc_feature 1..1134: note = Description of Artificial Sequence: Synthetic coding sequence
  source 1..1134: mol_type = other DNA
atgggctgcttcaagggcgtggtggccgtgggctacatcaacgaggccatcgacgagggcaaccccctgagaaccctggagaccctgctgctgcccaccgccaacatcagcgacgtggaccccgcccacgcccagcactaccaggacgtgctgtaccacgccaagagccagaagctgggcgacagcgagagcgtgagcaaggtgctgtggctggacgagatccagcaggccgtggacgacgccaacgtggacaaggacagagccaagcagtgggtgaccctggtggtggacgtgaaccagtgcctggagggcaagaagagcagcgacatcctgagcgtgctgaagagcagcaccagcaacgccaacgacatcatccccgagtgcgccgacaagtactacgacgccctggtgaaggccaaggagctgaagagcgagagagtgagcagcgacggcagctggctgaagctgaacctgcacaagaagtacgactactactacaacaccgacagcaaggagagcagctgggtgacccccgagagctgcctgtacaaggagagctggctgaccggcaaggagatcgaggacatcatcgaggaggtgaccgtgggctacatcagagagaacatctggagcgccagcgaggagctgctgctgagattccaggccaccagcagcggccccatcctgagagaggagttcgaggccagaaagagcttcctgcacgagcaggaggagaacgtggtgaagatccaggccttctggaagggctacaagcagagaaaggagtacatgcacagaagacagaccttcatcgacaacaccgacagcatcgtgaagatccagagctggttcagaatggccaccgccagaaagagctacctgagcagactgcagtacttcagagaccacaacaacgagatcgtgaagatccagagcctgctgagagccaacaaggccagagacgactacaagaccctggtgggcagcgagaacccccccctgaccgtgatcagaaagttcgtgtacctgctggaccagagcgacctggacttccaggaggagctggaggtggccagactgagagaggaggtggtgaccaagatcagagccaaccagcagctggagaagacctag

SEQ ID NO: 85787 - DNA, 3084 bp, synthetic construct
  misc_feature 1..3084: note = Description of Artificial Sequence: Synthetic coding sequence
  source 1..3084: mol_type = other DNA
atggcccagaacaccgagaaccacgaccccgtgggcagcatcctgatccagatccacgaggacctgtaccagctgaaggagaagctgaccaagttcagccccgaggagaagggcgagaccctggacatccagagcctggagaccgccatcaagagaaccgaggtgggcctgagaatccacatcgagaagtacctgaacgtggtgaaccagaacgtgctgaccaccagcgtgaacgacgagagcctgtacaccccccaggccagcaagtggctgctgcccaccgtgatcgaccagaagagcttcatcttcccccaggagagcgagggcaccttctggcagccccagagacagcacagcagcagcctgcccgtgttccccagagccaagatcaaggtgagcaagctgatcaagggcagcaacatcagcagcctgaccgtgctgcccagcagccactgcaccgacccctacttcacccccatccccgtgctgcaggccgacgcccacaagggcatcctgagcatgatcgagagaggcctgatcccccccaccgccagaatcaccttccagaacccccccatcacccccagagccgcccccctgcacagcttcgacgaggccagaaagatccccaccgtggccaccttcaccatccccagagagcccccccccagccccgccgaggtgaagttcttccccaagaagcagagaagcaagggcaagagcagaagaagcagaggccaccacgacagaaaggccatgaaggtgaagacccccctgagagccctgaagagcctgtgggactacgacttcctgatctacgacggcgtgatcgacaacaccgcccccgacttcctggccttcaaggagcacttcagcctggcctggggcggcatcttcagcctgctggagcacgtggagaagttcctgagaaactacgccatccccgaggtgaagatcaagggcaacaacctggtggccctgctgcccgagttcgagctgaccaacaagctgaccagatacgacctgctgagcgtgctggaggaccccgcccacgtgcagatgctgatcaacctgcccggccagagatacaagggccaggacggcaacagcgaggccgccatgaagatccaggccacctggaagtgctacaaggccagaaagttcttcctgttctacagacagcagaagtgggccagcggcgtgatcgccatcgcctggctgctgtactgccacaagaccagactgaagaagatcctgaaggagagcagacagagacacctggagaacttcagaatcagagccaagcacctggccgccaactggaacagaatcagaaccagcagaagaaccatcatccacatccccagcctgggctacagccagcccgtgagagagcacatcgccgacttcaacacccagcagaacatgcagctgggcagactgtgcgacatcctggacgccaacgtgaacgtgatctacatctgcagccaccacatgaacgacgagctggtgctgtactacaagaagatcctgagcctgcacgccgccgtgaagagcggcaacctggaggacagaagcgacctgcaggacagattcaagatcatcacccccgaggccgtgaacatcttccccaagcaccacatgtgcctggccacccacctgatgtacagccccaaggccatcaagagaatcaagaacctgatcagaggcaccgaggcctacatcgtgagcggcctgctgcacagagacgacctggccgtggccgacatgctggacatccccatcctgggcagcgagcccgagctggcccacctgtacagcaccaagagcggcggcaagagagtgttcgacagcgccaacgtggccgtgccccccggcatctacgacatctacagccagcagcagatgatcgagcagctgagccagctgatcaccgaccacctgcagatccagagatggctgttcaagatggacagcgagttcagaggcaacggcaccgccttctgcgacatccccagctacctgaagtgctacaagtgggtgctgaaggagagcagcagatacggcctggaggactggagaaagaagtgggcccaggagcccgccctggtgaagatcagcgaggagctggccggcatcctggcccagcacgcccagcccgtgaacgagaagagattccccacctggagaaagttcctgcagaccttcctgagccagggcggcgtgatcgaggccttcccccccgccgacaacgtgaccaacctgaccgtggacatgctgatcgagcccaacggcaagatcagcgtgctgagcaccggcgaccagctgcacgccgagagccccttcatcagcagcggcaccaccgtgccccagaccagcgtggacccccaggtgctgacctacctgtgcctgcagatcggcaaggcctgcagaatgagagacgtggtgggctacttcagcatcgacctggtgaccttcatcgaccccagcaccctggagcagcaggtgtgggccaccggcctgaacctggcctacagcgaccagctggccctgacccagctgaccctgtacctgaccaacggccacctggactgcagcctgagcaccctggaggtgcccagattcgtgcccaaggagagaaagaagaccaagtgcatgagcgccctgagcatgcccatgctggccaccagcagatacgccgtgatgaccacccagctgagacacagcaacctgagcctggtgttccactacgtgttcctgcagatctgcagagcccacggcatcggctacgacgtggaggagagacagggcaccgtgttcatcctgtacgagcacctgaagagacacaagctgggcatgctgaccatcggcgaggacctgcagggcgtgctgatgaccttcgccagacacctgttcatcatccaccaggagatcagcgcccccaacatgcagggcgagaccaacttcaagaccaccatcgccgacatcgagaccatcctgagagtgaccaaggagaacaagatgagattcgaggaggagcagcagagcaaggacgacaagaacctgagcaagcccaagaagtag

SEQ ID NO: 85788 - DNA, 2091 bp, synthetic construct
  misc_feature 1..2091: note = Description of Artificial Sequence: Synthetic coding sequence
  source 1..2091: mol_type = other DNA
atgatcgagagaggcctgatcccccccaccgccagaatcaccttccagaacccccccatcacccccagagccgcccccctgcacagcttcgacgaggccagaaagatccccaccgtggccaccttcaccatccccagagagcccccccccagccccgccgaggtgaagttcttccccaagaagcagagaagcaagggcaagagcagaagaagcagaggccaccacgacagaaaggccatgaaggtgaagacccccctgagagccctgaagagcctgtgggactacgacttcctgatctacgacggcgtgatcgacaacaccgcccccgacttcctggccttcaaggagcacttcagcctggcctggggcggcatcttcagcctgctggagcacgtggagaagttcctgagaaactacgccatccccgaggtgaagatcaagggcaacaacctggtggccctgctgcccgagttcgagctgaccaacaagctgaccagatacgacctgctgagcgtgctggaggaccccgcccacgtgcagatgctgatcaacctgcccggccagagatacaagggccaggacggcaacagcgaggccgccatgaagatccaggccacctggaagtgctacaaggccagaaagttcttcctgttctacagacagcagaagtgggccagcggcgtgatcgccatcgcctggctgctgtactgccacaagaccagactgaagaagatcctgaaggagagcagacagagacacctggagaacttcagaatcagagccaagcacctggccgccaactggaacagaatcagaaccagcagaagaaccatcatccacatccccagcctgggctacagccagcccgtgagagagcacatcgccgacttcaacacccagcagaacatgcagctgggcagactgtgcgacatcctggacgccaacgtgaacgtgatctacatctgcagccaccacatgaacgacgagctggtgctgtactacaagaagatcctgagcctgcacgccgccgtgaagagcggcaacctggaggacagaagcgacctgcaggacagattcaagatcatcacccccgaggccgtgaacatcttccccatgatcgagcagctgagccagctgatcaccgaccacctgcagatccagagatggctgttcaagatggacagcgagttcagaggcaacggcaccgccttctgcgacatccccagctacctgaagtgctacaagtgggtgctgaaggagagcagcagatacggcctggaggactggagaaagaagtgggcccaggagcccgccctggtgaagatcagcgaggagctggccggcatcctggcccagcacgcccagcccgtgaacgagaagagattccccacctggagaaagttcctgcagaccttcctgagccagggcggcgtgatcgaggccttcccccccgccgacaacgtgaccaacctgaccgtggacatgctgatcgagcccaacggcaagatcagcgtgctgagcaccggcgaccagctgcacgccgagagccccttcatcagcagcggcaccaccgtgccccagaccagcgtggacccccaggtgctgacctacctgtgcctgcagatcggcaaggcctgcagaatgagagacgtggtgggctacttcagcatcgacctggtgaccttcatcgaccccagcaccctggagcagcaggtgtgggccaccggcctgaacctggcctacagcgaccagctggccctgacccagctgaccctgtacctgaccaacggccacctggactgcagcctgagcaccctggaggtgcccagattcgtgcccaaggagagaaagaagaccaagtgcatgagcgccctgagcatgcccatgctggccaccagcagatacgccgtgatgaccacccagctgagacacagcaacctgagcctggtgttccactacgtgttcctgcagatctgcagagcccacggcatcggctacgacgtggagaacaacagaagaggcagccccggcggcccccacgacctgtgcagccccagcctgcaccaccccagcagaaacatcagcacctag

SEQ ID NO: 85789 - DNA, 1866 bp, synthetic construct
  misc_feature 1..1866: note = Description of Artificial Sequence: Synthetic coding sequence
  source 1..1866: mol_type = other DNA
atgaccaaggccatgaaggtgaagacccccctgagagccctgaagagcctgtgggactacgacttcctgatctacgacggcgtgatcgacaacaccgcccccgacttcctggccttcaaggagcacttcagcctggcctggggcggcatcttcagcctgctggagcacgtggagaagttcctgagaaactacgccatccccgaggtgaagatcaagggcaacaacctggtggccctgctgcccgagttcgagctgaccaacaagctgaccagatacgacctgctgagcgtgctggaggaccccgcccacgtgcagatgctgatcaacctgcccggccagagatacaagggccaggacggcaacagcgaggccgccatgaagatccaggccacctggaagtgctacaaggccagaaagttcttcctgttctacagacagcagaagtgggccagcggcgtgatcgccatcgcctggctgctgtactgccacaagaccagactgaagaagatcctgaaggagagcagacagagacacctggagaacttcagaatcagagccaagcacctggccgccaactggaacagaatcagaaccagcagaagaaccatcatccacatccccagcctgggctacagccagcccgtgagagagcacatcgccgacttcaacacccagcagaacatgcagctgggcagactgtgcgacatcctggacgccaacgtgaacgtgatctacatctgcagccaccacatgaacgacgagctggtgctgtactacaagaagatcctgagcctgcacgccgccgtgaagagcggcaacctggaggacagaagcgacctgcaggacagattcaagatcatcacccccgaggccgtgaacatcttccccatgatcgagcagctgagccagctgatcaccgaccacctgcagatccagagatggctgttcaagatggacagcgagttcagaggcaacggcaccgccttctgcgacatccccagctacctgaagtgctacaagtgggtgctgaaggagagcagcagatacggcctggaggactggagaaagaagtgggcccaggagcccgccctggtgaagatcagcgaggagctggccggcatcctggcccagcacgcccagcccgtgaacgagaagagattccccacctggagaaagttcctgcagaccttcctgagccagggcggcgtgatcgaggccttcccccccgccgacaacgtgaccaacctgaccgtggacatgctgatcgagcccaacggcaagatcagcgtgctgagcaccggcgaccagctgcacgccgagagccccttcatcagcagcggcaccaccgtgccccagaccagcgtggacccccaggtgctgacctacctgtgcctgcagatcggcaaggcctgcagaatgagagacgtggtgggctacttcagcatcgacctggtgaccttcatcgaccccagcaccctggagcagcaggtgtgggccaccggcctgaacctggcctacagcgaccagctggccctgacccagctgaccctgtacctgaccaacggccacctggactgcagcctgagcaccctggaggtgcccagattcgtgcccaaggagagaaagaagaccaagtgcatgagcgccctgagcatgcccatgctggccaccagcagatacgccgtgatgaccacccagctgagacacagcaacctgagcctggtgttccactacgtgttcctgcagatctgcagagcccacggcatcggctacgacgtggagaacaacagaagaggcagccccggcggcccccacgacctgtgcagccccagcctgcaccaccccagcagaaacatcagcacctag

SEQ ID NO: 85790 - DNA, 2055 bp, synthetic construct
  misc_feature 1..2055: note = Description of Artificial Sequence: Synthetic coding sequence
  source 1..2055: mol_type = other DNA
atgaaggtgaagacccccctgagagccctgaagagcctgtgggactacgacttcctgatctacgacggcgtgatcgacaacaccgcccccgacttcctggccttcaaggagcacttcagcctggcctggggcggcatcttcagcctgctggagcacgtggagaagttcctgagaaactacgccatccccgaggtgaagatcaagggcaacaacctggtggccctgctgcccgagttcgagctgaccaacaagctgaccagatacgacctgctgagcgtgctggaggaccccgcccacgtgcagatgctgatcaacctgcccggccagagatacaagggccaggacggcaacagcgaggccgccatgaagatccaggccacctggaagtgctacaaggccagaaagttcttcctgttctacagacagcagaagtgggccagcggcgtgatcgccatcgcctggctgctgtactgccacaagaccagactgaagaagatcctgaaggagagcagacagagacacctggagaacttcagaatcagagccaagcacctggccgccaactggaacagaatcagaaccagcagaagaaccatcatccacatccccagcctgggctacagccagcccgtgagagagcacatcgccgacttcaacacccagcagaacatgcagctgggcagactgtgcgacatcctggacgccaacgtgaacgtgatctacatctgcagccaccacatgaacgacgagctggtgctgtactacaagaagatcctgagcctgcacgccgccgtgaagagcggcaacctggaggacagaagcgacctgcaggacagattcaagatcatcacccccgaggccgtgaacatcttccccatgatcgagcagctgagccagctgatcaccgaccacctgcagatccagagatggctgttcaagatggacagcgagttcagaggcaacggcaccgccttctgcgacatccccagctacctgaagtgctacaagtgggtgctgaaggagagcagcagatacggcctggaggactggagaaagaagtgggcccaggagcccgccctggtgaagatcagcgaggagctggccggcatcctggcccagcacgcccagcccgtgaacgagaagagattccccacctggagaaagttcctgcagaccttcctgagccagggcggcgtgatcgaggccttcccccccgccgacaacgtgaccaacctgaccgtggacatgctgatcgagcccaacggcaagatcagcgtgctgagcaccggcgaccagctgcacgccgagagccccttcatcagcagcggcaccaccgtgccccagaccagcgtggacccccaggtgctgacctacctgtgcctgcagatcggcaaggcctgcagaatgagagacgtggtgggctacttcagcatcgacctggtgaccttcatcgaccccagcaccctggagcagcaggtgtgggccaccggcctgaacctggcctacagcgaccagctggccctgacccagctgaccctgtacctgaccaacggccacctggactgcagcctgagcaccctggaggtgcccagattcgtgcccaaggagagaaagaagaccaagtgcatgagcgccctgagcatgcccatgctggccaccagcagatacgccgtgatgaccacccagctgagacacagcaacctgagcctggtgttccactacgtgttcctgcagatctgcagagcccacggcatcggctacgacgtggaggagagacagggcaccgtgttcatcctgtacgagcacctgaagagacacaagctgggcatgctgaccatcggcgaggacctgcagggcgtgctgatgaccttcgccagacacctgttcatcatccaccaggagatcagcgcccccaacatgcagggcgagaccaacttcaagaccaccatcgccgacatcgagaccatcctgagagtgaccaaggagaacaagatgagattcgaggaggagcagcagagcaaggacgacaagaacctgagcaagcccaagaagtag

SEQ ID NO: 85791 - DNA, 507 bp, synthetic construct
  misc_feature 1..507: note = Description of Artificial Sequence: Synthetic coding sequence
  source 1..507: mol_type = other DNA
atggcccagaacaccgagaaccacgaccccgtgggcagcatcctgatccagatccacgaggacctgtaccagctgaaggagaagctgaccaagttcagccccgaggagaagggcgagaccctggacatccagagcctggagaccgccatcaagagaaccgaggtgggcctgagaatccacatcgagaagtacctgaacgtggtgaaccagaacgtgctgaccaccagcgtgaacgacgagagcctgtacaccccccaggccagcaagtggctgctgcccaccgtgatcgaccagaagagcttcatcttcccccaggagagcgagggcaccttctggcagccccagagacagcacagcagcagcctgcccgtgttccccagagccaagagaaagatcggcctgaacgtgaagatcctgcaggaccccgagaacatccaccacagagccgccgtgaacgccaactacggcatcagcctgccctacatcaaccagagaaaggcctgctag

SEQ ID NO: 85792 - DNA, 339 bp, synthetic construct
  misc_feature 1..339: note = Description of Artificial Sequence: Synthetic coding sequence
  source 1..339: mol_type = other DNA
atgagactggaggagctgaagagactgcagaaccccctggagcaggtgaacgacggcaagtacagcttcgagaaccaccagctggccatggacgccgagaacaacatcgagaagtaccccctgaacctgcagcccctggagagcaaggtgaagatcatccagagagcctggagagagtacctgcagagacaggagcccctgggcaagagaagccccagcccccccagcgtgagcagcgagaagctgagcagcagcgtgagcatgaacaccttcagcgacagcagcacccccgtgagcgtgatgttcctgttcctgtgccccgacctgaccttcaactag

SEQ ID NO: 85793 - DNA, 480 bp, synthetic construct
  misc_feature 1..480: note = Description of Artificial Sequence: Synthetic coding sequence
  source 1..480: mol_type = other DNA
atgagactggaggagctgaagagactgcagaaccccctggagcaggtgaacgacggcaagtacagcttcgagaaccaccagctggccatggacgccgagaacaacatcgagaagtaccccctgaacctgcagcccctggagagcaaggtgaagatcatccagagagcctggagagagtacctgcagagacaggagcccctgggcaagagaagccccagcccccccagcgtgagcagcgagaagctgagcagcagcgtgagcatgaacaccttcagcgacagcagcacccccttcgccagagcccccgtgggcaagatccacccctacatcagctggagactgcagagccccggcgacaagctgcccggcggcagaaaggtgatcctgctgtacctggaccagctggccagacccaccggcttcatccacaccctgaaggagccccagatcgagagactgggcttcctgaccctgcagtag

SEQ ID NO: 85794 - DNA, 399 bp, synthetic construct
  misc_feature 1..399: note = Description of Artificial Sequence: Synthetic coding sequence
  source 1..399: mol_type = other DNA
atgagactggaggagctgaagagactgcagaaccccctggagcaggtgaacgacggcaagtacagcttcgagaacatccagagagcctggagagagtacctgcagagacaggagcccctgggcaagagaagccccagcccccccagcgtgagcagcgagaagctgagcagcagcgtgagcatgaacaccttcagcgacagcagcacccccttcgccagagcccccgtgggcaagatccacccctacatcagctggagactgcagagccccggcgacaagctgcccggcggcagaaaggtgatcctgctgtacctggaccagctggccagacccaccggcttcatccacaccctgaaggagccccagatcgagagactgggcttcctgaccctgcagtag

SEQ ID NO: 85795 - DNA, 2892 bp, synthetic construct
  misc_feature 1..2892: note = Description of Artificial Sequence: Synthetic coding sequence
  source 1..2892: mol_type = other DNA
atggacgcccccaaggccggctacgccttcgagtacctgatcgagaccctgaacgacagcagccacaagaagttcttcgacgtgagcaagctgggcaccaagtacgacgtgctgccctacagcatcagagtgctgctggaggccgccgtgagaaactgcgacggcttcctgatgaagaaggaggacgtgatgaacatcctggactggaagaccaagcagagcaacgtggaggtgcccttcttccccgccagagtgctgctgcaggacttcaccggcatccccgccatggtggacttcgccgccatgagagaggccgtgaagaccctgggcggcgaccccgagaaggtgcaccccgcctgccccaccgacctgaccgtggaccacagcctgcagatcgacttcagcaagtgcgccatccagaacgcccccaaccccggcggcggcgacctgcagaaggccggcaagctgagccccgtgaaggtgcagcccaagaagctgccctgcagaggccagaccacctgcagaggcagctgcgacagcggcgagctgggcagaaacagcggcaccttcagcagccagatcgagaacacccccatcctgtgccccttccacctgcagcccgtgcccgagcccgagaccgtgctgaagaaccaggaggtggagttcggcagaaacagagagagactgcagttcttcaagtggagcagcagagtgttcaagaacgtggccgtgatcccccccggcaccggcatggcccaccagatcaacctggagtacctgagcagagtggtgttcgaggagaaggacctgctgttccccgacagcgtggtgggcaccgacagccacatcaccatggtgaacggcctgggcatcctgggctggggcgtgggcggcatcgagaccgaggccgtgatgctgggcctgcccgtgagcctgaccctgcccgaggtggtgggctgcgagctgaccggcagcagcaaccccttcgtgaccagcatcgacgtggtgctgggcatcaccaagcacctgagacaggtgggcgtggccggcaagttcgtggagttcttcggcagcggcgtgagccagctgagcatcgtggacagaaccaccatcgccaacatgtgccccgagtacggcgccatcctgagcttcttccccgtggacaacgtgaccctgaagcacctggagcacaccggcttcagcaaggccaagctggagagcatggagacctacctgaaggccgtgaagctgttcagaaacgaccagaacagcagcggcgagcccgagtacagccaggtgatccagatcaacctgaacagcatcgtgcccagcgtgagcggccccaagagaccccaggacagagtggccgtgaccgacatgaagagcgacttccaggcctgcctgaacgagaaggtgggcttcaagggcttccagatcgccgccgagaagcagaaggacatcgtgagcatccactacgagggcagcgagtacaagctgagccacggcagcgtggtgatcgccgccgtgatcagctgcaccaacaactgcaaccccagcgtgatgctggccgccggcctgctggccaagaaggccgtggaggccggcctgagagtgaagccctacatcagaaccagcctgagccccggcagcggcatggtgacccactacctgagcagcagcggcgtgctgccctacctgagcaagctgggcttcgagatcgtgggctacggctgcagcatctgcgtgggcaacaccgcccccctgagcgacgccgtgctgaacgccgtgaagcagggcgacctggtgacctgcggcatcctgagcggcaacaagaacttcgagggcagactgtgcgactgcgtgagagccaactacctggccagcccccccctggtggtggcctacgccatcgccggcaccgtgaacatcgacttccagaccgagcccctgggcaccgaccccaccggcaagaacatctacctgcacgacatctggcccagcagagaggaggtgcacagagtggaggaggagcacgtgatcctgagcatgttcaaggccctgaaggacaagatcgagatgggcaacaagagatggaacagcctggaggcccccgacagcgtgctgttcccctgggacctgaagagcacctacatcagatgccccagcttcttcgacaagctgaccaaggagcccatcgccctgcaggccatcgagaacgcccacgtgctgctgtacctgggcgacagcgtgaccaccgaccacatcagccccgccggcagcatcgccagaaacagcgccgccgccaagtacctgaccaacagaggcctgacccccagagagttcaacagctacggcgccagaagaggcaacgacgccgtgatgaccagaggcaccttcgccaacatcaagctgttcaacaagttcatcggcaagcccgcccccaagaccatccacttccccagcggccagaccctggacgtgttcgaggccgccgagctgtaccagaaggagggcatccccctgatcatcctggccggcaagaagtacggcagcggcaacagcagagactgggccgccaagggcccctacctgctgggcgtgaaggccgtgctggccgagagctacgagaagatccacaaggaccacctgatcggcatcggcatcgcccccctgcagttcctgcccggcgagaacgccgacagcctgggcctgagcggcagagagaccttcagcctgaccttccccgaggagctgagccccggcatcaccctgaacatccagaccagcaccggcaaggtgttcagcgtgatcgccagcttcgaggacgacgtggagatcaccctgtacaagcacggcggcctgctgaacttcgtggccagaaagttcagctag

SEQ ID NO: 85796 - DNA, 96 bp, synthetic construct
  misc_feature 1..96: note = Description of Artificial Sequence: Synthetic coding sequence
  source 1..96: mol_type = other DNA
atggactacgtggaggacaagctgagcagcgagttcgtgttcaacaaccccaacatcaagggcacctgcggctgcggcgagagcttcaacatctag

SEQ ID NO: 85797 - DNA, 261 bp, synthetic construct
  misc_feature 1..261: note = Description of Artificial Sequence: Synthetic coding sequence
  source 1..261: mol_type = other DNA
atgagcgccagcctggtgagagccaccgtgagagccgtgagcaagagaaagctgcagcccaccagagccgccctgaccctgacccccagcgccgtgaacaagatcaagcagctgctgaaggacaagcccgagcacgtgggcgtgaaggtgggcgtgagaaccagaggctgcaacggcctgagctacaccctggagtacaccaagaccaagggcgacagcgacgaggaggtgatccaggacggctggagcgccgtggtgtag

SEQ ID NO: 85798 - DNA, 390 bp, synthetic construct
  misc_feature 1..390: note = Description of Artificial Sequence: Synthetic coding sequence
  source 1..390: mol_type = other DNA
atgagcgccagcctggtgagagccaccgtgagagccgtgagcaagagaaagctgcagcccaccagagccgccctgaccctgacccccagcgccgtgaacaagatcaagcagctgctgaaggacaagcccgagcacgtgggcgtgaaggtgggcgtgagaaccagaggctgcaacggcctgagctacaccctggagtacaccaagaccaagggcgacagcgacgaggaggtgatccaggacggcgtgagagtgttcatcgagaagaaggcccagctgaccctgctgggcaccgagatggactacgtggaggacaagctgagcagcgagttcgtgttcaacaaccccaacatcaagggcacctgcggctgcggcgagagcttcaacatctag

SEQ ID NO: 85799 - DNA, 531 bp, synthetic construct
  misc_feature 1..531: note = Description of Artificial Sequence: Synthetic coding sequence
  source 1..531: mol_type = other DNA
atggtggccgccggcggcggcgccagaaccgagggcgccgtgagaagaagcctgtggagacagtgcgccagaagagtgcacggcgagaagctgagaagacccaccttcggccccagacacagaggcgccggcaccgccaagatgagcgccagcctggtgagagccaccgtgagagccgtgagcaagagaaagctgcagcccaccagagccgccctgaccctgacccccagcgccgtgaacaagatcaagcagctgctgaaggacaagcccgagcacgtgggcgtgaaggtgggcgtgagaaccagaggctgcaacggcctgagctacaccctggagtacaccaagaccaagggcgacagcgacgaggaggtgatccaggacggcgtgagagtgttcatcgagaagaaggcccagctgaccctgctgggcaccgagatggactacgtggaggacaagctgagcagcgagttcgtgttcaacaaccccaacatcaagggcacctgcggctgcggcgagagcttcaacatctag

SEQ ID NO: 85800 - DNA, 504 bp, synthetic construct
  misc_feature 1..504: note = Description of Artificial Sequence: Synthetic coding sequence
  source 1..504: mol_type = other DNA
atggccgccgccggcgccttcagactgagaagagccgccagcgccctgctgctgagaagccccagactgcccgccagagagctgagcgcccccgccagactgtaccacaagaaggtggtggaccactacgagaaccccagaaacgtgggcagcctggacaagaccagcaagaacgtgggcaccggcctggtgggcgcccccgcctgcggcgacgtgatgaagctgcagatccaggtggacgagaagggcaagatcgtggacgccagattcaagaccttcggctgcggcagcgccatcgccagcagcagcctggccaccgagtgggtgaagggcaagaccgtggaggaggccctgaccatcaagaacaccgacatcgccaaggagctgtgcctgccccccgtgaagctgcactgcagcatgctggccgaggacgccatcaaggccgccctggccgactacaagctgaagcaggagcccaagaagggcgaggccgagaagaagtag

SEQ ID NO: 85801 - DNA, 390 bp, synthetic construct
  misc_feature 1..390: note = Description of Artificial Sequence: Synthetic coding sequence
  source 1..390: mol_type = other DNA
atggtgctgatcgacatgagcgtggacctgagcacccaggtggtggaccactacgagaaccccagaaacgtgggcagcctggacaagaccagcaagaacgtgggcaccggcctggtgggcgcccccgcctgcggcgacgtgatgaagctgcagatccaggtggacgagaagggcaagatcgtggacgccagattcaagaccttcggctgcggcagcgccatcgccagcagcagcctggccaccgagtgggtgaagggcaagaccgtggaggaggccctgaccatcaagaacaccgacatcgccaaggagctgtgcctgccccccgtgaagctgcactgcagcaagagcgtgctgttccccgccgaggagaagacccagctgagcccctag

SEQ ID NO: 85802 - DNA, 429 bp, synthetic construct
  misc_feature 1..429: note = Description of Artificial Sequence: Synthetic coding sequence
  source 1..429: mol_type = other DNA
atggtgctgatcgacatgagcgtggacctgagcacccaggtggtggaccactacgagaaccccagaaacgtgggcagcctggacaagaccagcaagaacgtgggcaccggcctggtgggcgcccccgcctgcggcgacgtgatgaagctgcagatccaggtggacgagaagggcaagatcgtggacgccagattcaagaccttcggctgcggcagcgccatcgccagcagcagcctggccaccgagtgggtgaagggcaagaccgtggaggaggccctgaccatcaagaacaccgacatcgccaaggagctgtgcctgccccccgtgaagctgcactgcagcatgctggccgaggacgccatcaaggccgccctggccgactacaagctgaagcaggagcccaagaagggcgaggccgagaagaagtag

SEQ ID NO: 85803 - DNA, 1443 bp, synthetic construct
  misc_feature 1..1443: note = Description of Artificial Sequence: Synthetic coding sequence
  source 1..1443: mol_type = other DNA
atgagcttcccccagctgggctacccccagtacctgagcgccgccggccccggcgcctacggcggcgagagacccggcgtgctggccgccgccgccgccgccgccgccgccgccagcagcggcagacccggcgccgccgagctgggcggcggcgccggcgccgccgccgtgaccagcgtgctgggcatgtacgccgccgccggcccctacgccggcgcccccaactacagcgccttcctgccctacgccgccgacctgagcctgttcagccagatgggcagccagtacgagctgaaggacaaccccggcgtgcaccccgccaccttcgccgcccacaccgcccccgcctactacccctacggccagttccagtacggcgaccccggcagacccaagaacgccaccagagagagcaccagcaccctgaaggcctggctgaacgagcacagaaagaacccctaccccaccaagggcgagaagatcatgctggccatcatcaccaagatgaccctgacccaggtgagcacctggttcgccaacgccagaagaagactgaagaaggagaacaaggtgacctggggcgccagaagcaaggaccaggaggacggcgccctgttcggcagcgacaccgagggcgaccccgagaaggccgaggacgacgaggagatcgacctggagagcatcgacatcgacaagatcgacgagcacgacggcgaccagagcaacgaggacgacgaggacaaggccgaggccccccacgcccccgccgcccccagcgccctggccagagaccagggcagccccctggccgccgccgacgtgctgaagccccaggacagccccctgggcctggccaaggaggcccccgagcccggcagcaccagactgctgagccccggcgccgccgccggcggcctgcagggcgccccccacggcaagcccaagatctggagcctggccgagaccgccaccagccccgacggcgcccccaaggccagcccccccccccccgccggccaccccggcgcccacggccccagcgccggcgcccccctgcagcaccccgccttcctgcccagccacggcctgtacacctgccacatcggcaagttcagcaactggaccaacagcgccttcctggcccagggcagcctgctgaacatgagaagcttcctgggcgtgggcgccccccacgccgccccccacggcccccacctgcccgcccccccccccccccagccccccgtggccatcgcccccggcgccctgaacggcgacaaggccagcgtgagaagcagccccaccctgcccgagagagacctggtgcccagacccgacagccccgcccagcagctgaagagccccttccagcccgtgagagacaacagcctggccccccaggagggcacccccagaatcctggccgccctgcccagcgcctag

SEQ ID NO: 85804 - DNA, 1416 bp, synthetic construct
  misc_feature 1..1416: note = Description of Artificial Sequence: Synthetic coding sequence
  source 1..1416: mol_type = other DNA
atgagctacccccagggctacctgtaccaggcccccggcagcctggccctgtacagctgccccgcctacggcgccagcgccctggccgcccccagaagcgaggagctggccagaagcgccagcggcagcgccttcagcccctaccccggcagcgccgccttcaccgcccaggccgccaccggcttcggcagccccctgcagtacagcgccgacgccgccgccgccgccgccggcttccccagctacatgggcgccccctacgacgcccacaccaccggcatgaccggcgccatcagctaccacccctacggcagcgccgcctacccctaccagctgaacgaccccgcctacagaaagaacgccaccagagacgccaccgccaccctgaaggcctggctgaacgagcacagaaagaacccctaccccaccaagggcgagaagatcatgctggccatcatcaccaagatgaccctgacccaggtgagcacctggttcgccaacgccagaagaagactgaagaaggagaacaagatgacctgggcccccagaaacaagagcgaggacgaggacgaggacgagggcgacgccaccagaagcaaggacgagagccccgacaaggcccaggagggcaccgagaccagcgccgaggacgagggcatcagcctgcacgtggacagcctgaccgaccacagctgcagcgccgagagcgacggcgagaagctgccctgcagagccggcgaccccctgtgcgagagcggcagcgagtgcaaggacaagtacgacgacctggaggacgacgaggacgacgacgaggagggcgagagaggcctggccccccccaagcccgtgaccagcagccccctgaccggcctggaggcccccctgctgagccccccccccgaggccgcccccagaggcggcagaaagaccccccagggcagcagaaccagccccggcgcccccccccccgccagcaagcccaagctgtggagcctggccgagatcgccaccagcgacctgaagcagcccagcctgggccccggctgcggcccccccggcctgcccgccgccgccgcccccgccagcaccggcgccccccccggcggcagcccctaccccgccagccccctgctgggcagacccctgtactacaccagccccttctacggcaactacaccaactacggcaacctgaacgccgccctgcagggccagggcctgctgagatacaacagcgccgccgccgcccccggcgaggccctgcacaccgcccccaaggccgccagcgacgccggcaaggccggcgcccaccccctggagagccactacagaagccccggcggcggctacgagcccaagaaggacgccagcgagggctgcaccgtggtgggcggcggcgtgcagccctacctgtag

SEQ ID NO: 85805 - DNA, 1416 bp, synthetic construct; identical to SEQ ID NO: 85804
  misc_feature 1..1416: note = Description of Artificial Sequence: Synthetic coding sequence
  source 1..1416: mol_type = other DNA

SEQ ID NO: 85806 - DNA, 1506 bp, synthetic construct
  misc_feature 1..1506: note = Description of Artificial Sequence: Synthetic coding sequence
  source 1..1506: mol_type = other DNA
atgagcttcccccagctgggctaccagtacatcagacccctgtaccccagcgagagacccggcgccgccggcggcagcggcggcagcgccggcgccagaggcggcctgggcgccggcgccagcgagctgaacgccagcggcagcctgagcaacgtgctgagcagcgtgtacggcgccccctacgccgccgccgccgccgccgccgccgcccagggctacggcgccttcctgccctacgccgccgagctgcccatcttcccccagctgggcgcccagtacgagctgaaggacagccccggcgtgcagcaccccgccgccgccgccgccttcccccacccccaccccgccttctacccctacggccagtaccagttcggcgaccccagcagacccaagaacgccaccagagagagcaccagcaccctgaaggcctggctgaacgagcacagaaagaacccctaccccaccaagggcgagaagatcatgctggccatcatcaccaagatgaccctgacccaggtgagcacctggttcgccaacgccagaagaagactgaagaaggagaacaagatgacctgggcccccagaagcagaaccgacgaggagggcaacgcctacggcagcgagagagaggaggaggacgaggaggaggacgaggaggacggcaagagagagctggagctggaggaggaggagctgggcggcgaggaggaggacaccggcggcgagggcctggccgacgacgacgaggacgaggagatcgacctggagaacctggacggcgccgccaccgagcccgagctgagcctggccggcgccgccagaagagacggcgacctgggcctgggccccatcagcgacagcaagaacagcgacagcgaggacagcagcgagggcctggaggacagacccctgcccgtgctgagcctggcccccgcccccccccccgtggccgtggccagccccagcctgcccagcccccccgtgagcctggacccctgcgcccccgcccccgcccccgccagcgccctgcagaagcccaagatctggagcctggccgagaccgccaccagccccgacaaccccagaagaagcccccccggcgccggcggcagcccccccggcgccgccgtggcccccagcgccctgcagctgagccccgccgccgccgccgccgccgcccacagactggtgagcgcccccctgggcaagttccccgcctggaccaacagacccttccccggccccccccccggccccagactgcaccccctgagcctgctgggcagcgcccccccccacctgctgggcctgcccggcgccgccggccaccccgccgccgccgccgccttcgccagacccgccgagcccgagggcggcaccgacagatgcagcgccctggaggtggagaagaagctgctgaagaccgccttccagcccgtgcccagaagaccccagaaccacctggacgccgccctggtgctgagcgccctgagcagcagctag

SEQ ID NO: 85807 - DNA, 741 bp, synthetic construct
  misc_feature 1..741: note = Description of Artificial Sequence: Synthetic coding sequence
  source 1..741: mol_type = other DNA
atgctgtggagacagctgatctactggcagctgctggccctgttcttcctgcccttctgcctgtgccaggacgagtacatggagagcccccagaccggcggcctgccccccgactgcagcaagtgctgccacggcgactacagcttcagaggctaccagggcccccccggcccccccggcccccccggcatccccggcaaccacggcaacaacggcaacaacggcgccaccggccacgagggcgccaagggcgagaagggcgacaagggcgacctgggccccagaggcgagagaggccagcacggccccaagggcgagaagggctaccccggcatcccccccgagctgcagatcgccttcatggccagcctggccacccacttcagcaaccagaacagcggcatcatcttcagcagcgtggagaccaacatcggcaacttcttcgacgtgatgaccggcagattcggcgcccccgtgagcggcgtgtacttcttcaccttcagcatgatgaagcacgaggacgtggaggaggtgtacgtgtacctgatgcacaacggcaacaccgtgttcagcatgtacagctacgagatgaagggcaagagcgacaccagcagcaaccacgccgtgctgaagctggccaagggcgacgaggtgtggctgagaatgggcaacggcgccctgcacggcgaccaccagagattcagcaccttcgccggcttcctgctgttcgagaccaagtag

SEQ ID NO: 85808 - DNA, 1560 bp, synthetic construct
  misc_feature 1..1560: note = Description of Artificial Sequence: Synthetic coding sequence
  source 1..1560: mol_type = other DNA
atgagctacccccagttcggctacccctacagcagcgccccccagttcctgatggccaccaacagcctgagcacctgctgcgagagcggcggcagaaccctggccgacagcggccccgccgccagcgcccaggcccccgtgtactgccccgtgtacgagagcagactgctggccaccgccagacacgagctgaacagcgccgccgccctgggcgtgtacggcggcccctacggcggcagccagggctacggcaactacgtgacctacggcagcgaggccagcgccttctacagcctgaacagcttcgacagcaaggacggcagcggcagcgcccacggcggcctggcccccgccgccgccgcctactacccctacgagcccgccctgggccagtacccctacgacagatacggcaccatggacagcggcaccagaagaaagaacgccaccagagagaccaccagcaccctgaaggcctggctgcaggagcacagaaagaacccctaccccaccaagggcgagaagatcatgctggccatcatcaccaagatgaccctgacccaggtgagcacctggttcgccaacgccagaagaagactgaagaaggagaacaagatgacctggccccccagaaacaagtgcgccgacgagaagagaccctacgccgagggcgaggaggaggagggcggcgaggaggaggccagagaggagcccctgaagagcagcaagaacgccgagcccgtgggcaaggaggagaaggagctggagctgagcgacctggacgacttcgaccccctggaggccgagccccccgcctgcgagctgaagccccccttccacagcctggacggcggcctggagagagtgcccgccgcccccgacggccccgtgaaggaggccagcggcgccctgagaatgagcctggccgccggcggcggcgccgccctggacgaggacctggagagagccagaagctgcctgagaagcgccgccgccggccccgagcccctgcccggcgccgagggcggcccccaggtgtgcgaggccaagctgggcttcgtgcccgccggcgccagcgccggcctggaggccaagcccagaatctggagcctggcccacaccgccaccgccgccgccgccgccgccaccagcctgagccagaccgagttccccagctgcatgctgaagagacagggccccgccgcccccgccgccgtgagcagcgcccccgccaccagccccagcgtggccctgccccacagcggcgccctggacagacaccaggacagccccgtgaccagcctgagaaactgggtggacggcgtgttccacgaccccatcctgagacacagcaccctgaaccaggcctgggccaccgccaagggcgccctgctggaccccggccccctgggcagaagcctgggcgccggcgccaacgtgctgaccgcccccctggccagagccttcccccccgccgtgccccaggacgcccccgccgccggcgccgccagagagctgctggccctgcccaaggccggcggcaagcccttctgcgcctag

SEQ ID NO: 85809 - DNA, 1560 bp, synthetic construct; identical to SEQ ID NO: 85808
  misc_feature 1..1560: note = Description of Artificial Sequence: Synthetic coding sequence
  source 1..1560: mol_type = other DNA

SEQ ID NO: 85810 - DNA, 1452 bp, synthetic construct
  misc_feature 1..1452: note = Description of Artificial Sequence: Synthetic coding sequence
  source 1..1452: mol_type = other DNA
atgagctacccccagggctacctgtaccagcccagcgccagcctggccctgtacagctgccccgcctacagcaccagcgtgatcagcggccccagaaccgacgagctgggcagaagcagcagcggcagcgccttcagcccctacgccggcagcaccgccttcaccgcccccagccccggctacaacagccacctgcagtacggcgccgaccccgccgccgccgccgccgccgccttcagcagctacgtgggcagcccctacgaccacacccccggcatggccggcagcctgggctaccacccctacgccgcccccctgggcagctacccctacggcgaccccgcctacagaaagaacgccaccagagacgccaccgccaccctgaaggcctggctgaacgagcacagaaagaacccctaccccaccaagggcgagaagatcatgctggccatcatcaccaagatgaccctgacccaggtgagcacctggttcgccaacgccagaagaagactgaagaaggagaacaagatgacctggacccccagaaacagaagcgaggacgaggaggaggaggagaacatcgacctggagaagaacgacgaggacgagccccagaagcccgaggacaagggcgaccccgagggccccgaggccggcggcgccgagcagaaggccgccagcggctgcgagagactgcagggcccccccacccccgccggcaaggagaccgagggcagcctgagcgacagcgacttcaaggagccccccagcgagggcagactggacgccctgcagggcccccccagaaccggcggccccagccccgccggccccgccgccgccagactggccgaggaccccgccccccactaccccgccggcgcccccgcccccggcccccaccccgccgccggcgaggtgccccccggccccggcggccccagcgtgatccacagccccccccccccccccccccccgccgtgctggccaagcccaagctgtggagcctggccgagatcgccaccagcagcgacaaggtgaaggacggcggcggcggcaacgagggcagcccctgccccccctgccccggccccatcgccggccaggccctgggcggcagcagagccagccccgcccccgcccccagcagaagccccagcgcccagtgccccttccccggcggcaccgtgctgagcagacccctgtactacaccgcccccttctaccccggctacaccaactacggcagcttcggccacctgcacggccaccccggccccggccccggccccaccaccggccccggcagccacttcaacggcctgaaccagaccgtgctgaacagagccgacgccctggccaaggaccccaagatgctgagaagccagagccagctggacctgtgcaaggacagcccctacgagctgaagaagggcatgagcgacatctag

SEQ ID NO: 85811 - DNA, 441 bp, synthetic construct
  misc_feature 1..441: note = Description of Artificial Sequence: Synthetic coding sequence
  source 1..441: mol_type = other DNA
atgagctacccccagggctacctgtaccagcccagcgccagcctggccctgtacagctgccccgcctacagcaccagcgtgatcagcggccccagaaccgacgagctgggcagaagcagcagcggcagcgccttcagcccctacgccggcagcaccgccttcaccgcccccagccccggctacaacagccacctgcagtacggcgccgaccccgccgccgccgccgccgccgccttcagcagctacgtgctgctgaagaaggagaagaagagcctggacttcccctgcttcccccccctgagacccacctgcgtgagaagccccgccgagagaggcgtggccagcgtggcccaggccagcatctgcatggagggcagagccgccgtggccagaagcgcccacggcggcagcccctacgcccacagagtgcccggcccctag

SEQ ID NO: 85812 - DNA, 498 bp, synthetic construct
  misc_feature 1..498: note = Description of Artificial Sequence: Synthetic coding sequence
  source 1..498: mol_type = other DNA
atgggctgggacctgaccgtgaagatgctggccggcaacgagttccaggtgagcctgagcagcagcatgagcgtgagcgagctgaaggcccagatcacccagaagatcggcgtgcacgccttccagcagagactggccgtgcaccccagcggcgtggccctgcaggacagagtgcccctggccagccagggcctgggccccggcagcaccgtgctgctggtggtggacaagtgcgacgagcccctgagcatcctggtgagaaacaacaagggcagaagcagcacctacgaggtgagactgacccagaccgtggcccacctgaagcagcaggtgagcggcctggagggcgtgcaggacgacctgttctggctgaccttcgagggcaagcccctggaggaccagctgcccctgggcgagtacggcctgaagcccctgagcaccgtgttcatgaacctgagactgagaggcggcggcaccgagcccggcggcagaagctag

SEQ ID NO: 85813 - DNA, 3129 bp, synthetic construct
  misc_feature 1..3129: note = Description of Artificial Sequence: Synthetic coding sequence
  source 1..3129: mol_type = other DNA
atggccgacgccttcggcgacgagctgttcagcgtgttcgagggcgacagcaccaccgccgccggcaccaagaaggacaaggagaaggacaagggcaagtggaagggcccccccggcagcgccgacaaggccggcaagagattcgacggcaagctgcagagcgagagcaccaacaacggcaagaacaagagagacgtggacttcgagggcaccgacgagcccatcttcggcaagaagcccagaatcgaggagagcatcaccgaggacctgagcctggccgacctgatgcccagagtgaaggtgcagagcgtggagaccgtggagggctgcacccacgaggtggccctgcccgccgaggaggactacctgcccctgaagcccagagtgggcaaggccgccaaggagtaccccttcatcctggacgccttccagagagaggccatccagtgcgtggacaacaaccagagcgtgctggtgagcgcccacaccagcgccggcaagaccgtgtgcgccgagtacgccatcgccctggccctgagagagaagcagagagtgatcttcaccagccccatcaaggccctgagcaaccagaagtacagagagatgtacgaggagttccaggacgtgggcctgatgaccggcgacgtgaccatcaaccccaccgccagctgcctggtgatgaccaccgagatcctgagaagcatgctgtacagaggcagcgaggtgatgagagaggtggcctgggtgatcttcgacgagatccactacatgagagacagcgagagaggcgtggtgtgggaggagaccatcatcctgctgcccgacaacgtgcactacgtgttcctgagcgccaccatccccaacgccagacagttcgccgagtggatctgccacctgcacaagcagccctgccacgtgatctacaccgactacagacccacccccctgcagcactacatcttccccgccggcggcgacggcctgcacctggtggtggacgagaacggcgacttcagagaggacaacttcaacaccgccatgcaggtgctgagagacgccggcgacctggccaagggcgaccagaagggcagaaagggcggcaccaagggccccagcaacgtgttcaagatcgtgaagatgatcatggagagaaacttccagcccgtgatcatcttcagcttcagcaagaaggactgcgaggcctacgccctgcagatgaccaagctggacttcaacaccgacgaggagaagaagatggtggaggaggtgttcagcaacgccatcgactgcctgagcgacgaggacaagaagctgccccaggtggagcacgtgctgcccctgctgaagagaggcatcggcatccaccacggcggcctgctgcccatcctgaaggagaccatcgagatcctgttcagcgagggcctgatcaaggccctgttcgccaccgagaccttcgccatgggcatcaacatgcccgccagaaccgtgctgttcaccaacgccagaaagttcgacggcaaggacttcagatggatcagcagcggcgagtacatccagatgagcggcagagccggcagaagaggcatggacgacagaggcatcgtgatcctgatggtggacgagaagatgagccccaccatcggcaagcagctgctgaagggcagcgccgaccccctgaacagcgccttccacctgacctacaacatggtgctgaacctgctgagagtggaggagatcaaccccgagtacatgctggagaagagcttctaccagttccagcactacagagccatccccggcgtggtggagaaggtgaagaacagcgaggagcagtacaacaagatcgtgatccccaacgaggagagcgtggtgatctactacaagatcagacagcagctggccaagctgggcaaggagatcgaggagtacatccacaagcccaagtactgcctgcccttcctgcagcccggcagactggtgaaggtgaagaacgagggcgacgacttcggctggggcgtggtggtgaacttcagcaagaagagcaacgtgaagcccaacagcggcgagctggaccccctgtacgtggtggaggtgctgctgagatgcagcaaggagagcctgaagaacagcgccaccgaggccgccaagcccgccaagcccgacgagaagggcgagatgcaggtggtgcccgtgctggtgcacctgctgagcgccatcagcagcgtgagactgtacatccccaaggacctgagacccgtggacaacagacagagcgtgctgaagagcatccaggaggtgcagaagagattccccgacggcatccccctgctggaccccatcgacgacatgggcatccaggaccagggcctgaagaaggtgatccagaaggtggaggccttcgagcacagaatgtacagccaccccctgcacaacgaccccaacctggagaccgtgtacaccctgtgcgagaagaaggcccagatcgccatcgacatcaagagcgccaagagagagctgaagaaggccagaaccgtgctgcagatggacgagctgaagtgcagaaagagagtgctgagaagactgggcttcgccaccagcagcgacgtgatcgagatgaagggcagagtggcctgcgagatcagcagcgccgacgagctgctgctgaccgagatgatgttcaacggcctgttcaacgacctgagcgccgagcaggccaccgccctgctgagctgcttcgtgttccaggagaacagcagcgagatgcccaagctgaccgagcagctggccggccccctgagacagatgcaggagtgcgccaagagaatcgccaaggtgagcgccgaggccaagctggagatcgacgaggagacctacctgagcagcttcaagccccacctgatggacgtggtgtacacctgggccaccggcgccaccttcgcccacatctgcaagatgaccgacgtgttcgagggcagcatcatcagatgcatgagaagactggaggagctgctgagacagatgtgccaggccgccaaggccatcggcaacaccgagctggagaacaagttcgccgagggcatcaccaagatcaagagagacatcgtgttcgccgccagcctgtacctgtag

SEQ ID NO: 85814 - DNA, 981 bp, synthetic construct
  misc_feature 1..981: note = Description of Artificial Sequence: Synthetic coding sequence
  source 1..981: mol_type = other DNA
atgggcgacatgggcgacccccccaagaagaagagactgatcagcctgtgcgtgggctgcggcaaccagatccacgaccagtacatcctgagagtgagccccgacctggagtggcacgccgcctgcctgaagtgcgccgagtgcaaccagtacctggacgagagctgcacctgcttcgtgagagacggcaagacctactgcaagagagactacatcagactgtacggcatcaagtgcgccaagtgcagcatcggcttcagcaagaacgacttcgtgatgagagccagaagcaaggtgtaccacatcgagtgcttcagatgcgtggcctgcagcagacagctgatccccggcgacgagttcgccctgagagaggacggcctgttctgcagagccgaccacgacgtggtggagagagccagcctgggcgccggcgaccccctgagccccctgcaccccgccagacccctgcagatggccgccgagcccatcagcgccagacagcccgccctgagaccccacgtgcacaagcagcccgagaagaccaccagagtgagaaccgtgctgaacgagaagcagctgcacaccctgagaacctgctacgccgccaaccccagacccgacgccctgatgaaggagcagctggtggagatgaccggcctgagccccagagtgatcagagtgtggttccagaacaagagatgcaaggacaagaagagaagcatcatgatgaagcagctgcagcagcagcagcccaacgacaagaccgccaaccccgtggaggtgcagagctaccagcccccctggaaggtgctgagcgacttcgccctgcagagcgacatcgaccagcccgccttccagcagctggtgaacttcagcgagggcggccccggcagcaacagcaccggcagcgaggtggccagcatgagcagccagctgcccgacacccccaacagcatggtggccagccccatcgaggcctag

SEQ ID NO: 85815 - DNA, 270 bp, synthetic construct
  misc_feature 1..270: note = Description of Artificial Sequence: Synthetic coding sequence
  source 1..270: mol_type = other DNA
atgggcatcctgaagctgcaggtgttcctgatcgtgctgagcgtggccctgaaccacctgaaggccacccccatcgagagccaccaggtggagaagagaaagtgcaacaccgccacctgcgccacccagagactggccaacttcctggtgcacagcagcaacaacttcggcgccatcctgagcagcaccaacgtgggcagcaacacctacggcaagagaaacgccgtggaggtgctgaagagagagcccctgaactacctgcccctgtag

SEQ ID NO: 85816 - DNA, 240 bp, synthetic construct
  misc_feature 1..240: note = Description of Artificial Sequence: Synthetic coding sequence
  source 1..240: mol_type = other DNA
atgggcatcctgaagctgcaggtgttcctgatcgtgctgagcgtggccctgaaccacctgaaggccacccccatcgagagccaccaggtggagaagagaaagtgcaacaccgccacctgcgccacccagagactggccaacttcctggtgcacagcagcaacaacttcggcgccatcctgagcagcaccaacgtgggcagcaacacctacggcaagagaaacgccgtggaggtgctgtag

SEQ ID NO: 85817 - DNA, 270 bp, synthetic construct; identical to SEQ ID NO: 85815
  misc_feature 1..270: note = Description of Artificial Sequence: Synthetic coding sequence
  source 1..270: mol_type = other DNA

SEQ ID NO: 85818 - DNA, 1449 bp, synthetic construct
  misc_feature 1..1449: note = Description of Artificial Sequence: Synthetic coding sequence
  source 1..1449: mol_type = other DNA
atgagcggccacaagtgctacccctgggacctgcaggacagatacgcccaggacaagagcgtggtgaacaagatgcagcagaagtactgggagaccaagcaggccttcatcaaggccaccggcaagaaggaggacgagcacgtggtggccagcgacgccgacctggacgccaagctggagctgttccacagcatccagagaacctgcctggacctgagcaaggccatcgtgctgtaccagaagagaatctgcttcctgagccaggaggagaacgagctgggcaagttcctgagaagccagggcttccaggacaagaccagagccggcaagatgatgcaggccaccggcaaggccctgtgcttcagcagccagcagagactggccctgagaaaccccctgtgcagattccaccaggaggtggagaccttcagacacagagccatcagcgacacctggctgaccgtgaacagaatggagcagtgcagaaccgagtacagaggcgccctgctgtggatgaaggacgtgagccaggagctggaccccgacctgtacaagcagatggagaagttcagaaaggtgcagacccaggtgagactggccaagaagaacttcgacaagctgaagatggacgtgtgccagaaggtggacctgctgggcgccagcagatgcaacctgctgagccacatgctggccacctaccagaccaccctgctgcacttctgggagaagaccagccacaccatggccgccatccacgagagcttcaagggctaccagccctacgagttcaccaccctgaagagcctgcaggaccccatgaagaagctggtggagaaggaggagaagaagaagatcaaccagcaggagagcaccgacgccgccgtgcaggagcccagccagctgatcagcctggaggaggagaaccagagaaaggagagcagcagcttcaagaccgaggacggcaagagcatcctgagcgccctggacaagggcagcacccacaccgcctgcagcggccccatcgacgagctgctggacatgaagagcgaggagggcgcctgcctgggccccgtggccggcacccccgagcccgagggcgccgacaaggacgacctgctgctgctgagcgagatcttcaacgccagcagcctggaggagggcgagttcagcaaggagtgggccgccgtgttcggcgacggccaggtgaaggagcccgtgcccaccatggccctgggcgagcccgaccccaaggcccagaccggcagcggcttcctgcccagccagctgctggaccagaacatgaaggacctgcaggccagcctgcaggagcccgccaaggccgccagcgacctgaccgcctggttcagcctgttcgccgacctggaccccctgagcaaccccgacgccgtgggcaagaccgacaaggagcacgagctgctgaacgcctag

SEQ ID NO: 85819 - DNA, 774 bp, synthetic construct
  misc_feature 1..774: note = Description of Artificial Sequence: Synthetic coding sequence
  source 1..774: mol_type = other DNA
atgagcggccacaagtgcagctacccctgggacctgcaggacagatacgcccaggacaagagcgtggtgaacaagatgcagcagaagtactgggagaccaagcaggccttcatcaaggccaccggcaagaaggaggacgagcacgtggtggccagcgacgccgacctggacgccaagctggagctgttccacagcatccagagaacctgcctggacctgagcaaggccatcgtgctgtaccagaagagaatctgcttcctgagccaggaggagaacgagctgggcaagttcctgagaagccagggcttccaggacaagaccagagccggcaagatgatgcaggccaccggcaaggccctgtgcttcagcagccagcagagactggccctgagaaaccccctgtgcagattccaccaggaggtggagaccttcagacacagagccatcagcgacacctggctgaccgtgaacagaatggagcagtgcagaaccgagtacagaggcgccctgctgtggatgaaggacgtgagccaggagctggaccccgacctgtacaagcagatggagaagttcagaaaggtgcagacccaggtgagactggccaagaagaacttcgacaagctgaagatggacgtgtgccagaaggtggacctgctgggcgccagcagatgcaacctgctgagccacatgctggccacctaccagctggcctgggaccagtggcagggccccagaaacctgaaggtgctgaccaagatgacctgctgctgctag

SEQ ID NO: 85820 - DNA, 1452 bp, synthetic construct
  misc_feature 1..1452: note = Description of Artificial Sequence: Synthetic coding sequence
  source 1..1452: mol_type = other DNA
atgagcggccacaagtgcagctacccctgggacctgcaggacagatacgcccaggacaagagcgtggtgaacaagatgcagcagaagtactgggagaccaagcaggccttcatcaaggccaccggcaagaaggaggacgagcacgtggtggccagcgacgccgacctggacgccaagctggagctgttccacagcatccagagaacctgcctggacctgagcaaggccatcgtgctgtaccagaagagaatctgcttcctgagccaggaggagaacgagctgggcaagttcctgagaagccagggcttccaggacaagaccagagccggcaagatgatgcaggccaccggcaaggccctgtgcttcagcagccagcagagactggccctgagaaaccccctgtgcagattccaccaggaggtggagaccttcagacacagagccatcagcgacacctggctgaccgtgaacagaatggagcagtgcagaaccgagtacagaggcgccctgctgtggatgaaggacgtgagccaggagctggaccccgacctgtacaagcagatggagaagttcagaaaggtgcagacccaggtgagactggccaagaagaacttcgacaagctgaagatggacgtgtgccagaaggtggacctgctgggcgccagcagatgcaacctgctgagccacatgctggccacctaccagaccaccctgctgcacttctgggagaagaccagccacaccatggccgccatccacgagagcttcaagggctaccagccctacgagttcaccaccctgaagagcctgcaggaccccatgaagaagctggtggagaaggaggagaagaagaagatcaaccagcaggagagcaccgacgccgccgtgcaggagcccagccagctgatcagcctggaggaggagaaccagagaaaggagagcagcagcttcaagaccgaggacggcaagagcatcctgagcgccctggacaagggcagcacccacaccgcctgcagcggccccatcgacgagctgctggacatgaagagcgaggagggcgcctgcctgggccccgtggccggcacccccgagcccgagggcgccgacaaggacgacctgctgctgctgagcgagatcttcaacgccagcagcctggaggagggcgagttcagcaaggagtgggccgccgtgttcggcgacggccaggtgaaggagcccgtgcccaccatggccctgggcgagcccgaccccaaggcccagaccggcagcggcttcctgcccagccagctgctggaccagaacatgaaggacctgcaggccagcctgcaggagcccgccaaggccgccagcgacctgaccgcctggttcagcctgttcgccgacctggaccccctgagcaaccccgacgccgtgggcaagaccgacaaggagcacgagctgctgaacgcctag

SEQ ID NO: 85821 - DNA, 1452 bp, synthetic construct; identical to SEQ ID NO: 85820
  misc_feature 1..1452: note = Description of Artificial Sequence: Synthetic coding sequence
  source 1..1452: mol_type = other DNA

SEQ ID NO: 85822 - DNA, 1452 bp, synthetic construct; identical to SEQ ID NO: 85820
  misc_feature 1..1452: note = Description of Artificial Sequence: Synthetic coding sequence
  source 1..1452: mol_type = other DNA

SEQ ID NO: 85823 - DNA, 1539 bp, synthetic construct
  misc_feature 1..1539: note = Description of Artificial Sequence: Synthetic coding sequence
  source 1..1539: mol_type = other DNA
atgagcggccacaagtgcagctacccctgggacctgcaggacagatacgcccaggacaagagcgtggtgaacaagatgcagcagaagtactgggagaccaagcaggccttcatcaaggccaccggcaagaaggaggacgagcacgtggtggccagcgacgccgacctggacgccaagctggagctgttccacagcatccagagaacctgcctggacctgagcaaggccatcgtgctgtaccagaagagaatctgcttcctgagccaggaggagaacgagctgggcaagttcctgagaagccagggcttccaggacaagaccagagccggcaagatgatgcaggccaccggcaaggccctgtgcttcagcagccagcagagactggccctgagaaaccccctgtgcagattccaccaggaggtggagaccttcagacacagagccatcagcgacacctggctgaccgtgaacagaatggagcagtgcagaaccgagtacagaggcgccctgctgtggatgaaggacgtgagccaggagctggaccccgacctgtacaagcagatggagaagttcagaaaggtgcagacccaggtgagactggccaagaagaacttcgacaagctgaagatggacgtgtgccagaaggtggacctgctgggcgccagcagatgcaacctgctgagccacatgctggccacctaccagaccaccctgctgcacttctgggagaagaccagccacaccatggccgccatccacgagagcttcaagggctaccagccctacgagttcaccaccctgaagagcctgcaggaccccatgaagaagctggtggagaaggaggagaagaagaagatcaaccagcaggagagcaccgacgccgccgtgcaggagcccagccagtacctgcagaacatctgcctggagatgaaggccaacagcgacatcaagatgctgcagaagggcaaggagggccagcagatcggcatcctgatcagcctggaggaggagaaccagagaaaggagagcagcagcttcaagaccgaggacggcaagagcatcctgagcgccctggacaagggcagcacccacaccgcctgcagcggccccatcgacgagctgctggacatgaagagcgaggagggcgcctgcctgggccccgtggccggcacccccgagcccgagggcgccgacaaggacgacctgctgctgctgagcgagatcttcaacgccagcagcctggaggagggcgagttcagcaaggagtgggccgccgtgttcggcgacggccaggtgaaggagcccgtgcccaccatggccctgggcgagcccgaccccaaggcccagaccggcagcggcttcctgcccagccagctgctggaccagaacatgaaggacctgcaggccagcctgcaggagcccgccaaggccgccagcgacctgaccgcctggttcagcctgttcgccgacctggaccccctgagcaaccccgacgccgtgggcaagaccgacaaggagcacgagctgctgaacgcctag

SEQ ID NO: 85824 - DNA, 405 bp, synthetic construct
  misc_feature 1..405: note = Description of Artificial Sequence: Synthetic coding sequence
  source 1..405: mol_type = other DNA
atgagcggccacaagtgctacccctgggacctgcaggacagatacgcccaggacaagagcgtggtgaacaagatgcagcagaagtactgggagaccaagcaggccttcatcaaggccaccggcaagaaggaggacgagcacgtggtggccagcgacgccgacctggacgccaagctggagctgttccacagcatccagagaacctgcctggacctgagcaaggccatcgtgctgtaccagaagagaatctgcttcctgagccaggaggagaacgagctgggcaagttcctgagaagccagggcttccaggacaagaccagagccggcaagatgatgcaggccaccggcaaggccctgtgcttcagcagccagcagagactggccctgagaaaccccctgtgctag

SEQ ID NO: 85825 - DNA, 489 bp, synthetic construct
  misc_feature 1..489: note = Description of Artificial Sequence: Synthetic coding sequence
  source 1..489: mol_type = other DNA
atgagcggccacaagtgcagctacccctgggacctgcaggacagatacgcccaggacaagagcgtggtgaacaagatgcagcagaagtactgggagaccaagcaggccttcatcaaggccaccggcaagaaggaggacgagcacgtggtggccagcgacgccgacctggacgccaagctggagctgttccacagcatccagagaacctgcctggacctgagcaaggccatcgtgctgtaccagaagagaatctgcttcctgagccaggaggagaacgagctgggcaagttcctgagaagccagggcttccaggacaagaccagagccggcaagatgatgcaggccaccggcaaggccctgtgcttcagcagccagcagagactggccctgagaaaccccctgtgcagattccaccaggaggtggagaccttcagacacagagccatcagcgacacctggctgaccgtgaacagaatggagcagtgctag

SEQ ID NO: 85826 - DNA, 666 bp, synthetic construct
  misc_feature 1..666: note = Description of Artificial Sequence: Synthetic coding sequence
  source 1..666: mol_type = other DNA
atggccgccgccagacccagcctgggcagagtgctgcccggcagcagcgtgctgttcctgtgcgacatgcaggagaagttcagacacaacatcgcctacttcccccagatcgtgagcgtggccgccagaatgctgaaggtggccagactgctggaggtgcccgtgatgctgaccgagcagtacccccagggcctgggccccaccgtgcccgagctgggcaccgagggcctgagacccctggccaagacctgcttcagcatggtgcccgccctgcagcaggagctggacagcagaccccagctgagaagcgtgctgctgtgcggcatcgaggcccaggcctgcatcctggaccccagaagctaccccggcctggccctgaccagcctgtacccccagaacaccaccctggacctgctggacagaggcctgcaggtgcacgtggtggtggacgcctgcagcagcagaagccaggtggacagactggtggccctggccagaatgagacagagcggcgccttcctgagcaccagcgagggcctgatcctgcagctggtgggcgacgccgtgcacccccagttcaaggagatccagaagctgatcaaggagcccgcccccgacagcggcctgctgggcctgttccagggccagaacagcctgctgcactag

SEQ ID NO: 85827 - DNA, 618 bp, synthetic construct
  misc_feature 1..618: note = Description of Artificial Sequence: Synthetic coding sequence
  source 1..618: mol_type = other DNA
atggccgccgccagacccagcctgggcagagtgctgcccggcagcagcgtgctgttcctgtgcgacatgcaggagaagttcagacacaacatcgcctacttcccccagatcgtgagcgtggccgccagaatgctgaaggtggccagactgctggaggtgcccgtgatgctgaccgagcagtacccccagggcctgggccccaccgtgcccgagctgggcaccgagggcctgagacccctggccaagacctgcttcagcatggtgcccgccctgcagcaggagctggacagcagaccccagctgagaagcgtgctgctgtgcggcatcgaggcccaggcctgcatcctgaacaccaccctggacctgctggacagaggcctgcaggtgcacgtggtggtggacgcctgcagcagcagaagccaggtggacagactggtggccctggccagaatgagacagagcggcgccttcctgagcaccagcgagggcctgatcctgcagctggtgggcgacgccgtgcacccccagttcaaggagatccagaagctgatcaaggagcccgcccccgacagcggcctgctgggcctgttccagggccagaacagcctgctgcactag

SEQ ID NO: 85828 - DNA, 408 bp, synthetic construct
  misc_feature 1..408: note = Description of Artificial Sequence: Synthetic coding sequence
  source 1..408: mol_type = other DNA
atggccgccgccagacccagcctgggcagagtgctgcccggcagcagcgtgctgttcctgtgcgacatgcaggagaagttcagacacaacatcgcctacttcccccagatcgtgagcgtggccgccagaatgctgaagaacaccaccctggacctgctggacagaggcctgcaggtgcacgtggtggtggacgcctgcagcagcagaagccaggtggacagactggtggccctggccagaatgagacagagcggcgccttcctgagcaccagcgagggcctgatcctgcagctggtgggcgacgccgtgcacccccagttcaaggagatccagaagctgatcaaggagcccgcccccgacagcggcctgctgggcctgttccagggccagaacagcctgctgcactag

SEQ ID NO: 85829 - DNA, 1101 bp, synthetic construct
  misc_feature 1..1101: note = Description of Artificial Sequence: Synthetic coding sequence
  source 1..1101: mol_type = other DNA
atggccggccccgcctggatcagcaaggtgagcagactgctgggcgccttccacaaccccaagcaggtgaccagaggcttcaccggcggcgtgcagaccgtgaccctgatccccggcgacggcatcggccccgagatcagcgccgccgtgatgaagatcttcgacgccgccaaggcccccatccagtgggaggagagaaacgtgaccgccatccagggccccggcggcaagtggatgatccccagcgaggccaaggagagcatggacaagaacaagatgggcctgaagggccccctgaagacccccatcgccgccggccaccccagcatgaacctgctgctgagaaagaccttcgacctgtacgccaacgtgagaccctgcgtgagcatcgagggctacaagaccccctacaccgacgtgaacatcgtgaccatcagagagaacaccgagggcgagtacagcggcatcgagcacgtgatcgtggacggcgtggtgcagagcatcaagctgatcaccgagggcgccagcaagagaatcgccgagttcgccttcgagtacgccagaaacaaccacagaagcaacgtgaccgccgtgcacaaggccaacatcatgagaatgagcgacggcctgttcctgcagaagtgcagagaggtggccgagagctgcaaggacatcaagttcaacgagatgtacctggacaccgtgtgcctgaacatggtgcaggaccccagccagttcgacgtgctggtgatgcccaacctgtacggcgacatcctgagcgacctgtgcgccggcctgatcggcggcctgggcgtgacccccagcggcaacatcggcgccaacggcgtggccatcttcgagagcgtgcacggcaccgcccccgacatcgccggcaaggacatggccaaccccaccgccctgctgctgagcgccgtgatgatgctgagacacatgggcctgttcgaccacgccgccagaatcgaggccgcctgcttcgccaccatcaaggacggcaagagcctgaccaaggacctgggcggcaacgccaagtgcagcgacttcaccgaggagatctgcagaagagtgaaggacctggactag

SEQ ID NO: 85830 - DNA, 774 bp, synthetic construct
  misc_feature 1..774: note = Description of Artificial Sequence: Synthetic coding sequence
  source 1..774: mol_type = other DNA
atgaacctgctgctgagaaagaccttcgacctgtacgccaacgtgagaccctgcgtgagcatcgagggctacaagaccccctacaccgacgtgaacatcgtgaccatcagagagaacaccgagggcgagtacagcggcatcgagcacgtgatcgtggacggcgtggtgcagagcatcaagctgatcaccgagggcgccagcaagagaatcgccgagttcgccttcgagtacgccagaaacaaccacagaagcaacgtgaccgccgtgcacaaggccaacatcatgagaatgagcgacggcctgttcctgcagaagtgcagagaggtggccgagagctgcaaggacatcaagttcaacgagatgtacctggacaccgtgtgcctgaacatggtgcaggaccccagccagttcgacgtgctggtgatgcccaacctgtacggcgacatcctgagcgacctgtgcgccggcctgatcggcggcctgggcgtgacccccagcggcaacatcggcgccaacggcgtggccatcttcgagagcgtgcacggcaccgcccccgacatcgccggcaaggacatggccaaccccaccgccctgctgctgagcgccgtgatgatgctgagacacatgggcctgttcgaccacgccgccagaatcgaggccgcctgcttcgccaccatcaaggacggcaagagcctgaccaaggacctgggcggcaacgccaagtgcagcgacttcaccgaggagatctgcagaagagtgaaggacctggactag

SEQ ID NO: 85831 - DNA, 495 bp, synthetic construct
  misc_feature 1..495: note = Description of Artificial Sequence: Synthetic coding sequence
  source 1..495: mol_type = other DNA
atggccgccctgagcggcgtgagatggctgaccagagccctggtgagcgccggcaaccccggcgcctggagaggcctgagcaccagcgccgccgcccacgccgccagcagaagccaggccgaggacgtgagagtggagggcagcttccccgtgaccatgctgcccggcgacggcgtgggccccgagctgatgcacgccgtgaaggaggtgttcaaggccgccgccgtgcccgtggagttccaggagcaccacctgagcgaggtgcagaacatggccagcgaggagaagctggagcaggtgctgagcagcatgaaggagaacaaggtggccatcatcggcaagatccacacccccatggagtacaagggcgagctggccagctacgacatgagactgagaagaaagctggacctgttcgccaacgtggtgcacgtgaagagcctgcccggctacgacagcgcccagcagagcagacccggcgaccacagcagatag

SEQ ID NO: 85832 - DNA, 1158 bp, synthetic construct
  misc_feature 1..1158: note = Description of Artificial Sequence: Synthetic coding sequence
  source 1..1158: mol_type = other DNA
atggccgccctgagcggcgtgagatggctgaccagagccctggtgagcgccggcaaccccggcgcctggagaggcctgagcaccagcgccgccgcccacgccgccagcagaagccaggccgaggacgtgagagtggagggcagcttccccgtgaccatgctgcccggcgacggcgtgggccccgagctgatgcacgccgtgaaggaggtgttcaaggccgccgccgtgcccgtggagttccaggagcaccacctgagcgaggtgcagaacatggccagcgaggagaagctggagcaggtgctgagcagcatgaaggagaacaaggtggccatcatcggcaagatccacacccccatggagtacaagggcgagctggccagctacgacatgagactgagaagaaagctggacctgttcgccaacgtggtgcacgtgaagagcctgcccggctacatgaccagacacaacaacctggacctggtgatcatcagagagcagaccgagggcgagtacagcagcctggagcacgagagcgccagaggcgtgatcgagtgcctgaagatcgtgaccagagccaagagccagagaatcgccaagttcgccttcgactacgccaccaagaagggcagaggcaaggtgaccgccgtgcacaaggccaacatcatgaagctgggcgacggcctgttcctgcagtgctgcgaggaggtggccgagctgtaccccaagatcaagttcgagaccatgatcatcgacaactgctgcatgcagctggtgcagaacccctaccagttcgacgtgctggtgatgcccaacctgtacggcaacatcatcgacaacctggccgccggcctggtgggcggcgccggcgtggtgcccggcgagagctacagcgccgagtacgccgtgttcgagaccggcgccagacaccccttcgcccaggccgtgggcagaaacatcgccaaccccaccgccatgctgctgagcgccagcaacatgctgagacacctgaacctggagtaccacagcagcatgatcgccgacgccgtgaagaaggtgatcaaggtgggcaaggtgagaaccagagacatgggcggctacagcaccaccaccgacttcatcaagagcgtgatcggccacctgcagaccaagggcagctag

SEQ ID NO: 85833 - DNA, 1152 bp, synthetic construct
  misc_feature 1..1152: note = Description of Artificial Sequence: Synthetic coding sequence
  source 1..1152: mol_type = other DNA
atggccgccctgagcggcgtgagatggctgaccagagccctggtgagcgccggcaaccccggcgcctggagaggcctgagcaccagcgccgccgcccacgccgccagcagaagccaggccgaggacgtgagagtggagggcagcttccccgtgaccatgctgcccggcgacggcgtgggccccgagctgatgcacgccgtgaaggaggtgttcaaggccgccgccgtgcccgtggagttccaggagcaccacctgagcgaggtgcagaacatggccagcgaggagaagctggagcaggtgctgagcagcatgaaggagaacaaggtggccatcatcggcaagatccacacccccatggagtacaagggcgagctggccagctacgacatgagactgagaagaaagctggacctgttcgccaacgtggtgcacgtgaagagcctgcccggctacatgaccagacacaacaacctggacctggtgatcatcagagagcagaccgagggcgagtacagcagcctggagcacgagagcgccagaggcgtgatcgagtgcctgaagatcgtgaccagagccaagagccagagaatcgccaagttcgccttcgactacgccaccaagaagggcagaggcaaggtgaccgccgtgcacaaggccaacatcatgaagctgggcgacggcctgttcctgcagtgctgcgaggaggtggccgagctgtaccccaagatcaagttcgagaccatgatcatcgacaactgctgcatgcagctggtgcagaacccctaccagttcgacgtgctggtgatgcccaacctgtacggcaacatcatcgacaacctggccgccggcctggtgggcggcgccggcgtggtgcccggcgagagctacagcgccgagtacgccgtgttcgagaccggcgccagacaccccttcgcccaggccgtgggcagaaacatcgccaaccccaccgccatgctgctgagcgccagcaacatgctgagacacctgaacctggagtaccacagcagcatgatcgccgacgccgtgaagaaggtgatcaaggtgggcaaggtgagaaccagcgacatgggcggctacgccacctgccacgacttcaccgaggccgtgatcgccgccctgccccacccctag

SEQ ID NO: 85834 - DNA, 702 bp, synthetic construct
  misc_feature 1..702: note = Description of Artificial Sequence: Synthetic coding sequence
  source 1..702: mol_type = other DNA
atgaagatgggcgagagatggagcagcctgttccccttccccgtgagccccagctgctgcttcctgctgacccagagcgccagaggcgtgatcgagtgcctgaagatcgtgaccagagccaagagccagagaatcgccaagttcgccttcgactacgccaccaagaagggcagaggcaaggtgaccgccgtgcacaaggccaacatcatgaagctgggcgacggcctgttcctgcagtgctgcgaggaggtggccgagctgtaccccaagatcaagttcgagaccatgatcatcgacaactgctgcatgcagctggtgcagaacccctaccagttcgacgtgctggtgatgcccaacctgtacggcaacatcatcgacaacctggccgccggcctggtgggcggcgccggcgtggtgcccggcgagagctacagcgccgagtacgccgtgttcgagaccggcgccagacaccccttcgcccaggccgtgggcagaaacatcgccaaccccaccgccatgctgctgagcgccagcaacatgctgagacacctgaacctggagtaccacagcagcatgatcgccgacgccgtgaagaaggtgatcaaggtgggcaaggtgagaaccagagacatgggcggctacagcaccaccaccgacttcatcaagagcgtgatcggccacctgcagaccaagggcagctag

SEQ ID NO: 85835 - DNA, 795 bp, synthetic construct
  misc_feature 1..795: note = Description of Artificial Sequence: Synthetic coding sequence
  source 1..795: mol_type = other DNA
atggagagcggcaagaccgccagccccaagagcatgcccaaggacgcccagatgatggcccagatcctgaaggacatgggcatcaccgagtacgagcccagagtgatcaaccagatgctggagttcgccttcagatacgtgaccaccatcctggacgacgccaagatctacagcagccacgccaagaaggccaccgtggacgccgacgacgtgagactggccatccagtgcagagccgaccagagcttcaccagccccccccccagagacttcctgctggacatcgccagacagagaaaccagacccccctgcccctgatcaagccctacagcggccccagactgccccccgacagatactgcctgaccgcccccaactacagactgaagagcctgcagaagaaggccagcaccagcgccggcagaatcaccgtgcccagactgagcgtgggcagcgtgaccagcagacccagcacccccaccctgggcacccccaccccccagaccatgagcgtgagcaccaaggtgggcacccccatgagcctgaccggccagagattcaccgtgcagatgcccaccagccagagccccgccgtgaaggccagcatccccgccaccagcgccgtgcagaacgtgctgatcaaccccagcctgatcggcagcaagaacatcctgatcaccaccaacatgatgagcagccagaacaccgccaacgagagcagcaacgccctgaagagaaagagagaggacgacgacgacgacgacgacgacgacgacgactacgacaacctgtag

SEQ ID NO: 85836 - DNA, 906 bp, synthetic construct
  misc_feature 1..906: note = Description of Artificial Sequence: Synthetic coding sequence
  source 1..906: mol_type = other DNA
atggccatcagaagaaacagagtggccctgaagggcaacatcgagaccaaccacaacctgccccccagccacaagagcagaaacaacatcctgagaaccagcctggacctgtacgccaacgtgatccactgcaagagcctgcccggcgtggtgaccagacacaaggacatcgacatcctgatcgtgagagagaacaccgagggcgagtacagcagcctggagcacgagagcgtggccggcgtggtggagagcctgaagatcatcaccaaggccaagagcctgagaatcgccgagtacgccttcaagctggcccaggagagcggcagaaagaaggtgaccgccgtgcacaaggccaacatcatgaagctgggcgacggcctgttcctgcagtgctgcagagaggtggccgccagatacccccagatcaccttcgagaacatgatcgtggacaacaccaccatgcagctggtgagcagaccccagcagttcgacgtgatggtgatgcccaacctgtacggcaacatcgtgaacaacgtgtgcgccggcctggtgggcggccccggcctggtggccggcgccaactacggccacgtgtacgccgtgttcgagaccgccaccagaaacaccggcaagagcatcgccaacaagaacatcgccaaccccaccgccaccctgctggccagctgcatgatgctggaccacctgaagctgcacagctacgccaccagcatcagaaaggccgtgctggccagcatggacaacgagaacggcctggtgtgcgccgagcccgcctgcgtgctgcagatgcacacccccgacatcggcggccagggcaccaccagcgaggccatccaggacgtgatcagacacatcagagtgatcaacggcagagccgtggaggcctag

SEQ ID NO: 85837 - DNA, 1143 bp, synthetic construct
  misc_feature 1..1143: note = Description of Artificial Sequence: Synthetic coding sequence
  source 1..1143: mol_type = other DNA
atggccctgaaggtggccaccgtggccggcagcgccgccaaggccgtgctgggccccgccctgctgtgcagaccctgggaggtgctgggcgcccacgaggtgcccagcagaaacatcttcagcgagcagaccatcccccccagcgccaagtacggcggcagacacaccgtgaccatgatccccggcgacggcatcggccccgagctgatgctgcacgtgaagagcgtgttcagacacgcctgcgtgcccgtggacttcgaggaggtgcacgtgagcagcaacgccgacgaggaggacatcagaaacgccatcatggccatcagaagaaacagagtggccctgaagggcaacatcgagaccaaccacaacctgccccccagccacaagagcagaaacaacatcctgagaaccagcctggacctgtacgccaacgtgatccactgcaagagcctgcccggcgtggtgaccagacacaaggacatcgacatcctgatcgtgagagagaacaccgagggcgagtacagcagcctggagcacgagagcgtggccggcgtggtggagagcctgaagatcatcaccaaggccaagagcctgagaatcgccgagtacgccttcaagctggcccaggagagcggcagaaagaaggtgaccgccgtgcacaaggccaacatcatgaagctgggcgacggcctgttcctgcagtgctgcagagaggtggccgccagatacccccagatcaccttcgagaacatgatcgtggacaacaccaccatgcagctggtgagcagaccccagcagttcgacgtgatggtgatgcccaacctgtacggcaacatcgtgaacaacgtgtgcgccggcctggtgggcggccccggcctggtggccggcgccaactacggccacgtgtacgccgtgttcgagaccgccaccagaaacaccggcaagagcatcgccaacaagaacatcgccaaccccaccgccaccctgctggccagctgcatgatgctggaccacctgaagctgcacagctacgccaccagcatcagaaaggccgtgctggccagcatggacaacgagaacgtgagattccccagccaccccaccctgctgcccagacccgtgagcccctgcagcctgctgtag

SEQ ID NO: 85838 - DNA, 525 bp, synthetic construct
  misc_feature 1..525: note = Description of Artificial Sequence: Synthetic coding sequence
  source 1..525: mol_type = other DNA
atgtacaccttcgaccaggccaccggcggcaccgcccagttcgaggcccacagcgacgcccaggccctggtgctgctggacgtgacccccgaccagagcatggtggacgagggcatggccagagaggtgatcaacagaatccagaagctgagaaagaagtgcaacctggtgcccaccgacgagatcaccgtgtactacaaggccaagagcgagggcacctacctgaacagcgtgatcgagagccacaccgagttcatcttcaccaccatcaaggcccccctgaagccctaccccgtgagccccagcgacaaggtgctgatccaggagaagacccagctgaagggcagcgagctggagatcaccctgaccagaggcagcagcctgcccggccccgcctgcgcctacgtgaacctgaacatctgcgccaacggcagcgagcagggcgagatgcagtggatcatccccgagatctaccacttctggaagcccagatggagcatcgcccccggcaagagcaagagatag

SEQ ID NO: 85839 - DNA, 525 bp, synthetic construct; identical to SEQ ID NO: 85838
  misc_feature 1..525: note = Description of Artificial Sequence: Synthetic coding sequence
  source 1..525: mol_type = other DNA

SEQ ID NO: 85840 - DNA, 3789 bp, synthetic construct
  misc_feature 1..3789: note = Description of Artificial Sequence: Synthetic coding sequence
  source 1..3789: mol_type = other DNA
atgctgcagcaggtgcccgagaacatcaacttccccgccgaggaggagaagatcctggagttctggaccgagttcaactgcttccaggagtgcctgaagcagagcaagcacaagcccaagttcaccttctacgacggcccccccttcgccaccggcctgccccactacggccacatcctggccggcaccatcaaggacatcgtgaccagatacgcccaccagagcggcttccacgtggacagaagattcggctgggactgccacggcctgcccgtggagtacgagatcgacaagaccctgggcatcagaggccccgaggacgtggccaagatgggcatcaccgagtacaacaaccagtgcagagccatcgtgatgagatacagcgccgagtggaagagcaccgtgagcagactgggcagatggatcgacttcgacaacgactacaagaccctgtacccccagttcatggagagcgtgtggtgggtgttcaagcagctgtacgacaagggcctggtgtacagaggcgtgaaggtgatgcccttcagcaccgcctgcaacacccccctgagcaacttcgagagccaccagaactacaaggacgtgcaggaccccagcgtgttcgtgaccttccccctggaggaggacgagaccgtgagcctggtggcctggaccaccaccccctggaccctgcccagcaacctggccgtgtgcgtgaaccccgagatgcagtacgtgaagatcaaggacgtggccagaggcagactgctgatcctgatggaggccagactgagcgccctgtacaagctggagagcgactacgagatcctggagagattccccggcgcctacctgaagggcaagaagtacagacccctgttcgactacttcctgaagtgcaaggagaacggcgccttcaccgtgctggtggacaactacgtgaaggaggaggagggcaccggcgtggtgcaccaggccccctacttcggcgccgaggactacagagtgtgcatggacttcaacatcatcagaaaggacagcctgcccgtgtgccccgtggacgccagcggctgcttcaccaccgaggtgaccgacttcgccggccagtacgtgaaggacgccgacaagagcatcatcagaaccctgaaggagcagggcagactgctggtggccaccaccttcacccacagctaccccttctgctggagaagcgacacccccctgatctacaaggccgtgcccagctggttcgtgagagtggagaacatggtggaccagctgctgagaaacaacgacctgtgctactgggtgcccgagctggtgagagagaagagattcggcaactggctgaaggacgccagagactggaccatcagcagaaacagatactggggcacccccatccccctgtgggtgagcgacgacttcgaggaggtggtgtgcatcggcagcgtggccgagctggaggagctgagcggcgccaagatcagcgacctgcacagagagagcgtggaccacctgaccatccccagcagatgcggcaagggcagcctgcacagaatcagcgaggtgttcgactgctggttcgagagcggcagcatgccctacgcccaggtgcactaccccttcgagaacaagagagagttcgaggacgccttccccgccgacttcatcgccgagggcatcgaccagaccagaggctggttctacaccctgctggtgctggccaccgccctgttcggccagccccccttcaagaacgtgatcgtgaacggcctggtgctggccagcgacggccagaagatgagcaagagaaagaagaactaccccgaccccgtgagcatcatccagaagtacggcgccgacgccctgagactgtacctgatcaacagccccgtggtgagagccgagaacctgagattcaaggaggagggcgtgagagacgtgctgaaggacgtgctgctgccctggtacaacgcctacagattcctgatccagaacgtgctgagactgcagaaggaggaggagatcgagttcctgtacaacgagaacaccgtgagagagagccccaacatcaccgacagatggatcctgagcttcatgcagagcctgatcggcttcttcgagaccgagatggccgcctacagactgtacaccgtggtgcccagactggtgaagttcgtggacatcctgaccaactggtacgtgagaatgaacagaagaagactgaagggcgagaacggcatggaggactgcgtgatggccctggagaccctgttcagcgtgctgctgagcctgtgcagactgatggccccctacacccccttcctgaccgagctgatgtaccagaacctgaaggtgctgatcgaccccgtgagcgtgcaggacaaggacaccctgagcatccactacctgatgctgcccagagtgagagaggagctgatcgacaagaagaccgagagcgccgtgagccagatgcagagcgtgatcgagctgggcagagtgatcagagacagaaagaccatccccatcaagtaccccctgaaggagatcgtggtgatccaccaggaccccgaggccctgaaggacatcaagagcctggagaagtacatcatcgaggagctgaacgtgagaaaggtgaccctgagcaccgacaagaacaagtacggcatcagactgagagccgagcccgaccacatggtgctgggcaagagactgaagggcgccttcaaggccgtgatgaccagcatcaagcagctgagcagcgaggagctggagcagttccagaagaccggcaccatcgtggtggagggccacgagctgcacgacgaggacatcagactgatgtacaccttcgaccaggccaccggcggcaccgcccagttcgaggcccacagcgacgcccaggccctggtgctgctggacgtgacccccgaccagagcatggtggacgagggcatggccagagaggtgatcaacagaatccagaagctgagaaagaagtgcaacctggtgcccaccgacgagatcaccgtgtactacaaggccaagagcgagggcacctacctgaacagcgtgatcgagagccacaccgagttcatcttcaccaccatcaaggcccccctgaagccctaccccgtgagccccagcgacaaggtgctgatccaggagaagacccagctgaagggcagcgagctggagatcaccctgaccagaggcagcagcctgcccggccccgcctgcgcctacgtgaacctgaacatctgcgccaacggcagcgagcagggcggcgtgctgctgctggagaaccccaagggcgacaacagactggacctgctgaagctgaagagcgtggtgaccagcatcttcggcgtgaagaacaccgagctggccgtgttccacgacgagaccgagatccagaaccagaccgacctgctgagcctgagcggcaagaccctgtgcgtgaccgccggcagcgcccccagcctgatcaacagcagcagcaccctgctgtgccagtacatcaacctgcagctgctgaacgccaagccccaggagtgcctgatgggcaccgtgggcaccctgctgctggagaaccccctgggccagaacggcctgacccaccagggcctgctgtacgaggccgccaaggtgttcggcctgagaagcagaaagctgaagctgttcctgaacgagacccagacccaggagatcaccgaggacatccccgtgaagaccctgaacatgaagaccgtgtacgtgagcgtgctgcccaccaccgccgacttctag

SEQ ID NO: 85841 - DNA, 3729 bp, synthetic construct
  misc_feature 1..3729: note = Description of Artificial Sequence: Synthetic coding sequence
  source 1..3729: mol_type = other DNA
atgctgcagcaggtgcccgagaacatcaacttccccgccgaggaggagaagatcctggagttctggaccgagttcaactgcttccaggagtgcctgaagcagagcaagcacaagcccaagttcaccttctacgacggcccccccttcgccaccggcctgccccactacggccacatcctggccggcaccatcaaggacatcgtgaccagatacgcccaccagagcggcttccacgtggacagaagattcggctgggactgccacggcctgcccgtggagtacgagatcgacaagaccctgggcatcagaggccccgaggacgtggccaagatgggcatcaccgagtacaacaaccagtgcagagccatcgtgatgagatacagcgccgagtggaagagcaccgtgagcagactgggcagatggatcgacttcgacaacgactacaagaccctgtacccccagttcatggagagcgtgtggtgggtgttcaagcagctgtacgacaagggcctggtgtacagaggcgtgaaggtgatgcccttcagcaccgcctgcaacacccccctgagcaacttcgagagccaccagaactacaaggacgtgcaggaccccagcgtgttcgtgaccttccccctggaggaggacgagaccgtgagcctggtggcctggaccaccaccccctggaccctgcccagcaacctggccgtgtgcgtgaaccccgagatgcagtacgtgaagatcaaggacgtggccagaggcagactgctgatcctgatggaggccagactgagcgccctgtacaagctggagagcgactacgagatcctggagagattccccggcgcctacctgaagggcaagaagtacagacccctgttcgactacttcctgaagtgcaaggagaacggcgccttcaccgtgctggtggacaactacgtgaaggaggaggagggcaccggcgtggtgcaccaggccccctacttcggcgccgaggactacagagtgtgcatggacttcaacatcatcagaaaggacagcctgcccgtgtgccccgtggacgccagcggctgcttcaccaccgaggtgaccgacttcgccggccagtacgtgaaggacgccgacaagagcatcatcagaaccctgaaggagcagggcagactgctggtggccaccaccttcacccacagctaccccttctgctggagaagcgacacccccctgatctacaaggccgtgcccagctggttcgtgagagtggagaacatggtggaccagctgctgagaaacaacgacctgtgctactgggtgcccgagctggtgagagagaagagattcggcaactggctgaaggacgccagagactggaccatcagcagaaacagatactggggcacccccatccccctgtgggtgagcgacgacttcgaggaggtggtgtgcatcggcagcgtggccgagctggaggagctgagcggcgccaagatcagcgacctgcacagagagagcgtggaccacctgaccatccccagcagatgcggcaagggcagcctgcacagaatcagcgaggtgttcgactgctggttcgagagcggcagcatgccctacgcccaggtgcactaccccttcgagaacaagagagagttcgaggacgccttccccgccgacttcatcgccgagggcatcgaccagaccagaggctggttctacaccctgctggtgctggccaccgccctgttcggccagccccccttcaagaacgtgatcgtgaacggcctggtgctggccagcgacggccagaagatgagcaagagaaagaagaactaccccgaccccgtgagcatcatccagaagtacggcgccgacgccctgagactgtacctgatcaacagccccgtggtgagagccgagaacctgagattcaaggaggagggcgtgagagacgtgctgaaggacgtgctgctgccctggtacaacgcctacagattcctgatccagaacgtgctgagactgcagaaggaggaggagatcgagttcctgtacaacgagaacaccgtgagagagagccccaacatcaccgacagatggatcctgagcttcatgcagagcctgatcggcttcttcgagaccgagatggccgcctacagactgtacaccgtggtgcccagactggtgaagttcgtggacatcctgaccaactggtacgtgagaatgaacagaagaagactgaagggcgagaacggcatggaggactgcgtgatggccctggagaccctgttcagcgtgctgctgagcctgtgcagactgatggccccctacacccccttcctgaccgagctgatgtaccagaacctgaaggtgctgatcgaccccgtgagcgtgcaggacaaggacaccctgagcatccactacctgatgctgcccagagtgagagaggagctgatcgacaagaagaccgagagcgccgtgagccagatgcagagcgtgatcgagctgggcagagtgatcagagacagaaagaccatccccatcaagtaccccctgaaggagatcgtggtgatccaccaggaccccgaggccctgaaggacatcaagagcctggagaagtacatcatcgaggagctgaacgtgagaaaggtgaccctgagcaccgacaagaacaagtacggcatcagactgagagccgagcccgaccacatggtgctgggcaagagactgaagggcgccttcaaggccgtgatgaccagcatcaagcagctgagcagcgaggagctggagcagttccagaagaccggcaccatcgtggtggagggccacgagctgcacgacgaggacatcagactgatgtacaccttcgaccaggccaccggcggcaccgcccagttcgaggcccacagcgacgcccaggccctggtgctgctggacgtgacccccgaccagagcatggtggacgagggcatggccagagaggtgatcaacagaatccagaagctgagaaagaagtgcaacctggtgcccaccgacgagatcaccgtgtactacaaggccaagagcgagggcacctacctgaacagcgtgatcgagagccacaccgagttcatcttcaccaccatcaaggcccccctgaagccctaccccgtgagccccagcgacaaggtgctgatccaggagaagacccagctgaagggcagcgagctggagatcaccctgaccagaggcagcagcctgcccggccccgcctgcgcctacgtgaacctgaacatctgcgccaacggcagcgagcagggcggcgtgctgctgctggagaaccccaagggcgacaacagactggacctgctgaagctgaagagcgtggtgaccagcatcttcggcgtgaagaacaccgagctggccgtgttccacgacgagaccgagatccagaaccagaccgacctgctgagcctgagcggcaagaccctgtgcgtgaccgccggcagcgcccccagcctgatcaacagcagcagcaccctgctgtgccagtacatcaacctgcagctgctgaacgccaagccccaggagtgcctgatgggcaccgtgggcaccctgctgctggagaaccccctgggccagaacggcctgacccaccagggcctgctgtacgaggccgccaaggtgttcggcctgagaagcagaaagctgaagctgttcctgaacgagacccagacccaggagatcaccgaggacatcccctag

SEQ ID NO: 85842 - DNA, 993 bp, synthetic construct
  misc_feature 1..993: note = Description of Artificial Sequence: Synthetic coding sequence
  source 1..993: mol_type = other DNA
atgctgcagcaggtgcccgagaacatcaacttccccgccgaggaggagaagatcctggagttctggaccgagttcaactgcttccaggagtgcctgaagcagagcaagcacaagcccaagttcaccttctacgacggcccccccttcgccaccggcctgccccactacggccacatcctggccggcaccatcaaggacatcgtgaccagatacgcccaccagagcggcttccacgtggacagaagattcggctgggactgccacggcctgcccgtggagtacgagatcgacaagaccctgggcatcagaggccccgaggacgtggccaagatgggcatcaccgagtacaacaaccagtgcagagccatcgtgatgagatacagcgccgagtggaagagcaccgtgagcagactgggcagatggatcgacttcgacaacgactacaagaccctgtacccccagttcatggagagcgtgtggtgggtgttcaagcagctgtacgacaagggcctggtgtacagaggcgtgaaggtgatgcccttcagcaccgcctgcaacacccccctgagcaacttcgagagccaccagaactacaaggacgtgcaggaccccagcgtgttcgtgaccttccccctggaggaggacgagaccgtgagcctggtggcctggaccaccaccccctggaccctgcccagcaacctggccgtgtgcgtgaaccccgagatgcagtacgtgaagatcaaggacgtggccagaggcagactgctgatcctgatggaggccagactgagcgccctgtacaagctggagagcgactacgagatcctggagagattccccggcgcctacctgaagggcaagaagtacagacccctgttcgactacttcctgaagtgcaaggagaacggcgccttcaccgtgctggtggacaactacgtgaaggaggaggagggcaccggcgtggtgcaccaggccccctacttcggcgcctag

SEQ ID NO: 85843 - DNA, 513 bp, synthetic construct
  misc_feature 1..513: note = Description of Artificial Sequence: Synthetic coding sequence
  source 1..513: mol_type = other DNA
atggccccctacacccccttcctgaccgagctgatgtaccagaacctgaaggtgctgatcgaccccgtgagcgtgcaggacaaggacaccctgagcatccactacctgatgctgcccagagtgagagaggagctgatcgacaagaagaccgagagcgccgtgagccagatgcagagcgtgatcgagctgggcagagtgatcagagacagaaagaccatccccatcaagctgaagggcagcgagctggagatcaccctgaccagaggcagcagcctgcccggccccgcctgcgcctacgtgaacctgaacatctgcgccaacggcagcgagcagggcggcgtgctgctgctggagaaccccaagggcgacaacagactggacctgctgaagctgaagagcgtggtgaccagcatcttcggcgtgaagaacaccgagctggccgtgttccacgacgagaccgagatccagaaccagaccgacctgctgagcctgagcggcaagaccctgtgctag

SEQ ID NO: 85844 - DNA, 3789 bp, synthetic construct; identical to SEQ ID NO: 85840
  misc_feature 1..3789: note = Description of Artificial Sequence: Synthetic coding sequence
  source 1..3789: mol_type = other DNA

SEQ ID NO: 85845 - DNA, 3459 bp, synthetic construct
  misc_feature 1..3459: note = Description of Artificial Sequence: Synthetic coding sequence
  source 1..3459: mol_type = other DNA
atgggcatcaccgagtacaacaaccagtgcagagccatcgtgatgagatacagcgccgagtggaagagcaccgtgagcagactgggcagatggatcgacttcgacaacgactacaagaccctgtacccccagttcatggagagcgtgtggtgggtgttcaagcagctgtacgacaagggcctggtgtacagaggcgtgaaggtgatgcccttcagcaccgcctgcaacacccccctgagcaacttcgagagccaccagaactacaaggacgtgcaggaccccagcgtgttcgtgaccttccccctggaggaggacgagaccgtgagcctggtggcctggaccaccaccccctggaccctgcccagcaacctggccgtgtgcgtgaaccccgagatgcagtacgtgaagatcaaggacgtggccagaggcagactgctgatcctgatggaggccagactgagcgccctgtacaagctggagagcgactacgagatcctggagagattccccggcgcctacctgaagggcaagaagtacagacccctgttcgactacttcctgaagtgcaaggagaacggcgccttcaccgtgctggtggacaactacgtgaaggaggaggagggcaccggcgtggtgcaccaggccccctacttcggcgccgaggactacagagtgtgcatggacttcaacatcatcagaaaggacagcctgcccgtgtgccccgtggacgccagcggctgcttcaccaccgaggtgaccgacttcgccggccagtacgtgaaggacgccgacaagagcatcatcagaaccctgaaggagcagggcagactgctggtggccaccaccttcacccacagctaccccttctgctggagaagcgacacccccctgatctacaaggccgtgcccagctggttcgtgagagtggagaacatggtggaccagctgctgagaaacaacgacctgtgctactgggtgcccgagctggtgagagagaagagattcggcaactggctgaaggacgccagagactggaccatcagcagaaacagatactggggcacccccatccccctgtgggtgagcgacgacttcgaggaggtggtgtgcatcggcagcgtggccgagctggaggagctgagcggcgccaagatcagcgacctgcacagagagagcgtggaccacctgaccatccccagcagatgcggcaagggcagcctgcacagaatcagcgaggtgttcgactgctggttcgagagcggcagcatgccctacgcccaggtgcactaccccttcgagaacaagagagagttcgaggacgccttccccgccgacttcatcgccgagggcatcgaccagaccagaggctggttctacaccctgctggtgctggccaccgccctgttcggccagccccccttcaagaacgtgatcgtgaacggcctggtgctggccagcgacggccagaagatgagcaagagaaagaagaactaccccgaccccgtgagcatcatccagaagtacggcgccgacgccctgagactgtacctgatcaacagccccgtggtgagagccgagaacctgagattcaaggaggagggcgtgagagacgtgctgaaggacgtgctgctgccctggtacaacgcctacagattcctgatccagaacgtgctgagactgcagaaggaggaggagatcgagttcctgtacaacgagaacaccgtgagagagagccccaacatcaccgacagatggatcctgagcttcatgcagagcctgatcggcttcttcgagaccgagatggccgcctacagactgtacaccgtggtgcccagactggtgaagttcgtggacatcctgaccaactggtacgtgagaatgaacagaagaagactgaagggcgagaacggcatggaggactgcgtgatggccctggagaccctgttcagcgtgctgctgagcctgtgcagactgatggccccctacacccccttcctgaccgagctgatgtaccagaacctgaaggtgctgatcgaccccgtgagcgtgcaggacaaggacaccctgagcatccactacctgatgctgcccagagtgagagaggagctgatcgacaagaagaccgagagcgccgtgagccagatgcagagcgtgatcgagctgggcagagtgatcagagacagaaagaccatccccatcaagtaccccctgaaggagatcgtggtgatccaccaggaccccgaggccctgaaggacatcaagagcctggagaagtacatcatcgaggagctgaacgtgagaaaggtgaccctgagcaccgacaagaacaagtacggcatcagactgagagccgagcccgaccacatggtgctgggcaagagactgaagggcgccttcaaggccgtgatgaccagcatcaagcagctgagcagcgaggagctggagcagttccagaagaccggcaccatcgtggtggagggccacgagctgcacgacgaggacatcagactgatgtacaccttcgaccaggccaccggcggcaccgcccagttcgaggcccacagcgacgcccaggccctggtgctgctggacgtgacccccgaccagagcatggtggacgagggcatggccagagaggtgatcaacagaatccagaagctgagaaagaagtgcaacctggtgcccaccgacgagatcaccgtgtactacaaggccaagagcgagggcacctacctgaacagcgtgatcgagagccacaccgagttcatcttcaccaccatcaaggcccccctgaagccctaccccgtgagccccagcgacaaggtgctgatccaggagaagacccagctgaagggcagcgagctggagatcaccctgaccagaggcagcagcctgcccggccccgcctgcgcctacgtgaacctgaacatctgcgccaacggcagcgagcagggcggcgtgctgctgctggagaaccccaagggcgacaacagactggacctgctgaagctgaagagcgtggtgaccagcatcttcggcgtgaagaacaccgagctggccgtgttccacgacgagaccgagatccagaaccagaccgacctgctgagcctgagcggcaagaccctgtgcgtgaccgccggcagcgcccccagcctgatcaacagcagcagcaccctgctgtgccagtacatcaacctgcagctgctgaacgccaagccccaggagtgcctgatgggcaccgtgggcaccctgctgctggagaaccccctgggccagaacggcctgacccaccagggcctgctgtacgaggccgccaaggtgttcggcctgagaagcagaaagctgaagctgttcctgaacgagacccagacccaggagatcaccgaggacatccccgtgaagaccctgaacatgaagaccgtgtacgtgagcgtgctgcccaccaccgccgacttctag

SEQ ID NO: 85846 - DNA, 750 bp, synthetic construct
  misc_feature 1..750: note = Description of Artificial Sequence: Synthetic coding sequence
  source 1..750: mol_type = other DNA
atggccccctacacccccttcctgaccgagctgatgtaccagaacctgaaggtgctgatcgaccccgtgagcgtgcaggacaaggacaccctgagcatccactacctgatgctgcccagagtgagagaggagctgatcgacaagaagaccgagagcgccgtgagccagatgcagagcgtgatcgagctgggcagagtgatcagagacagaaagaccatccccatcaagtaccccctgaaggagatcgtggtgatccaccaggaccccgaggccctgaaggacatcaagagcctggagaagtacatcatcgaggagctgaacgtgagaaaggtgaccctgagcaccgacaagaacaagtacggcatcagactgagagccgagcccgaccacatggtgctgggcaagagactgaagggcgccttcaaggccgtgatgaccagcatcaagcagctgagcagcgaggagctggagcagttccagaagaccggcaccatcgtggtggagggccacgagctgcacgacgaggacatcagactgatgtacaccttcgaccaggccaccggcggcaccgcccagttcgaggcccacagcgacgcccaggccctggtgctgctggacgtgacccccgaccagagcatggtggacgagggcatggccagagaggtgatcaacagaatccagaagctgagaaagaagtgcaacctggtgcccaccgacgagatcaccgtgtactacaaggccaagagctag

SEQ ID NO: 85847 - DNA, 513 bp, synthetic construct; identical to SEQ ID NO: 85843
  misc_feature 1..513: note = Description of Artificial Sequence: Synthetic coding sequence
  source 1..513: mol_type = other DNA

SEQ ID NO: 85848 - DNA, 816 bp, synthetic construct
  misc_feature 1..816: note = Description of Artificial Sequence: Synthetic coding sequence
  source 1..816: mol_type = other DNA
atgatggtgctgctgctgcagctggactgcctgaccatggacatctacctgagagacaaggacaccctgagcatccactacctgatgctgcccagagtgagagaggagctgatcgacaagaagaccgagagcgccgtgagccagatgcagagcgtgatcgagctgggcagagtgatcagagacagaaagaccatccccatcaagctgaagggcagcgagctggagatcaccctgaccagaggcagcagcctgcccggccccgcctgcgcctacgtgaacctgaacatctgcgccaacggcagcgagcagggcggcgtgctgctgctggagaaccccaagggcgacaacagactggacctgctgaagctgaagagcgtggtgaccagcatcttcggcgtgaagaacaccgagctggccgtgttccacgacgagaccgagatccagaaccagaccgacctgctgagcctgagcggcaagaccctgtgcgtgaccgccggcagcgcccccagcctgatcaacagcagcagcaccctgctgtgccagtacatcaacctgcagctgctgaacgccaagccccaggagtgcctgatgggcaccgtgggcaccctgctgctggagaaccccctgggccagaacggcctgacccaccagggcctgctgtacgaggccgccaaggtgttcggcctgagaagcagaaagctgaagctgttcctgaacgagacccagacccaggagatcaccgaggacatccccgtgaagaccctgaacatgaagaccgtgtacgtgagcgtgctgcccaccaccgccgacttctag

SEQ ID NO: 85849 - DNA, 3039 bp, synthetic construct
  misc_feature 1..3039: note = Description of Artificial Sequence: Synthetic coding sequence
  source 1..3039: mol_type = other DNA
atgagatggggcctgagacccagaggccccggcgccgccgccctggccaccgccagaagcctgtggggcacccccagactgccctgcagccccggctggcagggcgccaccaagagactgctggtgagaagcgtgagcggcgccagcaaccaccagcccaacagcaacagcggcagatacagagacaccgtgctgctgccccagaccagcttccccatgaagctgctgggcagacagcagcccgacaccgagctggagatccagcagaagtgcggcttcagcgagctgtacagctggcagagagagagaaaggtgaagaccgagttctgcctgcacgacggccccccctacgccaacggcgacccccacgtgggccacgccctgaacaagatcctgaaggacatcgccaacagattccacatgatgaacggcagcaagatccacttcgtgcccggctgggactgccacggcctgcccatcgagatcaaggtgctgagcgagctgggcagagaggcccagaacctgagcgccatggagatcagaaagaaggccagaagcttcgccaaggccgccatcgagaagcagaagagcgccttcatcagatggggcatcatggccgactggaacaactgctactacaccttcgacggcaagtacgaggccaagcagctgagaaccttctaccagatgtacgacaagggcctggtgtacagaagctacaagcccgtgttctggagccccagcagcagaaccgccctggccgaggccgagctggagtacaaccccgagcacgtgagcagaagcatctacgtgaagttccccctgctgaagcccagccccaagctggccagcctgatcgacggcagcagccccgtgagcatcctggtgtggaccacccagccctggaccatccccgccaacgaggccgtgtgctacatgcccgagagcaagtacgccgtggtgaagtgcagcaagagcggcgacctgtacgtgctggccgccgacaaggtggccagcgtggccagcaccctggagaccaccttcgagaccatcagcaccctgagcggcgtggacctggagaacggcacctgcagccaccccctgatccccgacaaggccagccccctgctgcccgccaaccacgtgaccatggccaagggcaccggcctggtgcacaccgcccccgcccacggcatggaggactacggcgtggccagccagcacaacctgcccatggactgcctggtggacgaggacggcgtgttcaccgacgtggccggccccgagctgcagaacaaggccgtgctggaggagggcaccgacgtggtgatcaagatgctgcagaccgccaagaacctgctgaaggaggagaagctggtgcacagctacccctacgactggagaaccaagaagcccgtggtgatcagagccagcaagcagtggttcatcaacatcaccgacatcaagaccgccgccaaggagctgctgaagaaggtgaagttcatccccggcagcgccctgaacggcatggtggagatgatggacagaagaccctactggtgcatcagcagacagagagtgtggggcgtgcccatccccgtgttccaccacaagaccaaggacgagtacctgatcaacagccagaccaccgagcacatcgtgaagctggtggagcagcacggcagcgacatctggtggaccctgccccccgagcagctgctgcccaaggaggtgctgagcgaggtgggcggccccgacgccctggagtacgtgcccggccaggacatcctggacatctggttcgacagcggcaccagctggagctacgtgctgcccggccccgaccagagagccgacctgtacctggagggcaaggaccagctgggcggctggttccagagcagcctgctgaccagcgtggccgccagaaagagagccccctacaagaccgtgatcgtgcacggcttcaccctgggcgagaagggcgagaagatgagcaagagcctgggcaacgtgatccaccccgacgtggtggtgaacggcggccaggaccagagcaaggagcccccctacggcgccgacgtgctgagatggtgggtggccgacagcaacgtgttcaccgaggtggccatcggccccagcgtgctgaacgccgccagagacgacatcagcaagctgagaaacaccctgagattcctgctgggcaacgtggccgacttcaaccccgagaccgacagcatccccgtgaacgacatgtacgtgatcgaccagtacatgctgcacctgctgcaggacctggccaacaagatcaccgagctgtacaagcagtacgacttcggcaaggtggtgagactgctgagaaccttctacaccagagagctgagcaacttctacttcagcatcatcaaggacagactgtactgcgagaaggagaacgaccccaagagaagaagctgccagaccgccctggtggagatcctggacgtgatcgtgagaagcttcgcccccatcctgccccacctggccgaggaggtgttccagcacatcccctacatcaaggagcccaagagcgtgttcagaaccggctggatcagcaccagcagcatctggaagaagcccggcctggaggaggccgtggagagcgcctgcgccatgagagacagcttcctgggcagcatccccggcaagaacgccgccgagtacaaggtgatcaccgtgatcgagcccggcctgctgttcgagatcatcgagatgctgcagagcgaggagaccagcagcaccagccagctgaacgagctgatgatggccagcgagagcaccctgctggcccaggagcccagagagatgaccgccgacgtgatcgagctgaagggcaagttcctgatcaacctggagggcggcgacatcagagaggagagcagctacaaggtgatcgtgatgcccaccaccaaggagaagtgccccagatgctggaagtacaccgccgagagcagcgacaccctgtgccccagatgcgccgaggtggtgagcggcaagtag

SEQ ID NO: 85850 - DNA, 2823 bp, synthetic construct
  misc_feature 1..2823: note = Description of Artificial Sequence: Synthetic coding sequence
  source 1..2823: mol_type = other DNA
atgaagctgctgggcagacagcagcccgacaccgagctggagatccagcagaagtgcggcttcagcgagctgtacagctggcagagagagagaaaggtgaagaccgagttctgcctgcacgacggccccccctacgccaacggcgacccccacgtgggccacgccctgaacaagatcctgaaggacatcgccaacagattccacatgatgaacggcagcaagatccacttcgtgcccggctgggactgccacggcctgcccatcgagatcaaggtgctgagcgagctgggcagagaggcccagaacctgagcgccatggagatcagaaagaaggccagaagcttcgccaaggccgccatcgagaagcagaagagcgccttcatcagatggggcatcatggccgactggaacaactgctactacaccttcgacggcaagtacgaggccaagcagctgagaaccttctaccagatgtacgacaagggcctggtgtacagaagctacaagcccgtgttctggagccccagcagcagaaccgccctggccgaggccgagctggagtacaaccccgagcacgtgagcagaagcatctacgtgaagttccccctgctgaagcccagccccaagctggccagcctgatcgacggcagcagccccgtgagcatcctggtgtggaccacccagccctggaccatccccgccaacgaggccgtgtgctacatgcccgagagcaagtacgccgtggtgaagtgcagcaagagcggcgacctgtacgtgctggccgccgacaaggtggccagcgtggccagcaccctggagaccaccttcgagaccatcagcaccctgagcggcgtggacctggagaacggcacctgcagccaccccctgatccccgacaaggccagccccctgctgcccgccaaccacgtgaccatggccaagggcaccggcctggtgcacaccgcccccgcccacggcatggaggactacggcgtggccagccagcacaacctgcccatggactgcctggtggacgaggacggcgtgttcaccgacgtggccggccccgagctgcagaacaaggccgtgctggaggagggcaccgacgtggtgatcaagatgctgcagaccgccaagaacctgctgaaggaggagaagctggtgcacagctacccctacgactggagaaccaagaagcccgtggtgatcagagccagcaagcagtggttcatcaacatcaccgacatcaagaccgccgccaaggagctgctgaagaaggtgaagttcatccccggcagcgccctgaacggcatggtggagatgatggacagaagaccctactggtgcatcagcagacagagagtgtggggcgtgcccatccccgtgttccaccacaagaccaaggacgagtacctgatcaacagccagaccaccgagcacatcgtgaagctggtggagcagcacggcagcgacatctggtggaccctgccccccgagcagctgctgcccaaggaggtgctgagcgaggtgggcggccccgacgccctggagtacgtgcccggccaggacatcctggacatctggttcgacagcggcaccagctggagctacgtgctgcccggccccgaccagagagccgacctgtacctggagggcaaggaccagctgggcggctggttccagagcagcctgctgaccagcgtggccgccagaaagagagccccctacaagaccgtgatcgtgcacggcttcaccctgggcgagaagggcgagaagatgagcaagagcctgggcaacgtgatccaccccgacgtggtggtgaacggcggccaggaccagagcaaggagcccccctacggcgccgacgtgctgagatggtgggtggccgacagcaacgtgttcaccgaggtggccatcggccccagcgtgctgaacgccgccagagacgacatcagcaagctgagaaacaccctgagattcctgctgggcaacgtggccgacttcaaccccgagaccgacagcatccccgtgaacgacatgtacgtgatcgaccagtacatgctgcacctgctgcaggacctggccaacaagatcaccgagctgtacaagcagtacgacttcggcaaggtggtgagactgctgagaaccttctacaccagagagctgagcaacttctacttcagcatcatcaaggacagactgtactgcgagaaggagaacgaccccaagagaagaagctgccagaccgccctggtggagatcctggacgtgatcgtgagaagcttcgcccccatcctgccccacctggccgaggaggtgttccagcacatcccctacatcaaggagcccaagagcgtgttcagaaccggctggatcagcaccagcagcatctggaagaagcccggcctggaggaggccgtggagagcgcctgcgccatgagagacagcttcctgggcagcatccccggcaagaacgccgccgagtacaaggtgatcaccgtgatcgagcccggcctgctgttcgagatcatcgagatgctgcagagcgaggagaccagcagcaccagccagctgaacgagctgatgatggccagcgagagcaccctgctggcccaggagcccagagagatgaccgccgacgtgatcgagctgaagggcaagttcctgatcaacctggagggcggcgacatcagagaggagagcagctacaaggtgatcgtgatgcccaccaccaaggagaagtgccccagatgctggaagtacaccgccgagagcagcgacaccctgtgccccagatgcgccgaggtggtgagcggcaagtag

SEQ ID NO: 85851 - DNA, 855 bp, synthetic construct
  misc_feature 1..855: note = Description of Artificial Sequence: Synthetic coding sequence
  source 1..855: mol_type = other DNA
atggccggctgcgccgccagagccccccccggcagcgaggccagactgagcctggccaccttcctgctgggcgccagcgtgctggccctgcccctgctgaccagagccggcctgcagggcagaaccggcctggccctgtacgtggccggcctgaacgccctgctgctgctgctgtacagaccccccagataccagatcgccatcagagcctgcttcctgggcttcgtgttcggctgcggcaccctgctgagcttcagccagagcagctggagccacttcggctggtacatgtgcagcctgagcctgttccactacagcgagtacctggtgaccgccgtgaacaaccccaagagcctgagcctggacagcttcctgctgaaccacagcctggagtacaccgtggccgccctgagcagctggctggagttcaccctggagaacatcttctggcccgagctgaagcagatcacctggctgagcgtgaccggcctgctgatggtggtgttcggcgagtgcctgagaaaggccgccatgttcaccgccggcagcaacttcaaccacgtggtgcagaacgagaagagcgacacccacaccctggtgaccagcggcgtgtacgcctggttcagacaccccagctacgtgggctggttctactggagcatcggcacccaggtgatgctgtgcaaccccatctgcggcgtgagctacgccctgaccgtgtggagattcttcagagacagaaccgaggaggaggagatcagcctgatccacttcttcggcgaggagtacctggagtacaagaagagagtgcccaccggcctgcccttcatcaagggcgtgaaggtggacctgtag

SEQ ID NO: 85852 - DNA, 351 bp, synthetic construct
  misc_feature 1..351: note = Description of Artificial Sequence: Synthetic coding sequence
  source 1..351: mol_type = other DNA
atggccggctgcgccgccagagccccccccggcagcgaggccagactgagcctggccaccttcctgctgggcgccagcgtgctggccctgcccctgctgaccagagccggcctgcagggcagaaccggcctggccctgtacgtggccggcctgaacgccctgctgctgctgctgtacagaccccccagataccagatcgccatcagagcctgcttcctgggcttcgtgttcggctgcggcaccctgctgagcttcagccagagcagctggagccacttcggctggagccacctggtgcacccccacagccactgcagaatcttcccctacaccatgatcagcgtgccctag

SEQ ID NO: 85853 - DNA, 567 bp, synthetic construct
  misc_feature 1..567: note = Description of Artificial Sequence: Synthetic coding sequence
  source 1..567: mol_type = other DNA
atgtgcagcctgagcctgttccactacagcgagtacctggtgaccgccgtgaacaaccccaagagcctgagcctggacagcttcctgctgaaccacagcctggagtacaccgtggccgccctgagcagctggctggagttcaccctggagaacatcttctggcccgagctgaagcagatcacctggctgagcgtgaccggcctgctgatggtggtgttcggcgagtgcctgagaaaggccgccatgttcaccgccggcagcaacttcaaccacgtggtgcagaacgagaagagcgacacccacaccctggtgaccagcggcgtgtacgcctggttcagacaccccagctacgtgggctggttctactggagcatcggcacccaggtgatgctgtgcaaccccatctgcggcgtgagctacgccctgaccgtgtggagattcttcagagacagaaccgaggaggaggagatcagcctgatccacttcttcggcgaggagtacctggagtacaagaagagagtgcccaccggcctgcccttcatcaagggcgtgaaggtggacctgtag

SEQ ID NO: 85854 - DNA, 1272 bp, synthetic construct
  misc_feature 1..1272: note = Description of Artificial Sequence: Synthetic coding sequence
  source 1..1272: mol_type = other DNA
atggccaccgccaccagactgctgggctggagagtggccagctggagactgagaccccccctggccggcttcgtgagccagagagcccacagcctgctgcccgtggacgacgccatcaacggcctgagcgaggagcagagacagctgagacagaccatggccaagttcctgcaggagcacctggcccccaaggcccaggagatcgacagaagcaacgagttcaagaacctgagagagttctggaagcagctgggcaacctgggcgtgctgggcatcaccgcccccgtgcagtacggcggcagcggcctgggctacctggagcacgtgctggtgatggaggagatcagcagagccagcggcgccgtgggcctgagctacggcgcccacagcaacctgtgcatcaaccagctggtgagaaacggcaacgaggcccagaaggagaagtacctgcccaagctgatcagcggcgagtacatcggcgccctggccatgagcgagcccaacgccggcagcgacgtggtgagcatgaagctgaaggccgagaagaagggcaaccactacatcctgaacggcaacaagttctggatcaccaacggccccgacgccgacgtgctgatcgtgtacgccaagaccgacctggccgccgtgcccgccagcagaggcatcaccgccttcatcgtggagaagggcatgcccggcttcagcaccagcaagaagctggacaagctgggcatgagaggcagcaacacctgcgagctgatcttcgaggactgcaagatccccgccgccaacatcctgggccacgagaacaagggcgtgtacgtgctgatgagcggcctggacctggagagactggtgctggccggcggccccctgggcctgatgcaggccgtgctggaccacaccatcccctacctgcacgtgagagaggccttcggccagaagatcggccacttccagctgatgcagggcaagatggccgacatgtacaccagactgatggcctgcagacagtacgtgtacaacgtggccaaggcctgcgacgagggccactgcaccgccaaggactgcgccggcgtgatcctgtacagcgccgagtgcgccacccaggtggccctggacggcatccagtgcttcggcggcaacggctacatcaacgacttccccatgggcagattcctgagagacgccaagctgtacgagatcggcgccggcaccagcgaggtgagaagactggtgatcggcagagccttcaacgccgacttccactag

SEQ ID NO: 85855 - DNA, 1191 bp, synthetic construct
  misc_feature 1..1191: note = Description of Artificial Sequence: Synthetic coding sequence
  source 1..1191: mol_type = other DNA
atggccgagatggccaccgccaccagactgctgggctggagagtggccagctggagactgagaccccccctggccggcttcgtgagccagagagcccacagcctgctgcccgtggacgacgccatcaacggcctgagcgaggagcagagacaggagttctggaagcagctgggcaacctgggcgtgctgggcatcaccgcccccgtgcagtacggcggcagcggcctgggctacctggagcacgtgctggtgatggaggagatcagcagagccagcggcgccgtgggcctgagctacggcgcccacagcaacctgtgcatcaaccagctggtgagaaacggcaacgaggcccagaaggagaagtacctgcccaagctgatcagcggcgagtacatcggcgccctggccatgagcgagcccaacgccggcagcgacgtggtgagcatgaagctgaaggccgagaagaagggcaaccactacatcctgaacggcaacaagttctggatcaccaacggccccgacgccgacgtgctgatcgtgtacgccaagaccgacctggccgccgtgcccgccagcagaggcatcaccgccttcatcgtggagaagggcatgcccggcttcagcaccagcaagaagctggacaagctgggcatgagaggcagcaacacctgcgagctgatcttcgaggactgcaagatccccgccgccaacatcctgggccacgagaacaagggcgtgtacgtgctgatgagcggcctggacctggagagactggtgctggccggcggccccctgggcctgatgcaggccgtgctggaccacaccatcccctacctgcacgtgagagaggccttcggccagaagatcggccacttccagctgatgcagggcaagatggccgacatgtacaccagactgatggcctgcagacagtacgtgtacaacgtggccaaggcctgcgacgagggccactgcaccgccaaggactgcgccggcgtgatcctgtacagcgccgagtgcgccacccaggtggccctggacggcatccagtgcttcggcggcaacggctacatcaacgacttccccatgggcagattcctgagagacgccaagctgtacgagatcggcgccggcaccagcgaggtgagaagactggtgatcggcagagccttcaacgccgacttccactag

SEQ ID NO: 85856 - DNA, 1281 bp, synthetic construct
  misc_feature 1..1281: note = Description of Artificial Sequence: Synthetic coding sequence
  source 1..1281: mol_type = other DNA
atggccgagatggccaccgccaccagactgctgggctggagagtggccagctggagactgagaccccccctggccggcttcgtgagccagagagcccacagcctgctgcccgtggacgacgccatcaacggcctgagcgaggagcagagacagctgagacagaccatggccaagttcctgcaggagcacctggcccccaaggcccaggagatcgacagaagcaacgagttcaagaacctgagagagttctggaagcagctgggcaacctgggcgtgctgggcatcaccgcccccgtgcagtacggcggcagcggcctgggctacctggagcacgtgctggtgatggaggagatcagcagagccagcggcgccgtgggcctgagctacggcgcccacagcaacctgtgcatcaaccagctggtgagaaacggcaacgaggcccagaaggagaagtacctgcccaagctgatcagcggcgagtacatcggcgccctggccatgagcgagcccaacgccggcagcgacgtggtgagcatgaagctgaaggccgagaagaagggcaaccactacatcctgaacggcaacaagttctggatcaccaacggccccgacgccgacgtgctgatcgtgtacgccaagaccgacctggccgccgtgcccgccagcagaggcatcaccgccttcatcgtggagaagggcatgcccggcttcagcaccagcaagaagctggacaagctgggcatgagaggcagcaacacctgcgagctgatcttcgaggactgcaagatccccgccgccaacatcctgggccacgagaacaagggcgtgtacgtgctgatgagcggcctggacctggagagactggtgctggccggcggccccctgggcctgatgcaggccgtgctggaccacaccatcccctacctgcacgtgagagaggccttcggccagaagatcggccacttccagctgatgcagggcaagatggccgacatgtacaccagactgatggcctgcagacagtacgtgtacaacgtggccaaggcctgcgacgagggccactgcaccgccaaggactgcgccggcgtgatcctgtacagcgccgagtgcgccacccaggtggccctggacggcatccagtgcttcggcggcaacggctacatcaacgacttccccatgggcagattcctgagagacgccaagctgtacgagatcggcgccggcaccagcgaggtgagaagactggtgatcggcagagccttcaacgccgacttccactag

SEQ ID NO: 85857 - DNA, 1716 bp, synthetic construct
  misc_feature 1..1716: note = Description of Artificial Sequence: Synthetic coding sequence
  source 1..1716: mol_type = other DNA
atgagagccctgagagacagagccggcctgctgctgtgcgtgctgctgctggccgccctgctggaggccgccctgggcctgcccgtgaagaagcccagactgagaggccccagacccggcagcctgaccagactggccgaggtgagcgccagccccgaccccagacccctgaaggaggaggaggaggcccccctgctgcccagaacccacctgcaggccgagccccaccagcacggctgctggaccgtgaccgagcccgccgccatgacccccggcaacgccaccccccccagaacccccgaggtgacccccctgagactggagctgcagaagctgcccggcctggccaacaccaccctgagcacccccaaccccgacacccaggccagcgccagccccgaccccagacccctgagagaggaggaggaggccagactgctgcccagaacccacctgcaggccgagctgcaccagcacggctgctggaccgtgaccgagcccgccgccctgacccccggcaacgccaccccccccagaacccaggaggtgacccccctgctgctggagctgcagaagctgcccgagctggtgcacgccaccctgagcacccccaaccccgacaaccaggtgaccatcaaggtggtggaggacccccaggccgaggtgagcatcgacctgctggccgagcccagcaacccccccccccaggacaccctgagctggctgcccgccctgtggagcttcctgtggggcgactacaagggcgaggagaaggacagagcccccggcgagaagggcgaggagaaggaggaggacgaggactaccccagcgaggacatcgagggcgaggaccaggaggacaaggaggaggacgaggaggagcaggccctgtggttcaacggcaccaccgacaactgggaccagggctggctggcccccggcgactgggtgttcaaggacagcgtgagctacgactacgagccccagaaggagtggagcccctggagcccctgcagcggcaactgcagcaccggcaagcagcagagaaccagaccctgcggctacggctgcaccgccaccgagaccagaacctgcgacctgcccagctgccccggcaccgaggacaaggacaccctgggcctgcccagcgaggagtggaagctgctggccagaaacgccaccgacatgcacgaccaggacgtggacagctgcgagaagtggctgaactgcaagagcgacttcctgatcaagtacctgagccagatgctgagagacctgcccagctgcccctgcgcctaccccctggaggccatggacagccccgtgagcctgcaggacgagcaccagggcagaagcttcagatggagagacgccagcggccccagagagagactggacatctaccagcccaccgccagattctgcctgagaagcatgctgagcggcgagagcagcaccctggccgcccagcactgctgctacgacgaggacagcagactgctgaccagaggcaagggcgccggcatgcccaacctgatcagcaccgacttcagccccaagctgcacttcaagttcgacaccaccccctggatcctgtgcaagggcgactggagcagactgcacgccgtgctgccccccaacaacggcagagcctgcaccgacaaccccctggaggaggagtacctggcccagctgcaggaggccaaggagtactag

SEQ ID NO: 85858 - DNA, 1452 bp, synthetic construct
  misc_feature 1..1452: note = Description of Artificial Sequence: Synthetic coding sequence
  source 1..1452: mol_type = other DNA
atgacccccggcaacgccaccccccccagaacccccgaggtgacccccctgagactggagctgcagaagctgcccggcctggccaacaccaccctgagcacccccaaccccgacacccaggccagcgccagccccgaccccagacccctgagagaggaggaggaggccagactgctgcccagaacccacctgcaggccgagctgcaccagcacggctgctggaccgtgaccgagcccgccgccctgacccccggcaacgccaccccccccagaacccaggaggtgacccccctgctgctggagctgcagaagctgcccgagctggtgcacgccaccctgagcacccccaaccccgacaaccaggtgaccatcaaggtggtggaggacccccaggccgaggtgagcatcgacctgctggccgagcccagcaacccccccccccaggacaccctgagctggctgcccgccctgtggagcttcctgtggggcgactacaagggcgaggagaaggacagagcccccggcgagaagggcgaggagaaggaggaggacgaggactaccccagcgaggacatcgagggcgaggaccaggaggacaaggaggaggacgaggaggagcaggccctgtggttcaacggcaccaccgacaactgggaccagggctggctggcccccggcgactgggtgttcaaggacagcgtgagctacgactacgagccccagaaggagtggagcccctggagcccctgcagcggcaactgcagcaccggcaagcagcagagaaccagaccctgcggctacggctgcaccgccaccgagaccagaacctgcgacctgcccagctgccccggcaccgaggacaaggacaccctgggcctgcccagcgaggagtggaagctgctggccagaaacgccaccgacatgcacgaccaggacgtggacagctgcgagaagtggctgaactgcaagagcgacttcctgatcaagtacctgagccagatgctgagagacctgcccagctgcccctgcgcctaccccctggaggccatggacagccccgtgagcctgcaggacgagcaccagggcagaagcttcagatggagagacgccagcggccccagagagagactggacatctaccagcccaccgccagattctgcctgagaagcatgctgagcggcgagagcagcaccctggccgcccagcactgctgctacgacgaggacagcagactgctgaccagaggcaagggcgccggcatgcccaacctgatcagcaccgacttcagccccaagctgcacttcaagttcgacaccaccccctggatcctgtgcaagggcgactggagcagactgcacgccgtgctgccccccaacaacggcagagcctgcaccgacaaccccctggaggaggagtacctggcccagctgcaggaggccaaggagtactag

SEQ ID NO: 85859 - DNA, 1473 bp, synthetic construct
  misc_feature 1..1473: note = Description of Artificial Sequence: Synthetic coding sequence
  source 1..1473: mol_type = other DNA
atgagagccctgagagacagagccggcctgctgctgtgcgtgctgctgctggccgccctgctggaggccgccctgggcctgcccgtgaagaagcccagactgagaggccccagacccggcagcctgaccagactggccgaggtgagcgccagccccgaccccagacccctgaaggaggaggaggaggcccccctgctgcccagaacccacctgcaggccgagccccaccagcacggctgctggaccgtgaccgagcccgccgccatgacccccggcaacgccaccccccccagaacccccgaggtgacccccctgagactggagctgcagaagctgcccggcctggccaacaccaccctgagcacccccaaccccgacacccaggtgaccatcaaggtggtggaggacccccaggccgaggtgagcatcgacctgctggccgagcccagcaacccccccccccaggacaccctgagctggctgcccgccctgtggagcttcctgtggggcgactacaagggcgaggagaaggacagagcccccggcgagaagggcgaggagaaggaggaggacgaggactaccccagcgaggacatcgagggcgaggaccaggaggacaaggaggaggacgaggaggagcaggccctgtggttcaacggcaccaccgacaactgggaccagggctggctggcccccggcgactgggtgttcaaggacagcgtgagctacgactacgagccccagaaggagtggagcccctggagcccctgcagcggcaactgcagcaccggcaagcagcagagaaccagaccctgcggctacggctgcaccgccaccgagaccagaacctgcgacctgcccagctgccccggcaccgaggacaaggacaccctgggcctgcccagcgaggagtggaagctgctggccagaaacgccaccgacatgcacgaccaggacgtggacagctgcgagaagtggctgaactgcaagagcgacttcctgatcaagtacctgagccagatgctgagagacctgcccagctgcccctgcgcctaccccctggaggccatggacagccccgtgagcctgcaggacgagcaccagggcagaagcttcagatggagagacgccagcggccccagagagagactggacatctaccagcccaccgccagattctgcctgagaagcatgctgagcggcgagagcagcaccctggccgcccagcactgctgctacgacgaggacagcagactgctgaccagaggcaagggcgccggcatgcccaacctgatcagcaccgacttcagccccaagctgcacttcaagttcgacaccaccccctggatcctgtgcaagggcgactggagcagactgcacgccgtgctgccccccaacaacggcagagcctgcaccgacaaccccctggaggaggagtacctggcccagctgcaggaggccaaggagtactag

SEQ ID NO: 85860 - DNA, 1473 bp, synthetic construct
  misc_feature 1..1473: note = Description of Artificial Sequence: Synthetic coding sequence
  source 1..1473: mol_type = other DNA
atgagagccctgagagacagagccggcctgctgctgtgcgtgctgctgctggccgccctgctggaggccgccctgggcctgcccgtgaagaagcccagactgagaggccccagacccggcagcctgaccagactggccgaggccagcgccagccccgaccccagacccctgagagaggaggaggaggccagactgctgcccagaacccacctgcaggccgagctgcaccagcacggctgctggaccgtgaccgagcccgccgccctgacccccggcaacgccaccccccccagaacccaggaggtgacccccctgctgctggagctgcagaagctgcccgagctggtgcacgccaccctgagcacccccaaccccgacaaccaggtgaccatcaaggtggtggaggacccccaggccgaggtgagcatcgacctgctggccgagcccagcaacccccccccccaggacaccctgagctggctgcccgccctgtggagcttcctgtggggcgactacaagggcgaggagaaggacagagcccccggcgagaagggcgaggagaaggaggaggacgaggactaccccagcgaggacatcgagggcgaggaccaggaggacaaggaggaggacgaggaggagcaggccctgtggttcaacggcaccaccgacaactgggaccagggctggctggcccccggcgactgggtgttcaaggacagcgtgagctacgactacgagccccagaaggagtggagcccctggagcccctgcagcggcaactgcagcaccggcaagcagcagagaaccagaccctgcggctacggctgcaccgccaccgagaccagaacctgcgacctgcccagctgccccggcaccgaggacaaggacaccctgggcctgcccagcgaggagtggaagctgctggccagaaacgccaccgacatgcacgaccaggacgtggacagctgcgagaagtggctgaactgcaagagcgacttcctgatcaagtacctgagccagatgctgagagacctgcccagctgcccctgcgcctaccccctggaggccatggacagccccgtgagcctgcaggacgagcaccagggcagaagcttcagatggagagacgccagcggccccagagagagactggacatctaccagcccaccgccagattctgcctgagaagcatgctgagcggcgagagcagcaccctggccgcccagcactgctgctacgacgaggacagcagactgctgaccagaggcaagggcgccggcatgcccaacctgatcagcaccgacttcagccccaagctgcacttcaagttcgacaccaccccctggatcctgtgcaagggcgactggagcagactgcacgccgtgctgccccccaacaacggcagagcctgcaccgacaaccccctggaggaggagtacctggcccagctgcaggaggccaaggagtactag

SEQ ID NO: 85861 - DNA, 879 bp, synthetic construct
  misc_feature 1..879: note = Description of Artificial Sequence: Synthetic coding sequence
  source 1..879: mol_type = other DNA
atgagagccctgagagacagagccggcctgctgctgtgcgtgctgctgctggccgccctgctggaggccgccctgggcctgcccgtgaagaagcccagactgagaggccccagacccggcagcctgaccagactggccgaggtgagcgccagccccgaccccagacccctgaaggaggaggaggaggcccccctgctgcccagaacccacctgcaggccgagccccaccagcacggctgctggaccgtgaccgagcccgccgccatgacccccggcaacgccaccccccccagaacccccgaggtgacccccctgagactggagctgcagaagctgcccggcctggccaacaccaccctgagcacccccaaccccgacacccaggccagcgccagccccgaccccagacccctgagagaggaggaggaggccagactgctgcccagaacccacctgcaggccgagctgcaccagcacggctgctggaccgtgaccgagcccgccgccctgacccccggcaacgccaccccccccagaacccaggaggtgacccccctgctgctggagctgcagaagctgcccgagctggtgcacgccaccctgagcacccccaaccccgacaaccagaccatgagcctgagaagaagcggcgtgcccggcctgcccgccgtgggcaccgccgccctggccagcagcagaggcctgggccccgtggccatggccgccctgccccccagacccgtgcccgtgacctgcccccccgtgctggccctgagaaccagaaccccctgggccagccccgtgagaagcggcagcagctggcccgccatgctgagaacctgcatgatcaagatgtggaccgccgtgagaagcggctag

SEQ ID NO: 85862 - DNA, 924 bp, synthetic construct
  misc_feature 1..924: note = Description of Artificial Sequence: Synthetic coding sequence
  source 1..924: mol_type = other DNA
atggccagaaacgccgagaaggccatgaccgccctggccagattcagacaggcccagctggaggagggcaaggtgaaggagagaagacccttcctggccagcgagtgcaccgagctgcccaaggccgagaagtggagaagacagatcatcggcgagatcagcaagaaggtggcccagatccagaacgccggcctgggcgagttcagaatcagagacctgaacgacgagatcaacaagctgctgagagagaagggccactgggaggtgagaatcaaggagctgggcggccccgactacggcaaggtgggccccaagatgctggaccacgagggcaaggaggtgcccggcaacagaggctacaagtacttcggcgccgccaaggacctgcccggcgtgagagagctgttcgagaaggagagacaggtgagatggctgatgcccgtgatccccgccctgtgggaggccgaggccggcggcagccaggccctgcccccccccagaaagaccagagccgagctgatgaaggccatcgacttcgagtactacggctacctggacgaggacgacggcgtgatcgtgcccctggagcaggagtacgagaagaagctgagagccgagctggtggagaagtggaaggccgagagagaggccagactggccagaggcgagaaggaggaggaggaggaggaggaggaggagatcaacatctacgccgtgaccgaggaggagagcgacgaggagggcagccaggagaagggcggcgacgacagccagcagaagttcatcgcccacgtgcccgtgcccagccagcaggagatcgaggaggccctggtgagaagaaagaagatggagctgctgcagaagtacgccagcgagaccctgcaggcccagagcgaggaggccagaagactgctgggctactag

SEQ ID NO: 85863 - DNA, 858 bp, synthetic construct
  misc_feature 1..858: note = Description of Artificial Sequence: Synthetic coding sequence
  source 1..858: mol_type = other DNA
atggccagaaacgccgagaaggccatgaccgccctggccagattcagacaggcccagctggaggagggcaaggtgaaggagagaagacccttcctggccagcgagtgcaccgagctgcccaaggccgagaagtggagaagacagatcatcggcgagatcagcaagaaggtggcccagatccagaacgccggcctgggcgagttcagaatcagagacctgaacgacgagatcaacaagctgctgagagagaagggccactgggaggtgagaatcaaggagctgggcggccccgactacggcaaggtgggccccaagatgctggaccacgagggcaaggaggtgcccggcaacagaggctacaagtacttcggcgccgccaaggacctgcccggcgtgagagagctgttcgagaaggagcccctgcccccccccagaaagaccagagccgagctgatgaaggccatcgacttcgagtactacggctacctggacgaggacgacggcgtgatcgtgcccctggagcaggagtacgagaagaagctgagagccgagctggtggagaagtggaaggccgagagagaggccagactggccagaggcgagaaggaggaggaggaggaggaggaggaggagatcaacatctacgccgtgaccgaggaggagagcgacgaggagggcagccaggagaagggcggcgacgacagccagcagaagttcatcgcccacgtgcccgtgcccagccagcaggagatcgaggaggccctggtgagaagaaagaagatggagctgctgcagaagtacgccagcgagaccctgcaggcccagagcgaggaggccagaagactgctgggctactag

SEQ ID NO: 85864 - DNA, 2712 bp, synthetic construct
  misc_feature 1..2712: note = Description of Artificial Sequence: Synthetic coding sequence
  source 1..2712: mol_type = other DNA
atgagcgacagcggcagccagctgggcagcatgggcagcctgaccatgaagagccagctgcagatcaccgtgatcagcgccaagctgaaggagaacaagaagaactggttcggccccagcccctacgtggaggtgaccgtggacggccagagcaagaagaccgagaagtgcaacaacaccaacagccccaagtggaagcagcccctgaccgtgatcgtgacccccgtgagcaagctgcacttcagagtgtggagccaccagaccctgaagagcgacgtgctgctgggcaccgccgccctggacatctacgagaccctgaagagcaacaacatgaagctggaggaggtggtggtgaccctgcagctgggcggcgacaaggagcccaccgagaccatcggcgacctgagcatctgcctggacggcctgcagctggagagcgaggtggtgaccaacggcgagaccacctgcagcgagaacggcgtgagcctgtgcctgcccagactggagtgcaacagcgccatcagcgcccactgcaacctgtgcctgcccggcctgagcgacagccccatcagcgccagcagagtggccggcttcaccggcgccagccagaacgacgacggcagcagaagcaaggacgagaccagagtgagcaccaacggcagcgacgaccccgaggacgccggcgccggcgagaacagaagagtgagcggcaacaacagccccagcctgagcaacggcggcttcaagcccagcagaccccccagacccagcagaccccccccccccacccccagaagacccgccagcgtgaacggcagccccagcgccaccagcgagagcgacggcagcagcaccggcagcctgccccccaccaacaccaacaccaacaccagcgagggcgccaccagcggcctgatcatccccctgaccatcagcggcggcagcggccccagacccctgaaccccgtgacccaggcccccctgccccccggctgggagcagagagtggaccagcacggcagagtgtactacgtggaccacgtggagaagagaaccacctgggacagacccgagcccctgccccccggctgggagagaagagtggacaacatgggcagaatctactacgtggaccacttcaccagaaccaccacctggcagagacccaccctggagagcgtgagaaactacgagcagtggcagctgcagagaagccagctgcagggcgccatgcagcagttcaaccagagattcatctacggcaaccaggacctgttcgccaccagccagagcaaggagttcgaccccctgggccccctgccccccggctgggagaagagaaccgacagcaacggcagagtgtacttcgtgaaccacaacaccagaatcacccagtgggaggaccccagaagccagggccagctgaacgagaagcccctgcccgagggctgggagatgagattcaccgtggacggcatcccctacttcgtggaccacaacagaagaaccaccacctacatcgaccccagaaccggcaagagcgccctggacaacggcccccagatcgcctacgtgagagacttcaaggccaaggtgcagtacttcagattctggtgccagcagctggccatgccccagcacatcaagatcaccgtgaccagaaagaccctgttcgaggacagcttccagcagatcatgagcttcagcccccaggacctgagaagaagactgtgggtgatcttccccggcgaggagggcctggactacggcggcgtggccagagagtggttcttcctgctgagccacgaggtgctgaaccccatgtactgcctgttcgagtacgccggcaaggacaactactgcctgcagatcaaccccgccagctacatcaaccccgaccacctgaagtacttcagattcatcggcagattcatcgccatggccctgttccacggcaagttcatcgacaccggcttcagcctgcccttctacaagagaatcctgaacaagcccgtgggcctgaaggacctggagagcatcgaccccgagttctacaacagcctgatctgggtgaaggagaacaacatcgaggagtgcgacctggagatgtacttcagcgtggacaaggagatcctgggcgagatcaagagccacgacctgaagcccaacggcggcaacatcctggtgaccgaggagaacaaggaggagtacatcagaatggtggccgagtggagactgagcagaggcgtggaggagcagacccaggccttcttcgagggcttcaacgagatcctgccccagcagtacctgcagtacttcgacgccaaggagctggaggtgctgctgtgcggcatgcaggagatcgacctgaacgactggcagagacacgccatctacagacactacgccagaaccagcaagcagatcatgtggttctggcagttcgtgaaggagatcgacaacgagaagagaatgagactgctgcagttcgtgaccggcacctgcagactgcccgtgggcggcttcgccgacctgatgggcagcaacggcccccagaagttctgcatcgagaaggtgggcaaggagaactggctgcccagaagccacacctgcttcaacagactggacctgcccccctacaagagctacgagcagctgaaggagaagctgctgttcgccatcgaggagaccgagggcttcggccaggagtag

SEQ ID NO: 85865 - DNA, 2589 bp, synthetic construct
  misc_feature 1..2589: note = Description of Artificial Sequence: Synthetic coding sequence
  source 1..2589: mol_type = other DNA
atgagcgacagcggcagccagctgggcagcatgggcagcctgaccatgaagagccagctgcagatcaccgtgatcagcgccaagctgaaggagaacaagaagaactggttcggccccagcccctacgtggaggtgaccgtggacggccagagcaagaagaccgagaagtgcaacaacaccaacagccccaagtggaagcagcccctgaccgtgatcgtgacccccgtgagcaagctgcacttcagagtgtggagccaccagaccctgaagagcgacgtgctgctgggcaccgccgccctggacatctacgagaccctgaagagcaacaacatgaagctggaggaggtggtggtgaccctgcagctgggcggcgacaaggagcccaccgagaccatcggcgacctgagcatctgcctggacggcctgcagctggagagcgaggtggtgaccaacggcgagaccacctgcagcgagagcgccagccagaacgacgacggcagcagaagcaaggacgagaccagagtgagcaccaacggcagcgacgaccccgaggacgccggcgccggcgagaacagaagagtgagcggcaacaacagccccagcctgagcaacggcggcttcaagcccagcagaccccccagacccagcagaccccccccccccacccccagaagacccgccagcgtgaacggcagccccagcgccaccagcgagagcgacggcagcagcaccggcagcctgccccccaccaacaccaacaccaacaccagcgagggcgccaccagcggcctgatcatccccctgaccatcagcggcggcagcggccccagacccctgaaccccgtgacccaggcccccctgccccccggctgggagcagagagtggaccagcacggcagagtgtactacgtggaccacgtggagaagagaaccacctgggacagacccgagcccctgccccccggctgggagagaagagtggacaacatgggcagaatctactacgtggaccacttcaccagaaccaccacctggcagagacccaccctggagagcgtgagaaactacgagcagtggcagctgcagagaagccagctgcagggcgccatgcagcagttcaaccagagattcatctacggcaaccaggacctgttcgccaccagccagagcaaggagttcgaccccctgggccccctgccccccggctgggagaagagaaccgacagcaacggcagagtgtacttcgtgaaccacaacaccagaatcacccagtgggaggaccccagaagccagggccagctgaacgagaagcccctgcccgagggctgggagatgagattcaccgtggacggcatcccctacttcgtggaccacaacagaagaaccaccacctacatcgaccccagaaccggcaagagcgccctggacaacggcccccagatcgcctacgtgagagacttcaaggccaaggtgcagtacttcagattctggtgccagcagctggccatgccccagcacatcaagatcaccgtgaccagaaagaccctgttcgaggacagcttccagcagatcatgagcttcagcccccaggacctgagaagaagactgtgggtgatcttccccggcgaggagggcctggactacggcggcgtggccagagagtggttcttcctgctgagccacgaggtgctgaaccccatgtactgcctgttcgagtacgccggcaaggacaactactgcctgcagatcaaccccgccagctacatcaaccccgaccacctgaagtacttcagattcatcggcagattcatcgccatggccctgttccacggcaagttcatcgacaccggcttcagcctgcccttctacaagagaatcctgaacaagcccgtgggcctgaaggacctggagagcatcgaccccgagttctacaacagcctgatctgggtgaaggagaacaacatcgaggagtgcgacctggagatgtacttcagcgtggacaaggagatcctgggcgagatcaagagccacgacctgaagcccaacggcggcaacatcctggtgaccgaggagaacaaggaggagtacatcagaatggtggccgagtggagactgagcagaggcgtggaggagcagacccaggccttcttcgagggcttcaacgagatcctgccccagcagtacctgcagtacttcgacgccaaggagctggaggtgctgctgtgcggcatgcaggagatcgacctgaacgactggcagagacacgccatctacagacactacgccagaaccagcaagcagatcatgtggttctggcagttcgtgaaggagatcgacaacgagaagagaatgagactgctgcagttcgtgaccggcacctgcagactgcccgtgggcggcttcgccgacctgatgggcagcaacggcccccagaagttctgcatcgagaaggtgggcaaggagaactggctgcccagaagccacacctgcttcaacagactggacctgcccccctacaagagctacgagcagctgaaggagaagctgctgttcgccatcgaggagaccgagggcttcggccaggagtag

SEQ ID NO: 85866 - DNA, 2259 bp, synthetic construct
  misc_feature 1..2259: note = Description of Artificial Sequence: Synthetic coding sequence
  source 1..2259: mol_type = other DNA
atgaagctggaggaggtggtggtgaccctgcagctgggcggcgacaaggagcccaccgagaccatcggcgacctgagcatctgcctggacggcctgcagctggagagcgaggtggtgaccaacggcgagaccacctgcagcgagagcgccagccagaacgacgacggcagcagaagcaaggacgagaccagagtgagcaccaacggcagcgacgaccccgaggacgccggcgccggcgagaacagaagagtgagcggcaacaacagccccagcctgagcaacggcggcttcaagcccagcagaccccccagacccagcagaccccccccccccacccccagaagacccgccagcgtgaacggcagccccagcgccaccagcgagagcgacggcagcagcaccggcagcctgccccccaccaacaccaacaccaacaccagcgagggcgccaccagcggcctgatcatccccctgaccatcagcggcggcagcggccccagacccctgaaccccgtgacccaggcccccctgccccccggctgggagcagagagtggaccagcacggcagagtgtactacgtggaccacgtggagaagagaaccacctgggacagacccgagcccctgccccccggctgggagagaagagtggacaacatgggcagaatctactacgtggaccacttcaccagaaccaccacctggcagagacccaccctggagagcgtgagaaactacgagcagtggcagctgcagagaagccagctgcagggcgccatgcagcagttcaaccagagattcatctacggcaaccaggacctgttcgccaccagccagagcaaggagttcgaccccctgggccccctgccccccggctgggagaagagaaccgacagcaacggcagagtgtacttcgtgaaccacaacaccagaatcacccagtgggaggaccccagaagccagggccagctgaacgagaagcccctgcccgagggctgggagatgagattcaccgtggacggcatcccctacttcgtggaccacaacagaagaaccaccacctacatcgaccccagaaccggcaagagcgccctggacaacggcccccagatcgcctacgtgagagacttcaaggccaaggtgcagtacttcagattctggtgccagcagctggccatgccccagcacatcaagatcaccgtgaccagaaagaccctgttcgaggacagcttccagcagatcatgagcttcagcccccaggacctgagaagaagactgtgggtgatcttccccggcgaggagggcctggactacggcggcgtggccagagagtggttcttcctgctgagccacgaggtgctgaaccccatgtactgcctgttcgagtacgccggcaaggacaactactgcctgcagatcaaccccgccagctacatcaaccccgaccacctgaagtacttcagattcatcggcagattcatcgccatggccctgttccacggcaagttcatcgacaccggcttcagcctgcccttctacaagagaatcctgaacaagcccgtgggcctgaaggacctggagagcatcgaccccgagttctacaacagcctgatctgggtgaaggagaacaacatcgaggagtgcgacctggagatgtacttcagcgtggacaaggagatcctgggcgagatcaagagccacgacctgaagcccaacggcggcaacatcctggtgaccgaggagaacaaggaggagtacatcagaatggtggccgagtggagactgagcagaggcgtggaggagcagacccaggccttcttcgagggcttcaacgagatcctgccccagcagtacctgcagtacttcgacgccaaggagctggaggtgctgctgtgcggcatgcaggagatcgacctgaacgactggcagagacacgccatctacagacactacgccagaaccagcaagcagatcatgtggttctggcagttcgtgaaggagatcgacaacgagaagagaatgagactgctgcagttcgtgaccggcacctgcagactgcccgtgggcggcttcgccgacctgatgggcagcaacggcccccagaagttctgcatcgagaaggtgggcaaggagaactggctgcccagaagccacacctgcttcaacagactggacctgcccccctacaagagctacgagcagctgaaggagaagctgctgttcgccatcgaggagaccgagggcttcggccaggagtag

SEQ ID NO: 85867 - DNA, 3717 bp, synthetic construct
  misc_feature 1..3717: note = Description of Artificial Sequence: Synthetic coding sequence
  source 1..3717: mol_type = other DNA
atgagagcccagggcagaggcagactgcccagaagactgctgctgctgctggccctgtgggtgcaggccgccagacccatgggctacttcgagctgcagctgagcgccctgagaaacgtgaacggcgagctgctgagcggcgcctgctgcgacggcgacggcagaaccaccagagccggcggctgcggccacgacgagtgcgacacctacgtgagagtgtgcctgaaggagtaccaggccaaggtgacccccaccggcccctgcagctacggccacggcgccacccccgtgctgggcggcaacagcttctacctgccccccgccggcgccgccggcgacagagccagagccagagccagagccggcggcgaccaggaccccggcctggtggtgatccccttccagttcgcctggcccagaagcttcaccctgatcgtggaggcctgggactgggacaacgacaccacccccaacgaggagctgctgatcgagagagtgagccacgccggcatgatcaaccccgaggacagatggaagagcctgcacttcagcggccacgtggcccacctggagctgcagatcagagtgagatgcgacgagaactactacagcgccacctgcaacaagttctgcagacccagaaacgacttcttcggccactacacctgcgaccagtacggcaacaaggcctgcatggacggctggatgggcaaggagtgcaaggaggccgtgtgcaagcagggctgcaacctgctgcacggcggctgcaccgtgcccggcgagtgcagatgcagctacggctggcagggcagattctgcgacgagtgcgtgccctaccccggctgcgtgcacggcagctgcgtggagccctggcagtgcaactgcgagaccaactggggcggcctgctgtgcgacaaggacctgaactactgcggcagccaccacccctgcaccaacggcggcacctgcatcaacgccgagcccgaccagtacagatgcacctgccccgacggctacagcggcagaaactgcgagaaggccgagcacgcctgcaccagcaacccctgcgccaacggcggcagctgccacgaggtgcccagcggcttcgagtgccactgccccagcggctggagcggccccacctgcgccctggacatcgacgagtgcgccagcaacccctgcgccgccggcggcacctgcgtggaccaggtggacggcttcgagtgcatctgccccgagcagtgggtgggcgccacctgccagctggacgccaacgagtgcgagggcaagccctgcctgaacgccttcagctgcaagaacctgatcggcggctactactgcgactgcatccccggctggaagggcatcaactgccacatcaacgtgaacgactgcagaggccagtgccagcacggcggcacctgcaaggacctggtgaacggctaccagtgcgtgtgccccagaggcttcggcggcagacactgcgagctggagagagacgagtgcgccagcagcccctgccacagcggcggcctgtgcgaggacctggccgacggcttccactgccactgcccccagggcttcagcggccccctgtgcgaggtggacgtggacctgtgcgagcccagcccctgcagaaacggcgccagatgctacaacctggagggcgactactactgcgcctgccccgacgacttcggcggcaagaactgcagcgtgcccagagagccctgccccggcggcgcctgcagagtgatcgacggctgcggcagcgacgccggccccggcatgcccggcaccgccgccagcggcgtgtgcggcccccacggcagatgcgtgagccagcccggcggcaacttcagctgcatctgcgacagcggcttcaccggcacctactgccacgagaacatcgacgactgcctgggccagccctgcagaaacggcggcacctgcatcgacgaggtggacgccttcagatgcttctgccccagcggctgggagggcgagctgtgcgacaccaaccccaacgactgcctgcccgacccctgccacagcagaggcagatgctacgacctggtgaacgacttctactgcgcctgcgacgacggctggaagggcaagacctgccacagcagagagttccagtgcgacgcctacacctgcagcaacggcggcacctgctacgacagcggcgacaccttcagatgcgcctgcccccccggctggaagggcagcacctgcgccgtggccaagaacagcagctgcctgcccaacccctgcgtgaacggcggcacctgcgtgggcagcggcgccagcttcagctgcatctgcagagacggctgggagggcagaacctgcacccacaacaccaacgactgcaaccccctgccctgctacaacggcggcatctgcgtggacggcgtgaactggttcagatgcgagtgcgcccccggcttcgccggccccgactgcagaatcaacatcgacgagtgccagagcagcccctgcgcctacggcgccacctgcgtggacgagatcaacggctacagatgcagctgcccccccggcagagccggccccagatgccaggaggtgatcggcttcggcagaagctgctggagcagaggcacccccttcccccacggcagcagctgggtggaggactgcaacagctgcagatgcctggacggcagaagagactgcagcaaggtgtggtgcggctggaagccctgcctgctggccggccagcccgaggccctgagcgcccagtgccccctgggccagagatgcctggagaaggcccccggccagtgcctgagacccccctgcgaggcctggggcgagtgcggcgccgaggagccccccagcaccccctgcctgcccagaagcggccacctggacaacaactgcgccagactgaccctgcacttcaacagagaccacgtgccccagggcaccaccgtgggcgccatctgcagcggcatcagaagcctgcccgccaccagagccgtggccagagacagactgctggtgctgctgtgcgacagagccagcagcggcgccagcgccgtggaggtggccgtgagcttcagccccgccagagacctgcccgacagcagcctgatccagggcgccgcccacgccatcgtggccgccatcacccagagaggcaacagcagcctgctgctggccgtgaccgaggtgaaggtggagaccgtggtgaccggcggcagcagcaccggcctgctggtgcccgtgctgtgcggcgccttcagcgtgctgtggctggcctgcgtggtgctgtgcgtgtggtggaccagaaagagaagaaaggagagagagagaagcagactgcccagagaggagagcgccaacaaccagtgggcccccctgaaccccatcagaaaccccatcgagagacccggcggccacaaggacgtgctgtaccagtgcaagaacttcacccccccccccagaagagccgacgaggccctgcccggccccgccggccacgccgccgtgagagaggacgaggaggacgaggacctgggcagaggcgaggaggacagcctggaggccgagaagttcctgagccacaagttcaccaaggaccccggcagaagccccggcagacccgcccactgggccagcggccccaaggtggacaacagagccgtgagaagcatcaacgaggccagatacgccggcaaggagtag

SEQ ID NO: 85868 - DNA, 3603 bp, synthetic construct
  misc_feature 1..3603: note = Description of Artificial Sequence: Synthetic coding sequence
  source 1..3603: mol_type = other DNA
atgagagcccagggcagaggcagactgcccagaagactgctgctgctgctggccctgtgggtgcaggccgccagacccatgggctacttcgagctgcagctgagcgccctgagaaacgtgaacggcgagctgctgagcggcgcctgctgcgacggcgacggcagaaccaccagagccggcggctgcggccacgacgagtgcgacacctacgtgagagtgtgcctgaaggagtaccaggccaaggtgacccccaccggcccctgcagctacggccacggcgccacccccgtgctgggcggcaacagcttctacctgccccccgccggcgccgccggcgacagagccagagccagagccagagccggcggcgaccaggaccccggcctggtggtgatccccttccagttcgcctggcccagaagcttcaccctgatcgtggaggcctgggactgggacaacgacaccacccccaacgaggagctgctgatcgagagagtgagccacgccggcatgatcaaccccgaggacagatggaagagcctgcacttcagcggccacgtggcccacctggagctgcagatcagagtgagatgcgacgagaactactacagcgccacctgcaacaagttctgcagacccagaaacgacttcttcggccactacacctgcgaccagtacggcaacaaggcctgcatggacggctggatgggcaaggagtgcaaggaggccgtgtgcaagcagggctgcaacctgctgcacggcggctgcaccgtgcccggcgagtgcagatgcagctacggctggcagggcagattctgcgacgagtgcgtgccctaccccggctgcgtgcacggcagctgcgtggagccctggcagtgcaactgcgagaccaactggggcggcctgctgtgcgacaaggacctgaactactgcggcagccaccacccctgcaccaacggcggcacctgcatcaacgccgagcccgaccagtacagatgcacctgccccgacggctacagcggcagaaactgcgagaaggccgagcacgcctgcaccagcaacccctgcgccaacggcggcagctgccacgaggtgcccagcggcttcgagtgccactgccccagcggctggagcggccccacctgcgccctggacatcgacgagtgcgccagcaacccctgcgccgccggcggcacctgcgtggaccaggtggacggcttcgagtgcatctgccccgagcagtgggtgggcgccacctgccagctggacgtgaacgactgcagaggccagtgccagcacggcggcacctgcaaggacctggtgaacggctaccagtgcgtgtgccccagaggcttcggcggcagacactgcgagctggagagagacgagtgcgccagcagcccctgccacagcggcggcctgtgcgaggacctggccgacggcttccactgccactgcccccagggcttcagcggccccctgtgcgaggtggacgtggacctgtgcgagcccagcccctgcagaaacggcgccagatgctacaacctggagggcgactactactgcgcctgccccgacgacttcggcggcaagaactgcagcgtgcccagagagccctgccccggcggcgcctgcagagtgatcgacggctgcggcagcgacgccggccccggcatgcccggcaccgccgccagcggcgtgtgcggcccccacggcagatgcgtgagccagcccggcggcaacttcagctgcatctgcgacagcggcttcaccggcacctactgccacgagaacatcgacgactgcctgggccagccctgcagaaacggcggcacctgcatcgacgaggtggacgccttcagatgcttctgccccagcggctgggagggcgagctgtgcgacaccaaccccaacgactgcctgcccgacccctgccacagcagaggcagatgctacgacctggtgaacgacttctactgcgcctgcgacgacggctggaagggcaagacctgccacagcagagagttccagtgcgacgcctacacctgcagcaacggcggcacctgctacgacagcggcgacaccttcagatgcgcctgcccccccggctggaagggcagcacctgcgccgtggccaagaacagcagctgcctgcccaacccctgcgtgaacggcggcacctgcgtgggcagcggcgccagcttcagctgcatctgcagagacggctgggagggcagaacctgcacccacaacaccaacgactgcaaccccctgccctgctacaacggcggcatctgcgtggacggcgtgaactggttcagatgcgagtgcgcccccggcttcgccggccccgactgcagaatcaacatcgacgagtgccagagcagcccctgcgcctacggcgccacctgcgtggacgagatcaacggctacagatgcagctgcccccccggcagagccggccccagatgccaggaggtgatcggcttcggcagaagctgctggagcagaggcacccccttcccccacggcagcagctgggtggaggactgcaacagctgcagatgcctggacggcagaagagactgcagcaaggtgtggtgcggctggaagccctgcctgctggccggccagcccgaggccctgagcgcccagtgccccctgggccagagatgcctggagaaggcccccggccagtgcctgagacccccctgcgaggcctggggcgagtgcggcgccgaggagccccccagcaccccctgcctgcccagaagcggccacctggacaacaactgcgccagactgaccctgcacttcaacagagaccacgtgccccagggcaccaccgtgggcgccatctgcagcggcatcagaagcctgcccgccaccagagccgtggccagagacagactgctggtgctgctgtgcgacagagccagcagcggcgccagcgccgtggaggtggccgtgagcttcagccccgccagagacctgcccgacagcagcctgatccagggcgccgcccacgccatcgtggccgccatcacccagagaggcaacagcagcctgctgctggccgtgaccgaggtgaaggtggagaccgtggtgaccggcggcagcagcaccggcctgctggtgcccgtgctgtgcggcgccttcagcgtgctgtggctggcctgcgtggtgctgtgcgtgtggtggaccagaaagagaagaaaggagagagagagaagcagactgcccagagaggagagcgccaacaaccagtgggcccccctgaaccccatcagaaaccccatcgagagacccggcggccacaaggacgtgctgtaccagtgcaagaacttcacccccccccccagaagagccgacgaggccctgcccggccccgccggccacgccgccgtgagagaggacgaggaggacgaggacctgggcagaggcgaggaggacagcctggaggccgagaagttcctgagccacaagttcaccaaggaccccggcagaagccccggcagacccgcccactgggccagcggccccaaggtggacaacagagccgtgagaagcatcaacgaggccagatacgccggcaaggagtag

SEQ ID NO: 85869 - DNA, 3465 bp, synthetic construct
  misc_feature 1..3465: note = Description of Artificial Sequence: Synthetic coding sequence
  source 1..3465: mol_type = other DNA
atgcagtacctgaacatcaaggaggactgcaacgccatggccttctgcgccaagatgagaagcagcaagaagaccgaggtgaacctggaggcccccgagcccggcgtggaggtgatcttctacctgagcgacagagagcccctgagactgggcagcggcgagtacaccgccgaggagctgtgcatcagagccgcccaggcctgcagaatcagccccctgtgccacaacctgttcgccctgtacgacgagaacaccaagctgtggtacgcccccaacagaaccatcaccgtggacgacaagatgagcctgagactgcactacagaatgagattctacttcaccaactggcacggcaccaacgacaacgagcagagcgtgtggagacacagccccaagaagcagaagaacggctacgagaagaagaagatccccgacgccacccccctgctggacgccagcagcctggagtacctgttcgcccagggccagtacgacctggtgaagtgcctggcccccatcagagaccccaagaccgagcaggacggccacgacatcgagaacgagtgcctgggcatggccgtgctggccatcagccactacgccatgatgaagaagatgcagctgcccgagctgcccaaggacatcagctacaagagatacatccccgagaccctgaacaagagcatcagacagagaaacctgctgaccagaatgagaatcaacaacgtgttcaaggacttcctgaaggagttcaacaacaagaccatctgcgacagcagcgtgagcacccacgacctgaaggtgaagtacctggccaccctggagaccctgaccaagcactacggcgccgagatcttcgagaccagcatgctgctgatcagcagcgagaacgagatgaactggttccacagcaacgacggcggcaacgtgctgtactacgaggtgatggtgaccggcaacctgggcatccagtggagacacaagcccaacgtggtgagcgtggagaaggagaagaacaagctgaagagaaagaagctggagaacaagcacaagaaggacgaggagaagaacaagatcagagaggagtggaacaacttcagctacttccccgagatcacccacatcgtgatcaaggagagcgtggtgagcatcaacaagcaggacaacaagaagatggagctgaagctgagcagccacgaggaggccctgagcttcgtgagcctggtggacggctacttcagactgaccgccgacgcccaccactacctgtgcaccgacgtggccccccccctgatcgtgcacaacatccagaacggctgccacggccccatctgcaccgagtacgccatcaacaagctgagacaggagggcagcgaggagggcatgtacgtgctgagatggagctgcaccgacttcgacaacatcctgatgaccgtgacctgcttcgagaagagcgagcaggtgcagggcgcccagaagcagttcaagaacttccagatcgaggtgcagaagggcagatacagcctgcacggcagcgacagaagcttccccagcctgggcgacctgatgagccacctgaagaagcagatcctgagaaccgacaacatcagcttcatgctgaagagatgctgccagcccaagcccagagagatcagcaacctgctggtggccaccaagaaggcccaggagtggcagcccgtgtaccccatgagccagctgagcttcgacagaatcctgaagaaggacctggtgcagggcgagcacctgggcagaggcaccagaacccacatctacagcggcaccctgatggactacaaggacgacgagggcaccagcgaggagaagaagatcaaggtgatcctgaaggtgctggaccccagccacagagacatcagcctggccttcttcgaggccgccagcatgatgagacaggtgagccacaagcacatcgtgtacctgtacggcgtgtgcgtgagagacgtggagaacatcatggtggaggagttcgtggagggcggccccctggacctgttcatgcacagaaagagcgacgtgctgaccaccccctggaagttcaaggtggccaagcagctggccagcgccctgagctacctggaggacaaggacctggtgcacggcaacgtgtgcaccaagaacctgctgctggccagagagggcatcgacagcgagtgcggccccttcatcaagctgagcgaccccggcatccccatcaccgtgctgagcagacaggagtgcatcgagagaatcccctggatcgcccccgagtgcgtggaggacagcaagaacctgagcgtggccgccgacaagtggagcttcggcaccaccctgtgggagatctgctacaacggcgagatccccctgaaggacaagaccctgatcgagaaggagagattctacgagagcagatgcagacccgtgacccccagctgcaaggagctggccgacctgatgaccagatgcatgaactacgaccccaaccagagacccttcttcagagccatcatgagagacatcaacaagctggaggagcagaaccccgacatcgtgagcgagaagaagcccgccaccgaggtggaccccacccacttcgagaagagattcctgaagagaatcagagacctgggcgagggccacttcggcaaggtggagctgtgcagatacgaccccgagggcgacaacaccggcgagcaggtggccgtgaagagcctgaagcccgagagcggcggcaaccacatcgccgacctgaagaaggagatcgagatcctgagaaacctgtaccacgagaacatcgtgaagtacaagggcatctgcaccgaggacggcggcaacggcatcaagctgatcatggagttcctgcccagcggcagcctgaaggagtacctgcccaagaacaagaacaagatcaacctgaagcagcagctgaagtacgccgtgcagatctgcaagggcatggactacctgggcagcagacagtacgtgcacagagacctggccgccagaaacgtgctggtggagagcgagcaccaggtgaagatcggcgacttcggcctgaccaaggccatcgagaccgacaaggagtactacaccgtgaaggacgacagagacagccccgtgttctggtacgcccccgagtgcctgatgcagagcaagttctacatcgccagcgacgtgtggagcttcggcgtgaccctgcacgagctgctgacctactgcgacagcgacagcagccccatggccctgttcctgaagatgatcggccccacccacggccagatgaccgtgaccagactggtgaacaccctgaaggagggcaagagactgccctgcccccccaactgccccgacgaggtgtaccagctgatgagaaagtgctgggagttccagcccagcaacagaaccagcttccagaacctgatcgagggcttcgaggccctgctgaagtag

SEQ ID NO: 85870 - DNA, 1860 bp, synthetic construct
  misc_feature 1..1860: note = Description of Artificial Sequence: Synthetic coding sequence
  source 1..1860: mol_type = other DNA
atggccccccccagcgaggagacccccctgatcccccagagaagctgcagcctgctgagcaccgaggccggcgccctgcacgtgctgctgcccgccagaggccccggccccccccagagactgagcttcagcttcggcgaccacctggccgaggacctgtgcgtgcaggccgccaaggccagcggcatcctgcccgtgtaccacagcctgttcgccctggccaccgaggacctgagctgctggttcccccccagccacatcttcagcgtggaggacgccagcacccaggtgctgctgtacagaatcagattctacttccccaactggttcggcctggagaagtgccacagattcggcctgagaaaggacctggccagcgccatcctggacctgcccgtgctggagcacctgttcgcccagcacagaagcgacctggtgagcggcagactgcccgtgggcctgagcctgaaggagcagggcgagtgcctgagcctggccgtgctggacctggccagaatggccagagagcaggcccagagacccggcgagctgctgaagaccgtgagctacaaggcctgcctgccccccagcctgagagacctgatccagggcctgagcttcgtgaccagaagaagaatcagaagaaccgtgagaagagccctgagaagagtggccgcctgccaggccgacagacacagcctgatggccaagtacatcatggacctggagagactggaccccgccggcgccgccgagaccttccacgtgggcctgcccggcgccctgggcggccacgacggcctgggcctgctgagagtggccggcgacggcggcatcgcctggacccagggcgagcaggaggtgctgcagcccttctgcgacttccccgagatcgtggacatcagcatcaagcaggcccccagagtgggccccgccggcgagcacagactggtgaccgtgaccagaaccgacaaccagatcctggaggccgagttccccggcctgcccgaggccctgagcttcgtggccctggtggacggctacttcagactgaccaccgacagccagcacttcttctgcaaggaggtggccccccccagactgctggaggaggtggccgagcagtgccacggccccatcaccctggacttcgccatcaacaagctgaagaccggcggcagcagacccggcagctacgtgctgagaagaagcccccaggacttcgacagcttcctgctgaccgtgtgcgtgcagaaccccctgggccccgactacaagggctgcctgatcagaagaagccccaccggcaccttcctgctggtgggcctgagcagaccccacagcagcctgagagagctgctggccacctgctgggacggcggcctgcacgtggacggcgtggccgtgaccctgaccagctgctgcatccccagacccaaggagaagagcaacctgatcgtggtgcagagaggccacagcccccccaccagcagcctggtgcagccccagagccagtaccagctgagccagatgaccttccacaagatccccgccgacagcctggagtggcacgagaacctgggccacggcagcttcaccaagatctacagaggctgcagacacgaggtggtggacggcgaggccagaaagaccgaggtgctgctgaaggtgatggacgccaagcacaagaactgcatggagagcttcctggaggccgccagcctgatgagccaggtgagctacagacacctggtgctgctgcacggcgtgtgcatggccggcgacagcgagagccccccccccacccaccccacccccgccagccccaagagcagactgttcttcccccccctgttctag

SEQ ID NO: 85871 - DNA, 3375 bp, synthetic construct
  misc_feature 1..3375: note = Description of Artificial Sequence: Synthetic coding sequence
  source 1..3375: mol_type = other DNA
atggccccccccagcgaggagacccccctgatcccccagagaagctgcagcctgctgagcaccgaggccggcgccctgcacgtgctgctgcccgccagaggccccggccccccccagagactgagcttcagcttcggcgaccacctggccgaggacctgtgcgtgcaggccgccaaggccagcggcatcctgcccgtgtaccacagcctgttcgccctggccaccgaggacctgagctgctggttcccccccagccacatcttcagcgtggaggacgccagcacccaggtgctgctgtacagaatcagattctacttccccaactggttcggcctggagaagtgccacagattcggcctgagaaaggacctggccagcgccatcctggacctgcccgtgctggagcacctgttcgcccagcacagaagcgacctggtgagcggcagactgcccgtgggcctgagcctgaaggagcagggcgagtgcctgagcctggccgtgctggacctggccagaatggccagagagcaggcccagagacccggcgagctgctgaagaccgtgagctacaaggcctgcctgccccccagcctgagagacctgatccagggcctgagcttcgtgaccagaagaagaatcagaagaaccgtgagaagagccctgagaagagtggccgcctgccaggccgacagacacagcctgatggccaagtacatcatggacctggagagactggaccccgccggcgccgccgagaccttccacgtgggcctgcccggcgccctgggcggccacgacggcctgggcctgctgagagtggccggcgacggcggcatcgcctggacccagggcgagcaggaggtgctgcagcccttctgcgacttccccgagatcgtggacatcagcatcaagcaggcccccagagtgggccccgccggcgagcacagactggtgaccgtgaccagaaccgacaaccagatcctggaggccgagttccccggcctgcccgaggccctgagcttcgtggccctggtggacggctacttcagactgaccaccgacagccagcacttcttctgcaaggaggtggccccccccagactgctggaggaggtggccgagcagtgccacggccccatcaccctggacttcgccatcaacaagctgaagaccggcggcagcagacccggcagctacgtgctgagaagaagcccccaggacttcgacagcttcctgctgaccgtgtgcgtgcagaaccccctgggccccgactacaagggctgcctgatcagaagaagccccaccggcaccttcctgctggtgggcctgagcagaccccacagcagcctgagagagctgctggccacctgctgggacggcggcctgcacgtggacggcgtggccgtgaccctgaccagctgctgcatccccagacccaaggagaagagcaacctgatcgtggtgcagagaggccacagcccccccaccagcagcctggtgcagccccagagccagtaccagctgagccagatgaccttccacaagatccccgccgacagcctggagtggcacgagaacctgggccacggcagcttcaccaagatctacagaggctgcagacacgaggtggtggacggcgaggccagaaagaccgaggtgctgctgaaggtgatggacgccaagcacaagaactgcatggagagcttcctggaggccgccagcctgatgagccaggtgagctacagacacctggtgctgctgcacggcgtgtgcatggccggcgacagcaccatggtgcaggagttcgtgcacctgggcgccatcgacatgtacctgagaaagagaggccacctggtgcccgccagctggaagctgcaggtggtgaagcagctggcctacgccctgaactacctggaggacaagggcctgccccacggcaacgtgagcgccagaaaggtgctgctggccagagagggcgccgacggcagcccccccttcatcaagctgagcgaccccggcgtgagccccgccgtgctgagcctggagatgctgaccgacagaatcccctgggtggcccccgagtgcctgagagaggcccagaccctgagcctggaggccgacaagtggggcttcggcgccaccgtgtgggaggtgttcagcggcgtgaccatgcccatcagcgccctggaccccgccaagaagctgcagttctacgaggacagacagcagctgcccgcccccaagtggaccgagctggccctgctgatccagcagtgcatggcctacgagcccgtgcagagacccagcttcagagccgtgatcagagacctgaacagcctgatcagcagcgactacgagctgctgagcgaccccacccccggcgccctggcccccagagacggcctgtggaacggcgcccagctgtacgcctgccaggaccccaccatcttcgaggagagacacctgaagtacatcagccagctgggcaagggcaacttcggcagcgtggagctgtgcagatacgaccccctgggcgacaacaccggcgccctggtggccgtgaagcagctgcagcacagcggccccgaccagcagagagacttccagagagagatccagatcctgaaggccctgcacagcgacttcatcgtgaagtacagaggcgtgagctacggccccggcagacagagcctgagactggtgatggagtacctgcccagcggctgcctgagagacttcctgcagagacacagagccagactggacgccagcagactgctgctgtacagcagccagatctgcaagggcatggagtacctgggcagcagaagatgcgtgcacagagacctggccgccagaaacatcctggtggagagcgaggcccacgtgaagatcgccgacttcggcctggccaagctgctgcccctggacaaggactactacgtggtgagagagcccggccagagccccatcttctggtacgcccccgagagcctgagcgacaacatcttcagcagacagagcgacgtgtggagcttcggcgtggtgctgtacgagctgttcacctactgcgacaagagctgcagccccagcgccgagttcctgagaatgatgggctgcgagagagacgtgcccgccctgtgcagactgctggagctgctggaggagggccagagactgcccgccccccccgcctgccccgccgaggtgcacgagctgatgaagctgtgctgggcccccagcccccaggacagacccagcttcagcgccctgggcccccagctggacatgctgtggagcggcagcagaggctgcgagacccacgccttcaccgcccaccccgagggcaagcaccacagcctgagcttcagctag

SEQ ID NO: 85872 - DNA, 3375 bp, synthetic construct; identical to SEQ ID NO: 85871
  misc_feature 1..3375: note = Description of Artificial Sequence: Synthetic coding sequence
  source 1..3375: mol_type = other DNA

SEQ ID NO: 85873 - DNA, 3285 bp, synthetic construct
  misc_feature 1..3285: note = Description of Artificial Sequence: Synthetic coding sequence
  source 1..3285: mol_type = other DNA
atggccccccccagcgaggagacccccctgatcccccagagaagctgcagcctgctgagcaccgaggccggcgccctgcacgtgctgctgcccgccagaggccccggccccccccagagactgagcttcagcttcggcgaccacctggccgaggacctgtgcgtgcaggccgccaaggccagcggcatcctgcccgtgtaccacagcctgttcgccctggccaccgaggacctgagctgctggttcccccccagccacatcttcagcgtggaggacgccagcacccaggtgctgctgtacagaatcagattctacttccccaactggttcggcctggagaagtgccacagattcggcctgagaaaggacctggccagcgccatcctggacctgcccgtgctggagcacctgttcgcccagcacagaagcgacctggtgagcggcagactgcccgtgggcctgagcctgaaggagcagggcgagtgcctgagcctggccgtgctggacctggccagaatggccagagagcaggcccagagacccggcgagctgctgaagaccgtgagctacaaggcctgcctgccccccagcctgagagacctgatccagggcctgagcttcgtgaccagaagaagaatcagaagaaccgtgagaagagccctgagaagagtggccgcctgccaggccgacagacacagcctgatggccaagtacatcatggacctggagagactggaccccgccggcgccgccgagaccttccacgtgggcctgcccggcgccctgggcggccacgacggcctgggcctgctgagagtggccggcgacggcggcatcgcctggacccagggcgagcaggaggtgctgcagcccttctgcgacttccccgagatcgtggacatcagcatcaagcaggcccccagagtgggccccgccggcgagcacagactggtgaccgtgaccagaaccgacaaccagatcctggaggccgagttccccggcctgcccgaggccctgagcttcgtggccctggtggacggctacttcagactgaccaccgacagccagcacttcttctgcaaggaggtggccccccccagactgctggaggaggtggccgagcagtgccacggccccatcaccctggacttcgccatcaacaagctgaagaccggcggcagcagacccggcagctacgtgctgagaagaagcccccaggacttcgacagcttcctgctgaccgtgtgcgtgcagaaccccctgggccccgactacaagggctgcctgatcagaagaagccccaccggcaccttcctgctggtgggcctgagcagaccccacagcagcctgagagagctgctggccacctgctgggacggcggcctgcacgtggacggcgtggccgtgaccctgaccagctgctgcatccccagacccaaggagaagagcaacctgatcgtggtgcagagaggccacagcccccccaccagcagcctggtgcagccccagagccagtaccagctgagccagatgaccttccacaagatccccgccgacagcctggagtggcacgagaacctgggccacggcagcttcaccaagatctacagaggctgcagacacgaggtggtggacggcgaggccagaaagaccgaggtgctgctgaaggtgatggacgccaagcacaagaactgcatggagagcttcctggaggccgccagcctgatgagccaggtgagctacagacacctggtgctgctgcacggcgtgtgcatggccggcgacagcaccatggtgcaggagttcgtgcacctgggcgccatcgacatgtacctgagaaagagaggccacctggtgcccgccagctggaagctgcaggtggtgaagcagctggcctacgccctgaactacctggaggacaagggcctgccccacggcaacgtgagcgccagaaaggtgctgctggccagagagggcgccgacggcagcccccccttcatcaagctgagcgaccccggcgtgagccccgccgtgctgagcctggagatgctgaccgacagaatcccctgggtggcccccgagtgcctgagagaggcccagaccctgagcctggaggccgacaagtggggcttcggcgccaccgtgtgggaggtgttcagcggcgtgaccatgcccatcagcgccctggaccccgccaagaagctgcagttctacgaggacagacagcagctgcccgcccccaagtggaccgagctggccctgctgatccagcagtgcatggcctacgagcccgtgcagagacccagcttcagagccgtgatcagagacctgaacagcctgatcagcagcgactacgagctgctgagcgaccccacccccggcgccctggcccccagagacggcctgtggaacggcgcccagctgtacgcctgccaggaccccaccatcttcgaggagagacacctgaagtacatcagccagctgggcaagggcaacttcggcagcgtggagctgtgcagatacgaccccctgggcgacaacaccggcgccctggtggccgtgaagcagctgcagcacagcggccccgaccagcagagagacttccagagagagatccagatcctgaaggccctgcacagcgacttcatcgtgaagtacagaggcgtgagctacggccccggcagacagagcctgagactggtgatggagtacctgcccagcggctgcctgagagacttcctgcagagacacagagccagactggacgccagcagactgctgctgtacagcagccagatctgcaagggcatggagtacctgggcagcagaagatgcgtgcacagagacctggccgccagaaacatcctggtggagagcgaggcccacgtgaagatcgccgacttcggcctggccaagctgctgcccctggacaaggactactacgtggtgagagagcccggccagagccccatcttctggtacgcccccgagagcctgagcgacaacatcttcagcagacagagcgacgtgtggagcttcggcgtggtgctgtacgagctgttcacctactgcgacaagagctgcagccccagcgccgagttcctgagaatgatgggctgcgagagagacgtgcccgccctgtgcagactgctggagctgctggaggagggccagagactgcccgccccccccgcctgccccgccgaggtgagcgccgccggcctggccagcgtgagccagagcgtggactgggccggcgtgagcggcaagcccgccggcgcctag

SEQ ID NO: 85874 - DNA, 1575 bp, synthetic construct
  misc_feature 1..1575: note = Description of Artificial Sequence: Synthetic coding sequence
  source 1..1575: mol_type = other DNA
atgagcggcaagagaaagagagtggtgctgaccatcaaggacaagctggacatcatcaagaagctggaggacggcggcagcagcaagcagctggccgtgatctacggcatcggcgagaccaccgtgagagacatcagaaagaacaaggagaagatcatcacctacgccagcagcagcgacagcaccagcctgctggccaagagaaagagcatgaagcccagcatgtacgaggagctggacagagccatgctggagtggttcaaccagcagagagccaagggcaaccccatcagcggccccatctgcgccaagagagccgagttcttcttctacgccctgggcatggacggcgacttcaaccccagcgccggctggctgaccagattcaagcagagacacagcatcagagagatcaacatcagaaacgagagactgaacggcgacgagaccgccgtggaggacttctgcaacaacttcagagacttcatcgagagagagaacctgcagcccgagcagatctacaacgccgacgagaccggcctgttctggaagtgcctgcccagcagaatcagcgtgatcaagggcaagtgcaccgtgcccggccacaagagcatcgaggagagagtgaccatcatgtgctgcgccaacgccaccggcctgcacaagctgaagctgtgcgtggtgggcaaggccaagaagcccagaagcttcaagagcaccgacaccctgaacctgcccgtgagctacttcagccagaagggcgcctggatggacctgagcatcttcagacagtggttcgacaagatcttcgtgccccaggtgagagagtacctgagaagcaagggcctgcaggagaaggccgtgctgctgctggacaacagccccacccaccccaacgagaacgtgctgagaagcgacgacggccagatcttcgccaagtacctgccccccaacgtggccagcctgatccagcccagcgaccagggcgtgatcgccaccatgaagagaaactacagagccggcctgctgcagaacaacctggaggagggcaacgacctgaagagcttctggaagaagctgaccctgctggacgccctgtacgagatcgccatggcctggaacctggtgaagcccgtgaccatcagcagagcctggaagaagatcctgcccatggtggaggagaaggagagcctggacttcgacgtggaggacatcagcgtggccaccgtggccgccatcctgcagcacaccaagggcctggagaacgtgaccaccgagaacctggagaagtggctggaggtggacagcaccgagcccggctacgaggtgctgaccgacagcgagatcatcagaagagcccagggccaggccgacgagagcagcgagaacgaggaggaggagatcgagctgatccccgagaagcacatcaaccacgccgccgccctgcagtggaccgagaacctgctggactacctggagcagcagggcgacatgatcctgcccgacagactggtgatcagaaagctgagagccaccatcagaaacaagcagaagatgaccaagagcagccagtag

SEQ ID NO: 85875 - DNA, 1575 bp, synthetic construct; identical to SEQ ID NO: 85874
  misc_feature 1..1575: note = Description of Artificial Sequence: Synthetic coding sequence
  source 1..1575: mol_type = other DNA

SEQ ID NO: 85876 - DNA, 1251 bp, synthetic construct
  misc_feature 1..1251: note = Description of Artificial Sequence: Synthetic coding sequence
  source 1..1251: mol_type = other DNA
atggccggcgacacccactgccccgccgagcccctggccagagagggcaccctgtgggaggccctgagagccctgctgccccacagcaaggaggacctgaagctggacctgggcgagaaggtggagagaagcgtggtgaccctgctgcagagagccaccgagctgttctacgagggcagaagagacgagtgcctgcagagcagcgaggtgatcctggactacagctgggagaagctgaacaccggcacctggcaggacgtggacaaggactggagaagagtgtacgccatcggctgcctgctgaaggccctgtgcctgtgccaggcccccgaggacgccaacaccgtggccgccgccctgagagtgtgcgacatgggcctgctgatgggcgccgccatcctgggcgacatcctgctgaaggtggccgccatcctgcagacccacctgcccggcaagagacccgccagaggcagcctgcccgagcagccctgcaccaagaaggccagagccgaccacggcctgatccccgacgtgaagctggagaagaccgtgcccagactgcacagacccagcctgcagcacttcagagagcagttcctggtgcccggcagacccgtgatcctgaagggcgtggccgaccactggccctgcatgcagaagtggagcctggagtacatccaggagatcgccggctgcagaaccgtgcccgtggaggtgggcagcagatacaccgacgaggagtggagccagaccctgatgaccgtgaacgagttcatcagcaagtacatcgtgaacgagcccagagacgtgggctacctggcccagcaccagctgttcgaccagatccccgagctgaagcaggacatcagcatccccgactactgcagcctgggcgacggcgaggaggaggagatcaccatcaacgcctggttcggcccccagggcaccatcagccccctgcaccaggacccccagcagaacttcctggtgcaggtgatgggcagaaagtacatcagactgtacagcccccaggagagcggcgccctgtacccccacgacacccacctgctgcacaacaccagccaggtggacgtggagaaccccgacctggagaagttccccaagttcgccaaggcccccttcctgagctgcatcctgagccccggcgagatcctgttcatccccgtgaagtactggcactacgtgagagccctggacctgagcttcagcgtgagcttctggtggagctag

SEQ ID NO: 85877 - DNA, 663 bp, synthetic construct
  misc_feature 1..663: note = Description of Artificial Sequence: Synthetic coding sequence
  source 1..663: mol_type = other DNA
atggccggcgacacccactgccccgccgagcccctggccagagagggcaccctgtgggaggccctgagagccctgctgccccacagcaaggaggacctgaagctggacctgggcgagaaggtggagagaagcgtggtgaccctgctgcagagagccaccgagctgttctacgagggcagaagagacgagtgcctgcagagcagcgaggtgatcctggactacagctgggagaagctgaacaccggcacctggcaggacgtggacaaggactggagaagagtgtacgccatcggctgcctgctgaaggccctgtgcctgtgccaggcccccgaggacgccaacaccgtggccgccgccctgagagtgtgcgacatgggcctgctgatgggcgccgccatcctgggcgacatcctgctgaaggtggccgccatcctgcagacccacctgcccggcaagagacccgccagaggcagcctgcccgagcagccctgcaccaaggtggacgtggagaaccccgacctggagaagttccccaagttcgccaaggcccccttcctgagctgcatcctgagccccggcgagatcctgttcatccccgtgaagtactggcactacgtgagagccctggacctgagcttcagcgtgagcttctggtggagctag

SEQ ID NO: 85878 - DNA, 1365 bp, synthetic construct
  misc_feature 1..1365: note = Description of Artificial Sequence: Synthetic coding sequence
  source 1..1365: mol_type = other DNA
atgagcagagagaagtgcagccccggcgagggcgccgaggagggcagaggcagcgaggccagcggcctgaaggccagcgccggccacggcaccgagcccgccggcggcggccccatggccggcgacacccactgccccgccgagcccctggccagagagggcaccctgtgggaggccctgagagccctgctgccccacagcaaggaggacctgaagctggacctgggcgagaaggtggagagaagcgtggtgaccctgctgcagagagccaccgagctgttctacgagggcagaagagacgagtgcctgcagagcagcgaggtgatcctggactacagctgggagaagctgaacaccggcacctggcaggacgtggacaaggactggagaagagtgtacgccatcggctgcctgctgaaggccctgtgcctgtgccaggcccccgaggacgccaacaccgtggccgccgccctgagagtgtgcgacatgggcctgctgatgggcgccgccatcctgggcgacatcctgctgaaggtggccgccatcctgcagacccacctgcccggcaagagacccgccagaggcagcctgcccgagcagccctgcaccaagaaggccagagccgaccacggcctgatccccgacgtgaagctggagaagaccgtgcccagactgcacagacccagcctgcagcacttcagagagcagttcctggtgcccggcagacccgtgatcctgaagggcgtggccgaccactggccctgcatgcagaagtggagcctggagtacatccaggagatcgccggctgcagaaccgtgcccgtggaggtgggcagcagatacaccgacgaggagtggagccagaccctgatgaccgtgaacgagttcatcagcaagtacatcgtgaacgagcccagagacgtgggctacctggcccagcaccagctgttcgaccagatccccgagctgaagcaggacatcagcatccccgactactgcagcctgggcgacggcgaggaggaggagatcaccatcaacgcctggttcggcccccagggcaccatcagccccctgcaccaggacccccagcagaacttcctggtgcaggtgatgggcagaaagtacatcagactgtacagcccccaggagagcggcgccctgtacccccacgacacccacctgctgcacaacaccagccaggtggacgtggagaaccccgacctggagaagttccccaagttcgccaaggcccccttcctgagctgcatcctgagccccggcgagatcctgttcatccccgtgaagtactggcactacgtgagagccctggacctgagcttcagcgtgagcttctggtggagctag

SEQ ID NO: 85879 - DNA, 441 bp, synthetic construct
  misc_feature 1..441: note = Description of Artificial Sequence: Synthetic coding sequence
  source 1..441: mol_type = other DNA
atgaccgtgaacgagttcatcagcaagtacatcgtgaacgagcccagagacgtgggctacctggcccagcaccagctgttcgaccagatccccgagctgaagcaggacatcagcatccccgactactgcagcctgggcgacggcgaggaggaggagatcaccatcaacgcctggttcggcccccagggcaccatcagccccctgcaccaggacccccagcagaacttcctggtgcaggtgatgggcagaaagtacatcagactgtacagcccccaggagagcggcgccctgtacccccacgacacccacctgctgcacaacaccagccaggtggacgtggagaaccccgacctggagaagttccccaagttcgccaaggcccccttcctgagctgcatcctgagccccggcgagatcctgttcatccccgtgaagtactag

SEQ ID NO: 85880 - DNA, 1119 bp, synthetic construct
  misc_feature 1..1119: note = Description of Artificial Sequence: Synthetic coding sequence
  source 1..1119: mol_type = other DNA
atgaaccacaagagcaagaagagaatcagagaggccaagagaagcgccagacccgagctgaaggacagcctggactggaccagacacaactactacgagagcttcagcctgagccccgccgccgtggccgacaacgtggagagagccgacgccctgcagctgagcgtggaggagttcgtggagagatacgagagaccctacaagcccgtggtgctgctgaacgcccaggagggctggagcgcccaggagaagtggaccctggagagactgaagagaaagtacagaaaccagaagttcaagtgcggcgaggacaacgacggctacagcgtgaagatgaagatgaagtactacatcgagtacatggagagcaccagagacgacagccccctgtacatcttcgacagcagctacggcgagcaccccaagagaagaaagctgctggaggactacaaggtgcccaagttcttcaccgacgacctgttccagtacgccggcgagaagagaagacccccctacagatggttcgtgatgggcccccccagaagcggcaccggcatccacatcgaccccctgggcaccagcgcctggaacgccctggtgcagggccacaagagatggtgcctgttccccaccagcacccccagagagctgatcaaggtgaccagagacgagggcggcaaccagcaggacgaggccatcacctggttcaacgtgatctaccccagaacccagctgcccacctggccccccgagttcaagcccctggagatcctgcagaagcccggcgagaccgtgttcgtgcccggcggctggtggcacgtggtgctgaacctggacaccaccatcgccatcacccagaacttcgccagcagcaccaacttccccgtggtgtggcacaagaccgtgagaggcagacccaagctgagcagaaagtggtacagaatcctgaagcaggagcaccccgagctggccgtgctggccgacagcgtggacctgcaggagagcaccggcatcgccagcgacagcagcagcgacagcagcagcagcagcagcagcagcagcagcgacagcgacagcgagagaatcagagacacctgcggcggcagagcccacccctag

SEQ ID NO: 85881 - DNA, 1212 bp, synthetic construct
  misc_feature 1..1212: note = Description of Artificial Sequence: Synthetic coding sequence
  source 1..1212: mol_type = other DNA
atgaaccacaagagcaagaagagaatcagagaggccaagagaagcgccagacccgagctgaaggacagcctggactggaccagacacaactactacgagagcttcagcctgagccccgccgccgtggccgacaacgtggagagagccgacgccctgcagctgagcgtggaggagttcgtggagagatacgagagaccctacaagcccgtggtgctgctgaacgcccaggagggctggagcgcccaggagaagtggaccctggagagactgaagagaaagtacagaaaccagaagttcaagtgcggcgaggacaacgacggctacagcgtgaagatgaagatgaagtactacatcgagtacatggagagcaccagagacgacagccccctgtacatcttcgacagcagctacggcgagcaccccaagagaagaaagctgctggaggactacaaggtgcccaagttcttcaccgacgacctgttccagtacgccggcgagaagagaagacccccctacagatggttcgtgatgggcccccccagaagcggcaccggcatccacatcgaccccctgggcaccagcgcctggaacgccctggtgcagggccacaagagatggtgcctgttccccaccagcacccccagagagctgatcaaggtgaccagagacgagggcggcaaccagcaggacgaggccatcacctggttcaacgtgatctaccccagaacccagctgcccacctggccccccgagttcaagcccctggagatcctgcagaagcccggcgagaccgtgttcgtgcccggcggctggtggcacgtggtgctgaacctggacaccaccatcgccatcacccagaacttcgccagcagcaccaacttccccgtggtgtggcacaagaccgtgagaggcagacccaagctgagcagaaagtggtacagaatcctgaagcaggagcaccccgagctggccgtgctggccgacagcgtggacctgcaggagagcaccggcatcgccagcgacagcagcagcgacagcagcagcagcagcagcagcagcagcagcgacagcgacagcgagtgcgagagcggcagcgagggcgacggcaccgtgcacagaagaaagaagagaagaacctgcagcatggtgggcaacggcgacaccaccagccaggacgactgcgtgagcaaggagagaagcagcagcagatag

SEQ ID NO: 85882 - DNA, 1245 bp, synthetic construct
  misc_feature 1..1245: note = Description of Artificial Sequence: Synthetic coding sequence
  source 1..1245: mol_type = other DNA
atgaaccacaagagcaagaagagaatcagagaggccaagagaagcgccagacccgagctgaaggacagcctggactggaccagacacaactactacgagagcttcagcctgagccccgccgccgtggccgacaacgtggagagagccgacgccctgcagctgagcgtggaggagttcgtggagagatacgagagaccctacaagcccgtggtgctgctgaacgcccaggagggctggagcgcccaggagaagtggaccctggagagactgaagagaaagtacagaaaccagaagttcaagtgcggcgaggacaacgacggctacagcgtgaagatgaagatgaagtactacatcgagtacatggagagcaccagagacgacagccccctgtacatcttcgacagcagctacggcgagcaccccaagagaagaaagctgctggaggactacaaggtgcccaagttcttcaccgacgacctgttccagtacgccggcgagaagagaagacccccctacagatggttcgtgatgggcccccccagaagcggcaccggcatccacatcgaccccctgggcaccagcgcctggaacgccctggtgcagggccacaagagatggtgcctgttccccaccagcacccccagagagctgatcaaggtgaccagagacgagggcggcaaccagcaggacgaggccatcacctggttcaacgtgatctaccccagaacccagctgcccacctggccccccgagttcaagcccctggagatcctgcagaagcccggcgagaccgtgttcgtgcccggcggctggtggcacgtggtgctgaacctggacaccaccatcgccatcacccagaacttcgccagcagcaccaacttccccgtggtgtggcacaagaccgtgagaggcagacccaagctgagcagaaagtggtacagaatcctgaagcaggagcaccccgagctggccgtgctggccgacagcgtggacctgcaggagagcaccggcatcgccagcgacagcagcagcgacagcagcagcagcagcagcagcagcagcagcgacagcgacagcgagtgcgagagcggcagcgagggcgacggcaccgtgcacagaagaaagaagagaagaacctgcagcatggtgggcaacggcgacaccaccagccaggacgactgcgtgagcaaggagagaagcagcagcagaatcagagacacctgcggcggcagagcccacccctag

SEQ ID NO: 85883 - DNA, 441 bp, synthetic construct
  misc_feature 1..441: note = Description of Artificial Sequence: Synthetic coding sequence
  source 1..441: mol_type = other DNA
atgctggccggcgccggcagacccggcctgccccagggcagacacctgtgctggctgctgtgcgccttcaccctgaagctgtgccaggccgaggcccccgtgcaggaggagaagctgagcgccagcaccagcaacctgccctgctggctggtggaggagttcgtggtggccgaggagtgcagcccctgcagcaacttcagagccaagaccacccccgagtgcggccccaccggctacgtggagaagatcacctgcagcagcagcaagagaaacgagttcaagagctgcagaagcgccctgatggagcagagactgttctggaagttcgagggcgccgtggtgtgcgtggccctgatcttcgcctgcctggtgatcatcagacagagacagctggacagaaaggccctggagaaggtgagaaagcagatcgagagcatctag

SEQ ID NO: 85884 - DNA, 354 bp, synthetic construct
  misc_feature 1..354: note = Description of Artificial Sequence: Synthetic coding sequence
  source 1..354: mol_type = other DNA
atggcctggggctggcacctgagcttcctgagcgccagcaccagcaacctgccctgctggctggtggaggagttcgtggtggccgaggagtgcagcccctgcagcaacttcagagccaagaccacccccgagtgcggccccaccggctacgtggagaagatcacctgcagcagcagcaagagaaacgagttcaagagctgcagaagcgccctgatggagcagagactgttctggaagttcgagggcgccgtggtgtgcgtggccctgatcttcgcctgcctggtgatcatcagacagagacagctggacagaaaggccctggagaaggtgagaaagcagatcgagagcatctag

SEQ ID NO: 85885 - DNA, 354 bp, synthetic construct; identical to SEQ ID NO: 85884
  misc_feature 1..354: note = Description of Artificial Sequence: Synthetic coding sequence
  source 1..354: mol_type = other DNA

SEQ ID NO: 85886 - DNA, 354 bp, synthetic construct; identical to SEQ ID NO: 85884
  misc_feature 1..354: note = Description of Artificial Sequence: Synthetic coding sequence
  source 1..354: mol_type = other DNA

SEQ ID NO: 85887 - DNA, 1044 bp, synthetic construct
  misc_feature 1..1044: note = Description of Artificial Sequence: Synthetic coding sequence
  source 1..1044: mol_type = other DNA
atggagacccccttctacggcgacgaggccctgagcggcctgggcggcggcgccagcggcagcggcggcagcttcgccagccccggcagactgttccccggcgccccccccaccgccgccgccggcagcatgatgaagaaggacgccctgaccctgagcctgagcgagcaggtggccgccgccctgaagcccgccgccgcccccccccccacccccctgagagccgacggcgcccccagcgccgccccccccgacggcctgctggccagccccgacctgggcctgctgaagctggccagccccgagctggagagactgatcatccagagcaacggcctggtgaccaccacccccaccagcagccagttcctgtaccccaaggtggccgccagcgaggagcaggagttcgccgagggcttcgtgaaggccctggaggacctgcacaagcagaaccagctgggcgccggcgccgccgccgccgccgccgccgccgccgccggcggccccagcggcaccgccaccggcagcgccccccccggcgagctggcccccgccgccgccgcccccgaggcccccgtgtacgccaacctgagcagctacgccggcggcgccggcggcgccggcggcgccgccaccgtggccttcgccgccgagcccgtgcccttcccccccccccccccccccggcgccctgggcccccccagactggccgccctgaaggacgagccccagaccgtgcccgacgtgcccagcttcggcgagagcccccccctgagccccatcgacatggacacccaggagagaatcaaggccgagagaaagagactgagaaacagaatcgccgccagcaagtgcagaaagagaaagctggagagaatcagcagactggaggagaaggtgaagaccctgaagagccagaacaccgagctggccagcaccgccagcctgctgagagagcaggtggcccagctgaagcagaaggtgctgagccacgtgaacagcggctgccagctgctgccccagcaccaggtgcccgcctactag

SEQ ID NO: 85888 - DNA, 2934 bp, synthetic construct
  misc_feature 1..2934: note = Description of Artificial Sequence: Synthetic coding sequence
  source 1..2934: mol_type = other DNA
atgagcttcgccctggaggagaccctggagagcgactgggtggccgtgagaccccacgtgttcgacgagagagagaagcacaagttcgtgttcatcgtggcctggaacgagatcgagggcaagttcgccatcacctgccacaacagaaccgcccagagacagagaagcggcagcagagagcaggccggcgccagaggcggcgccgaggccggcggcgccgccagcgacggcagcagaggccccggcagccccgccggcagaggcagacccgaggccaccgccagcgccaccctggtgagaagccccggccccagaagaagcagcgcctgggccgagggcggcagccccagaagcaccagaagcctgctgggcgaccccagactgagaagccccggcagcaagggcgccgagagcagactgagaagccccgtgagagccaagcccatccccggccagaagaccagcgaggccgacgacgccgccggcgccgccgccgccgccgccagacccgcccccagagaggcccaggtgagcagcgtgagaatcgtgagcgccagcggcaccgtgagcgaggagatcgaggtgctggagatggtgaaggaggacgaggcccccctggccctgagcgacgccgagcagcccccccccgccaccgagctggagagccccgccgaggagtgcagctgggccggcctgttcagcttccaggacctgagagccgtgcaccagcagctgtgcagcgtgaacagccagctggagccctgcctgcccgtgttccccgaggagcccagcggcatgtggaccgtgctgttcggcggcgcccccgagatgaccgagcaggagatcgacaccctgtgctaccagctgcaggtgtacctgggccacggcctggacacctgcggctggaagatcctgagccaggtgctgttcaccgagaccgacgaccccgaggagtactacgagagcctgagcgagctgagacagaagggctacgaggaggtgctgcagagagccagaaagagaatccaggagctgctggacaagcacaagaacaccgagagcatggtggagctgctggacctgtaccagatggaggacgaggcctacagcagcctggccgaggccaccaccgagctgtaccagtacctgctgcagcccttcagagacatgagagagctggccatgctgagaagacagcagatcaagatcagcatggagaacgactacctgggccccagaagaatcgagagcctgcagaaggaggacgccgactggcagagaaaggcccacatggccgtgctgagcatccaggacctgaccgtgaagtacttcgagatcaccgccaaggcccagaaggccgtgtacgacagaatgagagccgaccagaagaagttcggcaaggccagctgggccgccgccgccgagagaatggagaagctgcagtacgccgtgagcaaggagaccctgcagatgatgagagccaaggagatctgcctggagcagagaaagcacgccctgaaggaggagatgcagagcctgagaggcggcaccgaggccatcgccagactggaccagctggaggccgactactacgacctgcagctgcagctgtacgaggtgcagttcgagatcctgaagtgcgaggagctgctgctgaccgcccagctggagagcatcaagagactgatcagcgagaagagagacgaggtggtgtactacgacacctacgagagcatggaggccatgctggagaaggaggagatggccgccagcgcctacctgcagagagaggagctgcagaagctgcagcagaaggccagacagctggaggccagaagaggcagagtgagcgccaagaagagctacctgagaaacaagaaggagatctgcatcgccaagcacaacgagaagatccagcagagaaccagaatcgaggacgagtacagaacccaccacaccgtgcagctgaagagagagaagctgcacgacgaggaggagagaaagagcgcctgggtgagccaggagagacagagaaccctggacagactgagaaccttcaagcagagataccccggccaggtgatcctgaagagcaccagactgagactggcccacgccagaagaaagggcgccgccagccccgtgctgcaggaggaccactgcgacagcctgcccagcgtgctgcaggtggaggagaagaccgaggaggtgggcgagggcagagtgaagagaggccccagccagaccaccgagccccagagcctggtgcagctggaggacaccagcctgacccagctggaggccaccagcctgcccctgagcggcgtgaccagcgagctgccccccaccatcagcctgcccctgctgaacaacaacctggagccctgcagcgtgaccatcaaccccctgcccagccccctgccccccaccccccccccccccctgcccgtggccaaggacagcggccccgagaccctggagaaggacctgcccagaaaggagggcaacgagaagagaatccccaagagcgccagcgcccccagcgcccacctgttcgacagcagccagctggtgagcgccagaaagaagctgagaaagaccgccgagggcctgcagagaagaagagtgagcagccccatggacgaggtgctggccagcctgaagagaggcagcttccacctgaagaaggtggagcagagaaccctgccccccttccccgacgaggacgacagcaacaacatcctggcccagatcagaaagggcgtgaagctgaagaaggtgcagaaggacgtgctgagagagagcttcaccctgctgcccgacaccgaccccctgaccagaagcatccacgaggccctgagaagaatcaaggaggccagccccgagagcgaggacgaggaggaggccctgccctgcaccgactgggagaactag

SEQ ID NO: 85889 - DNA, 2967 bp, synthetic construct
  misc_feature 1..2967: note = Description of Artificial Sequence: Synthetic coding sequence
  source 1..2967: mol_type = other DNA
atgagcttcgccctggaggagaccctggagagcgactgggtggccgtgagaccccacgtgttcgacgagagagagaagcacaagttcgtgttcatcgtggcctggaacgagatcgagggcaagttcgccatcacctgccacaacagaaccgcccagagacagagaagcggcagcagagagcaggccggcgccagaggcggcgccgaggccggcggcgccgccagcgacggcagcagaggccccggcagccccgccggcagaggcagacccgaggccaccgccagcgccaccctggtgagaagccccggccccagaagaagcagcgcctgggccgagggcggcagccccagaagcaccagaagcctgctgggcgaccccagactgagaagccccggcagcaagggcgccgagagcagactgagaagccccgtgagagccaagcccatccccggccagaagaccagcgaggccgacgacgccgccggcgccgccgccgccgccgccagacccgcccccagagaggcccaggtgagcagcgtgagaatcgtgagcgccagcggcaccgtgagcgaggagatcgaggtgctggagatggtgaaggaggacgaggcccccctggccctgagcgacgccgagcagcccccccccgccaccgagctggagagccccgccgaggagtgcagctgggccggcctgttcagcttccaggacctgagagccgtgcaccagcagctgtgcagcgtgaacagccagctggagccctgcctgcccgtgttccccgaggagcccagcggcatgtggaccgtgctgttcggcggcgcccccgagatgaccgagcaggagatcgacaccctgtgctaccagctgcaggtgtacctgggccacggcctggacacctgcggctggaagatcctgagccaggtgctgttcaccgagaccgacgaccccgaggagtactacgagagcctgagcgagctgagacagaagggctacgaggaggtgctgcagagagccagaaagagaatccaggagctgctggacaagcacaagaacaccgagagcatggtggagctgctggacctgtaccagatggaggacgaggcctacagcagcctggccgaggccaccaccgagctgtaccagtacctgctgcagcccttcagagacatgagagagctggccatgctgagaagacagcagatcaagatcagcatggagaacgactacctgggccccagaagaatcgagagcctgcagaaggaggacgccgactggcagagaaaggcccacatggccgtgctgagcatccaggacctgaccgtgaagtacttcgagatcaccgccaaggcccagaaggccgtgtacgacagaatgagagccgaccagaagaagttcggcaaggccagctgggccgccgccgccgagagaatggagaagctgcagtacgccgtgagcaaggagaccctgcagatgatgagagccaaggagatctgcctggagcagagaaagcacgccctgaaggaggagatgcagagcctgagaggcggcaccgaggccatcgccagactggaccagctggaggccgactactacgacctgcagctgcagctgtacgaggtgcagttcgagatcctgaagtgcgaggagctgctgctgaccgcccagctggagagcatcaagagactgatcagcgagaagagagacgaggtggtgtactacgacacctacgagagcatggaggccatgctggagaaggaggagatggccgccagcgcctacctgcagagagaggagctgcagaagctgcagcagaaggccagacagctggaggccagaagaggcagagtgagcgccaagaagagctacctgagaaacaagaaggagatctgcatcgccaagcacaacgagaagatccagcagagaaccagaatcgaggacgagtacagaacccaccacaccgtgcagctgaagagagagaagctgcacgacgaggaggagagaaagagcgcctgggtgagccaggagagacagagaaccctggacagactgagaaccttcaagcagagataccccggccaggtgatcctgaagagcaccagactgagactggcccacgccagaagaaagggcgccgccagccccgtgctgcaggaggaccactgcgacagcctgcccagcgtgctgcaggtggaggagaagaccgaggaggtgggcgagggcagagtgaagagaggccccagccagaccaccgagccccagagcctggtgcagctggaggacaccagcctgacccagctggaggccaccagcctgcccctgagcggcgtgaccagcgagctgccccccaccatcagcctgcccctgctgaacaacaacctggagccctgcagcgtgaccatcaaccccctgcccagccccctgccccccacccccccccccccccccccccccccccccccccccccccccccccccctgcccgtggccaaggacagcggccccgagaccctggagaaggacctgcccagaaaggagggcaacgagaagagaatccccaagagcgccagcgcccccagcgcccacctgttcgacagcagccagctggtgagcgccagaaagaagctgagaaagaccgccgagggcctgcagagaagaagagtgagcagccccatggacgaggtgctggccagcctgaagagaggcagcttccacctgaagaaggtggagcagagaaccctgccccccttccccgacgaggacgacagcaacaacatcctggcccagatcagaaagggcgtgaagctgaagaaggtgcagaaggacgtgctgagagagagcttcaccctgctgcccgacaccgaccccctgaccagaagcatccacgaggccctgagaagaatcaaggaggccagccccgagagcgaggacgaggaggaggccctgccctgcaccgactgggagaactag

SEQ ID NO: 85890 - DNA, 2238 bp, synthetic construct
  misc_feature 1..2238: note = Description of Artificial Sequence: Synthetic coding sequence
  source 1..2238: mol_type = other DNA
atggaggtgatgaacctgatggagcagcccatcaaggtgaccgagtggcagcagacctacacctacgacagcggcatccacagcggcgccaacacctgcgtgcccagcgtgagcagcaagggcatcatggaggaggacgaggcctgcggcagacagtacaccctgaagaagaccaccacctacacccagggcgtgccccccagccagggcgacctggagtaccagatgagcaccaccgccagagccaagagagtgagagaggccatgtgccccggcgtgagcggcgaggacagcagcctgctgctggccacccaggtggagggccaggccaccaacctgcagagactggccgagcccagccagctgctgaagagcgccatcgtgcacctgatcaactaccaggacgacgccgagctggccaccagagccctgcccgagctgaccaagctgctgaacgacgaggaccccgtggtggtgaccaaggccgccatgatcgtgaaccagctgagcaagaaggaggccagcagaagagccctgatgggcagcccccagctggtggccgccgtggtgagaaccatgcagaacaccagcgacctggacaccgccagatgcaccaccagcatcctgcacaacctgagccaccacagagagggcctgctggccatcttcaagagcggcggcatccccgccctggtgagaatgctgagcagccccgtggagagcgtgctgttctacgccatcaccaccctgcacaacctgctgctgtaccaggagggcgccaagatggccgtgagactggccgacggcctgcagaagatggtgcccctgctgaacaagaacaaccccaagttcctggccatcaccaccgactgcctgcagctgctggcctacggcaaccaggagagcaagctgatcatcctggccaacggcggcccccaggccctggtgcagatcatgagaaactacagctacgagaagctgctgtggaccaccagcagagtgctgaaggtgctgagcgtgtgccccagcaacaagcccgccatcgtggaggccggcggcatgcaggccctgggcaagcacctgaccagcaacagccccagactggtgcagaactgcctgtggaccctgagaaacctgagcgacgtggccaccaagcaggagggcctggagagcgtgctgaagatcctggtgaaccagctgagcgtggacgacgtgaacgtgctgacctgcgccaccggcaccctgagcaacctgacctgcaacaacagcaagaacaagaccctggtgacccagaacagcggcgtggaggccctgatccacgccatcctgagagccggcgacaaggacgacatcaccgagcccgccgtgtgcgccctgagacacctgaccagcagacaccccgaggccgagatggcccagaacagcgtgagactgaactacggcatccccgccatcgtgaagctgctgaaccagcccaaccagtggcccctggtgaaggccaccatcggcctgatcagaaacctggccctgtgccccgccaaccacgcccccctgcaggaggccgccgtgatccccagactggtgcagctgctggtgaaggcccaccaggacgcccagagacacgtggccgccggcacccagcagccctacaccgacggcgtgagaatggaggagatcgtggagggctgcaccggcgccctgcacatcctggccagagaccccatgaacagaatggagatcttcagactgaacaccatccccctgttcgtgcagctgctgtacagcagcgtggagaacatccagagagtggccgccggcgtgctgtgcgagctggcccaggacaaggaggccgccgacgccatcgacgccgagggcgccagcgcccccctgatggagctgctgcacagcagaaacgagggcaccgccacctacgccgccgccgtgctgttcagaatcagcgaggacaagaaccccgactacagaaagagagtgagcgtggagctgaccaacagcctgttcaagcacgaccccgccgcctgggaggccgcccagagcatgatccccatcaacgagccctacggcgacgacatggacgccacctacagacccatgtacagcagcgacgtgcccctggaccccctggagatgcacatggacatggacggcgactaccccatcgacacctacagcgacggcctgagacccccctaccccaccgccgaccacatgctggcctag

SEQ ID NO: 85891 - DNA, 2238 bp, synthetic construct; identical to SEQ ID NO: 85890
  misc_feature 1..2238: note = Description of Artificial Sequence: Synthetic coding sequence
  source 1..2238: mol_type = other DNA

SEQ ID NO: 85892 - DNA, 2238 bp, synthetic construct; identical to SEQ ID NO: 85890
  misc_feature 1..2238: note = Description of Artificial Sequence: Synthetic coding sequence
  source 1..2238: mol_type = other DNA

SEQ ID NO: 85893 - DNA, 834 bp, synthetic construct
  misc_feature 1..834: note = Description of Artificial Sequence: Synthetic coding sequence
  source 1..834: mol_type = other DNA
atggaggtgatgaacctgatggagcagcccatcaaggtgaccgagtggcagcagacctacacctacgacagcggcatccacagcggcgccaacacctgcgtgcccagcgtgagcagcaagggcatcatggaggaggacgaggcctgcggcagacagtacaccctgaagaagaccaccacctacacccagggcgtgccccccagccagggcgacctggagtaccagatgagcaccaccgccagagccaagagagtgagagaggccatgtgccccggcgtgagcggcgaggacagcagcctgctgctggccacccaggtggagggccaggccaccaacctgcagagactggccgagcccagccagctgctgaagagcgccatcgtgcacctgatcaactaccaggacgacgccgagctggccaccagagccctgcccgagctgaccaagctgctgaacgacgaggaccccgtggtggtgaccaaggccgccatgatcgtgaaccagctgagcaagaaggaggccagcagaagagccctgatgggcagcccccagctggtggccgccgtggtgagaaccatgcagaacaccagcgacctggacaccgccagatgcaccaccagcatcctgcacaacctgagccaccacagagagggcctgctggccatcttcaagagcggcggcatccccgccctggtgagaatgctgagcagccccgtggagagcgtgctgttctacgccatcaccaccctgcacaacctgctgctgtaccaggagggcgccaagatggccgtgagactggccgacggcctgcagaagatggtgcccctgctgtag

SEQ ID NO: 85894 - DNA, 708 bp, synthetic construct
  misc_feature 1..708: note = Description of Artificial Sequence: Synthetic coding sequence
  source 1..708: mol_type = other DNA
atggaggtgatgaacctgatggagcagcccatcaaggtgaccgagtggcagcagacctacacctacgacagcggcatccacagcggcgccaacacctgcgtgcccagcgtgagcagcaagggcatcatggaggaggacgaggcctgcggcagacagtacaccctgaagaagaccaccacctacacccagggcgtgccccccagccagggcgacctggagtaccagatgagcaccaccgccagagccaagagagtgagagaggccatgtgccccggcgtgagcggcgaggacagcagcctgctgctggccacccaggtggagggccaggccaccaacctgcagagactggccgagcccagccagctgctgaagagcgccatcgtgcacctgatcaactaccaggacgacgccgagctggccaccagagccctgcccgagctgaccaagctgctgaacgacgaggaccccgtggtggtgaccaaggccgccatgatcgtgaaccagctgagcaagaaggaggccagcagaagagccctgatgggcagcccccagctggtggccgccgtggtgagaaccatgcagaacaccagcgacctggacaccgccagatgcaccaccagcatcctgcacaacctgagccaccacagagagggcctgctggccatcttcaagagcggcggcatccccgccctggtgagaatgctgtag

SEQ ID NO: 85895 - DNA, 891 bp, synthetic construct
  misc_feature 1..891: note = Description of Artificial Sequence: Synthetic coding sequence
  source 1..891: mol_type = other DNA
atggaggtgatgaacctgatggagcagcccatcaaggtgaccgagtggcagcagacctacacctacgacagcggcatccacagcggcgccaacacctgcgtgcccagcgtgagcagcaagggcatcatggaggaggacgaggcctgcggcagacagtacaccctgaagaagaccaccacctacacccagggcgtgccccccagccagggcgacctggagtaccagatgagcaccaccgccagagccaagagagtgagagaggccatgtgccccggcgtgagcggcgaggacagcagcctgctgctggccacccaggtggagggccaggccaccaacctgcagagactggccgagcccagccagctgctgaagagcgccatcgtgcacctgatcaactaccaggacgacgccgagctggccaccagagccctgcccgagctgaccaagctgctgaacgacgaggaccccgtggtggtgaccaaggccgccatgatcgtgaaccagctgagcaagaaggaggccagcagaagagccctgatgggcagcccccagctggtggccgccgtggtgagaaccatgcagaacaccagcgacctggacaccgccagatgcaccaccagcatcctgcacaacctgagccaccacagagagggcctgctggccatcttcaagagcggcggcatccccgccctggtgagaatgctgagcagccccgtggagagcgtgctgttctacgccatcaccaccctgcacaacctgctgctgtaccaggagggcgccaagatggccgtgagactggccgacggcctgcagaagatggtgcccctgctgaacaagaacaaccccaagttcctggccatcaccaccgactgcctgcagctgctggcctag

SEQ ID NO: 85896 - DNA, 261 bp, synthetic construct
  misc_feature 1..261: note = Description of Artificial Sequence: Synthetic coding sequence
  source 1..261: mol_type = other DNA
atggaggtgatgaacctgatggagcagcccatcaaggtgaccgagtggcagcagacctacacctacgacagcggcatccacagcggcgccaacacctgcgtgcccagcgtgagcagcaagggcatcatggaggaggacgaggcctgcggcagacagtacaccctgaagaagaccaccacctacacccagggcgtgccccccagccagggcgacctggagtaccagatgagcaccaccgccagagccaagagagtgagatag

SEQ ID NO: 85897 - DNA, 897 bp, synthetic construct
  misc_feature 1..897: note = Description of Artificial Sequence: Synthetic coding sequence
  source 1..897: mol_type = other DNA
atggaggtgatgaacctgatggagcagcccatcaaggtgaccgagtggcagcagacctacacctacgacagcggcatccacagcggcgccaacacctgcgtgcccagcgtgagcagcaagggcatcatggaggaggacgaggcctgcggcagacagtacaccctgaagaagaccaccacctacacccagggcgtgccccccagccagggcgacctggagtaccagatgagcaccaccgccagagccaagagagtgagagaggccatgtgccccggcgtgagcggcgaggacagcagcctgctgctggccacccaggtggagggccaggccaccaacctgcagagactggccgagcccagccagctgctgaagagcgccatcgtgcacctgatcaactaccaggacgacgccgagctggccaccagagccctgcccgagctgaccaagctgctgaacgacgaggaccccgtggtggtgaccaaggccgccatgatcgtgaaccagctgagcaagaaggaggccagcagaagagccctgatgggcagcccccagctggtggccgccgtggtgagaaccatgcagaacaccagcgacctggacaccgccagatgcaccaccagcatcctgcacaacctgagccaccacagagagggcctgctggccatcttcaagagcggcggcatccccgccctggtgagaatgctgagcagccccgtggagagcgtgctgttctacgccatcaccaccctgcacaacctgctgctgtaccaggagggcgccaagatggccgtgagactggccgacggcctgcagaagatggtgcccctgctgaacaagaacaaccccaagttcctggccatcaccaccgactgcctgcagctgctggcctacggctag

SEQ ID NO: 85898 - DNA, 1776 bp, synthetic construct
  misc_feature 1..1776: note = Description of Artificial Sequence: Synthetic coding sequence
  source 1..1776: mol_type = other DNA
atggaggtgatgaacctgatggagcagcccatcaaggtgaccgagtggcagcagacctacacctacgacagcggcatccacagcggcgccaacacctgcgtgcccagcgtgagcagcaagggcatcatggaggaggacgaggcctgcggcagacagtacaccctgaagaagaccaccacctacacccagggcgtgccccccagccagggcgacctggagtaccagatgagcaccaccgccagagccaagagagtgagagaggccatgtgccccggcgtgagcggcgaggacagcagcctgctgctggccacccaggtggagggccaggccaccaacctgcagagactggccgagcccagccagctgctgaagagcgccatcgtgcacctgatcaactaccaggacgacgccgagctggccaccagagccctgcccgagctgaccaagctgctgaacgacgaggaccccgtggtggtgaccaaggccgccatgatcgtgaaccagctgagcaagaaggaggccagcagaagagccctgatgggcagcccccagctggtggccgccgtggtgagaaccatgcagaacaccagcgacctggacaccgccagatgcaccaccagcatcctgcacaacctgagccaccacagagagggcctgctggccatcttcaagagcggcggcatccccgccctggtgagaatgctgagcagccccgtggagagcgtgctgttctacgccatcaccaccctgcacaacctgctgctgtaccaggagggcgccaagatggccgtgagactggccgacggcctgcagaagatggtgcccctgctgaacaagaacaaccccaagttcctggccatcaccaccgactgcctgcagctgctggcctacggcaaccaggagagcaagatcctgaccgccaccgtggacaacgccaacatcctgctgcagatcgacaacgccagactggccgccgacgacttcagaaccaagttcgagaccgagcaggccctgagactgagcgtggaggccgacatcaacggcctgagaagagtgctggacgagctgaccctggccagagccgacctggagatgcagatcgagaacctgaaggaggagctggcctacctgaagaagaaccacgaggaggagatgaacgccctgagaggccaggtgggcggcgagatcaacgtggagatggacgccgcccccggcgtggacctgagcagaatcctgaacgagatgagagaccagtacgagaagatggccgagaagaacagaaaggacgccgaggactggttcttcagcaagaccgaggagctgaacagagaggtggccaccaacagcgagctggtgcagagcggcaagagcgagatcagcgagctgagaagaaccatgcaggccctggagatcgagctgcagagccagctgagcatgaaggccagcctggagggcaacctggccgagaccgagaacagatactgcgtgcagctgagccagatccagggcctgatcggcagcgtggaggagcagctggcccagctgagatgcgagatggagcagcagaaccaggagtacaagatcctgctggacgtgaagaccagactggagcaggagatcgccacctacagaagactgctggagggcgaggacgcccacctgacccagtacaagaaggagcccgtgaccaccagacaggtgagaaccatcgtggaggaggtgcaggacggcaaggtgatcagcagcagagagcaggtgcaccagaccaccagatag

SEQ ID NO: 85899 - DNA, 897 bp, synthetic construct
  misc_feature 1..897: note = Description of Artificial Sequence: Synthetic coding sequence
  source 1..897: mol_type = other DNA
atggccagaagaagcagacacagactgctgctgctgctgctgagatacctggtggtggccctgggctaccacaaggcctacggcttcagcgcccccaaggaccagcaggtggtgaccgccgtggagtaccaggaggccatcctggcctgcaagacccccaagaagaccgtgagcagcagactggagtggaagaagctgggcagaagcgtgagcttcgtgtactaccagcagaccctgcagggcgacttcaagaacagagccgagatgatcgacttcaacatcagaatcaagaacgtgaccagaagcgacgccggcaagtacagatgcgaggtgagcgcccccagcgagcagggccagaacctggaggaggacaccgtgaccctggaggtgctggtggcccccgccgtgcccagctgcgaggtgcccagcagcgccctgagcggcaccgtggtggagctgagatgccaggacaaggagggcaaccccgcccccgagtacacctggttcaaggacggcatcagactgctggagaaccccagactgggcagccagagcaccaacagcagctacaccatgaacaccaagaccggcaccctgcagttcaacaccgtgagcaagctggacaccggcgagtacagctgcgaggccagaaacagcgtgggctacagaagatgccccggcaagagaatgcaggtggacgacctgaacatcagcggcatcatcgccgccgtggtggtggtggccctggtgatcagcgtgtgcggcctgggcgtgtgctacgcccagagaaagggctacttcagcagcaagtacatgttcatgaagagcaacagcagcagcaaggccaccaccatgagcgagaacgacttcaagcacaccaagagcttcatcatctag

SEQ ID NO: 85900 - DNA, 789 bp, synthetic construct
  misc_feature 1..789: note = Description of Artificial Sequence: Synthetic coding sequence
  source 1..789: mol_type = other DNA
atggccagaagaagcagacacagactgctgctgctgctgctgagatacctggtggtggccctgggctaccacaaggcctacggcttcagcgcccccaaggaccagcaggtggtgaccgccgtggagtaccagggcgacttcaagaacagagccgagatgatcgacttcaacatcagaatcaagaacgtgaccagaagcgacgccggcaagtacagatgcgaggtgagcgcccccagcgagcagggccagaacctggaggaggacaccgtgaccctggaggtgctggtggcccccgccgtgcccagctgcgaggtgcccagcagcgccctgagcggcaccgtggtggagctgagatgccaggacaaggagggcaaccccgcccccgagtacacctggttcaaggacggcatcagactgctggagaaccccagactgggcagccagagcaccaacagcagctacaccatgaacaccaagaccggcaccctgcagttcaacaccgtgagcaagctggacaccggcgagtacagctgcgaggccagaaacagcgtgggctacagaagatgccccggcaagagaatgcaggtggacgacctgaacatcagcggcatcatcgccgccgtggtggtggtggccctggtgatcagcgtgtgcggcctgggcgtgtgctacgcccagagaaagggctacttcagcaaggagaccagcttccagaagagcaacagcagcagcaaggccaccaccatgagcgagaacgacttcaagcacaccaagagcttcatcatctag

SEQ ID NO: 85901 - DNA, 897 bp, synthetic construct
  misc_feature 1..897: note = Description of Artificial Sequence: Synthetic coding sequence
  source 1..897: mol_type = other DNA
atggccagaagaagcagacacagactgctgctgctgctgctgagatacctggtggtggccctgggctaccacaaggcctacggcttcagcgcccccaaggaccagcaggtggtgaccgccgtggagtaccaggaggccatcctggcctgcaagacccccaagaagaccgtgagcagcagactggagtggaagaagctgggcagaagcgtgagcttcgtgtactaccagcagaccctgcagggcgacttcaagaacagagccgagatgatcgacttcaacatcagaatcaagaacgtgaccagaagcgacgccggcaagtacagatgcgaggtgagcgcccccagcgagcagggccagaacctggaggaggacaccgtgaccctggaggtgctggtggcccccgccgtgcccagctgcgaggtgcccagcagcgccctgagcggcaccgtggtggagctgagatgccaggacaaggagggcaaccccgcccccgagtacacctggttcaaggacggcatcagactgctggagaaccccagactgggcagccagagcaccaacagcagctacaccatgaacaccaagaccggcaccctgcagttcaacaccgtgagcaagctggacaccggcgagtacagctgcgaggccagaaacagcgtgggctacagaagatgccccggcaagagaatgcaggtggacgacctgaacatcagcggcatcatcgccgccgtggtggtggtggccctggtgatcagcgtgtgcggcctgggcgtgtgctacgcccagagaaagggctacttcagcaaggagaccagcttccagaagagcaacagcagcagcaaggccaccaccatgagcgagaacgacttcaagcacaccaagagcttcatcatctag

SEQ ID NO: 85902 - DNA, 939 bp, synthetic construct
  misc_feature 1..939: note = Description of Artificial Sequence: Synthetic coding sequence
  source 1..939: mol_type = other DNA
atggccagaagaagcagacacagactgctgctgctgctgctgagatacctggtggtggccctgggctaccacaaggcctacggcttcagcgcccccaaggaccagcaggtggtgaccgccgtggagtaccaggaggccatcctggcctgcaagacccccaagaagaccgtgagcagcagactggagtggaagaagctgggcagaagcgtgagcttcgtgtactaccagcagaccctgcagggcgacttcaagaacagagccgagatgatcgacttcaacatcagaatcaagaacgtgaccagaagcgacgccggcaagtacagatgcgaggtgagcgcccccagcgagcagggccagaacctggaggaggacaccgtgaccctggaggtgctggtggcccccgccgtgcccagctgcgaggtgcccagcagcgccctgagcggcaccgtggtggagctgagatgccaggacaaggagggcaaccccgcccccgagtacacctggttcaaggacggcatcagactgctggagaaccccagactgggcagccagagcaccaacagcagctacaccatgaacaccaagaccggcaccctgcagttcaacaccgtgagcaagctggacaccggcgagtacagctgcgaggccagaaacagcgtgggctacagaagatgccccggcaagagaatgcaggtggacgacctgaacatcagcggcatcatcgccgccgtggtggtggtggccctggtgatcagcgtgtgcggcctgggcgtgtgctacgcccagagaaagggctacttcagcaaggagaccagcttccagaagagcaacagcagcagcaaggccaccaccatgagcgagaacgtgcagtggctgacccccgtgatccccgccctgtggaaggccgccgccggcggcagcagaggccaggagttctag

SEQ ID NO: 85903 - DNA, 933 bp, synthetic construct
  misc_feature 1..933: note = Description of Artificial Sequence: Synthetic coding sequence
  source 1..933: mol_type = other DNA
atggccctgagaagaccccccagactgagactgtgcgccagactgcccgacttcttcctgctgctgctgttcagaggctgcctgatcggcgccgtgaacctgaagagcagcaacagaacccccgtggtgcaggagttcgagagcgtggagctgagctgcatcatcaccgacagccagaccagcgaccccagaatcgagtggaagaagatccaggacgagcagaccacctacgtgttcttcgacaacaagatccagggcgacctggccggcagagccgagatcctgggcaagaccagcctgaagatctggaacgtgaccagaagagacagcgccctgtacagatgcgaggtggtggccagaaacgacagaaaggagatcgacgagatcgtgatcgagctgaccgtgcaggtgaagcccgtgacccccgtgtgcagagtgcccaaggccgtgcccgtgggcaagatggccaccctgcactgccaggagagcgagggccaccccagaccccactacagctggtacagaaacgacgtgcccctgcccaccgacagcagagccaaccccagattcagaaacagcagcttccacctgaacagcgagaccggcaccctggtgttcaccgccgtgcacaaggacgacagcggccagtactactgcatcgccagcaacgacgccggcagcgccagatgcgaggagcaggagatggaggtgtacgacctgaacatcggcggcatcatcggcggcgtgctggtggtgctggccgtgctggccctgatcaccctgggcatctgctgcgcctacagaagaggctacttcatcaacaacaagcaggacggcgagagctacaagaaccccggcaagcccgacggcgtgaactacatcagaaccgacgaggagggcgacttcagacacaagagcagcttcgtgatctag

SEQ ID NO: 85904 - DNA, 780 bp, synthetic construct
  misc_feature 1..780: note = Description of Artificial Sequence: Synthetic coding sequence
  source 1..780: mol_type = other DNA
atggccctgagaagaccccccagactgagactgtgcgccagactgcccgacttcttcctgctgctgctgttcagaggctgcctgatcggcgccgtgaacctgaagagcagcaacagaacccccgtggtgcaggagttcgagagcgtggagctgagctgcatcatcaccgacagccagaccagcgaccccagaatcgagtggaagaagatccaggacgagcagaccacctacgtgttcttcgacaacaagatccaggtgaagcccgtgacccccgtgtgcagagtgcccaaggccgtgcccgtgggcaagatggccaccctgcactgccaggagagcgagggccaccccagaccccactacagctggtacagaaacgacgtgcccctgcccaccgacagcagagccaaccccagattcagaaacagcagcttccacctgaacagcgagaccggcaccctggtgttcaccgccgtgcacaaggacgacagcggccagtactactgcatcgccagcaacgacgccggcagcgccagatgcgaggagcaggagatggaggtgtacgacctgaacatcggcggcatcatcggcggcgtgctggtggtgctggccgtgctggccctgatcaccctgggcatctgctgcgcctacagaagaggctacttcatcaacaacaagcaggacggcgagagctacaagaaccccggcaagcccgacggcgtgaactacatcagaaccgacgaggagggcgacttcagacacaagagcagcttcgtgatctag

SEQ ID NO: 85905 - DNA, 1068 bp, synthetic construct
  misc_feature 1..1068: note = Description of Artificial Sequence: Synthetic coding sequence
  source 1..1068: mol_type = other DNA
atggtgcccgccagactgggccccgccgtggccatggtgaccggcgccggcagaagagtgctggccggctgggcccacgccagaggcgactacaagcccagaagagccgccgccggccccagcgccaccctggacatggccctgagaagaccccccagactgagactgtgcgccagactgcccgacttcttcctgctgctgctgttcagaggctgcctgatcggcgccgtgaacctgaagagcagcaacagaacccccgtggtgcaggagttcgagagcgtggagctgagctgcatcatcaccgacagccagaccagcgaccccagaatcgagtggaagaagatccaggacgagcagaccacctacgtgttcttcgacaacaagatccagggcgacctggccggcagagccgagatcctgggcaagaccagcctgaagatctggaacgtgaccagaagagacagcgccctgtacagatgcgaggtggtggccagaaacgacagaaaggagatcgacgagatcgtgatcgagctgaccgtgcaggtgaagcccgtgacccccgtgtgcagagtgcccaaggccgtgcccgtgggcaagatggccaccctgcactgccaggagagcgagggccaccccagaccccactacagctggtacagaaacgacgtgcccctgcccaccgacagcagagccaaccccagattcagaaacagcagcttccacctgaacagcgagaccggcaccctggtgttcaccgccgtgcacaaggacgacagcggccagtactactgcatcgccagcaacgacgccggcagcgccagatgcgaggagcaggagatggaggtgtacgacctgaacatcggcggcatcatcggcggcgtgctggtggtgctggccgtgctggccctgatcaccctgggcatctgctgcgcctacagaagaggctacttcatcaacaacaagcaggacggcgagagctacaagaaccccggcaagcccgacggcgtgaactacatcagaaccgacgaggagggcgacttcagacacaagagcagcttcgtgatctag

SEQ ID NO: 85906 - DNA, 1986 bp, synthetic construct
  misc_feature 1..1986: note = Description of Artificial Sequence: Synthetic coding sequence
  source 1..1986: mol_type = other DNA
atgaccggcggcagattcgacttcgacgacggcggcacctactgcggcggctgggaggagggcaaggcccacggccacggcatctgcaccggccccaagggccagggcgagtacagcggcagctggagccacggcttcgaggtggtgggcggctacacctggcccagcggcaacacctaccagggctactgggcccagggcaagagacacggcctgggcgtggagaccaagggcaagtggatgtacagaggcgagtggagccacggcttcaagggcagatacggcgtgagacagagcctgtgcacccccgccagatacgagggcacctggagcaacggcctgcaggacggctacggcgtggagacctacggcgacggcggcacctaccagggccagtgggccggcggcatgagacacggctacggcgtgagacagagcgtgccctacggcatggccaccgtgatcagaagccccctgagaaccagcctggccagcctgagaagcgagcagagcaacggcagcgtgctgcacgacgccgccgccgccgccgacagccccgccggcaccagaggcggcttcgtgctgaacttccacgccgacgccgagctggccggcaagaagaagggcggcctgttcagaagaggcagcctgctgggcagcatgaagctgagaaagagcgagagcaagagcagcatcagcagcaagagaagcagcgtgagaagcgacgccgccatgagcagaatcagcagcagcgacgccaacagcaccatcagcttcggcgacgtggactgcgacttctgccccgtggaggaccacgtggacgccaccaccaccgagacctacatgggcgagtggaagaacgacaagagaaacggcttcggcgtgagcgagagaagcaacggcatgaagtacgagggcgagtgggccaacaacaagagacacggctacggctgcaccgtgttccccgacggcagcaaggaggagggcaagtacaagaacaacatcctggtgagaggcatcagaaagcagctgatccccatcagacacaccaagaccagagagaaggtggacagagccatcgagggcgcccagagagccgccgccatggccagaaccaaggtggagatcgccaacagcagaaccgcccacgccagagccaaggccgacgccgccgaccaggccgccctggccgccagacaggagtgcgacatcgccagagccgtggccagagagctgagccccgacttctaccagcccggccccgactacgtgaagcagagattccaggagggcgtggacgccaaggagaaccccgaggagaaggtgcccgagaagccccccacccccaaggagagcccccacttctacagaaagggcaccaccccccccagaagccccgaggccagccccaagcacagccacagccccgccagcagccccaagcccctgaagaagcagaaccccagcagcggcgccagactgaaccaggacaagagaagcgtggccgacgagcaggtgaccgccatcgtgaacaagcccctgatgagcaaggcccccaccaaggaggccggcgccgtggtgccccagagcaagtacagcggcagacaccacatccccaaccccagcaacggcgagctgcacagccagtaccacggctactacgtgaagctgaacgccccccagcacccccccgtggacgtggaggacggcgacggcagcagccagagcagcagcgccctggtgcacaagcccagcgccaacaagtggagccccagcaagagcgtgaccaagcccgtggccaaggagagcaaggccgagcccaaggccaagaagagcgagctggccatccccaagaaccccgccagcaacgacagctgccccgccctggagaaggaggccaacagcggccccaacagcatcatgatcgtgctggtgatgctgctgaacatcggcctggccatcctgttcgtgcacttcctgacctag

SEQ ID NO: 85907 - DNA, 390 bp, synthetic construct
  misc_feature 1..390: note = Description of Artificial Sequence: Synthetic coding sequence
  source 1..390: mol_type = other DNA
atgagcggcggcagattcgacttcgacgacggcggcgcctactgcggcggctgggagggcggcaaggcccacggccacggcctgtgcaccggccccaagggccagggcgagtacagcggcagctggaacttcggcttcgaggtggccggcgtgtacacctggcccagcggcaacaccttcgagggctactggagccagggcaagagacacggcctgggcatcgagaccaagggcagatggctgtacaagggcgagtggacccacggcttcaagggcagatacggcatcagacagagcagcagcagcggcgccaagtacgagggcacctggaacaacggcctgcaggacggctacggcaccgagacctacgccgacggcggcatgtgctag

SEQ ID NO: 85908 - DNA, 2091 bp, synthetic construct
  misc_feature 1..2091: note = Description of Artificial Sequence: Synthetic coding sequence
  source 1..2091: mol_type = other DNA
atgagcggcggcagattcgacttcgacgacggcggcgcctactgcggcggctgggagggcggcaaggcccacggccacggcctgtgcaccggccccaagggccagggcgagtacagcggcagctggaacttcggcttcgaggtggccggcgtgtacacctggcccagcggcaacaccttcgagggctactggagccagggcaagagacacggcctgggcatcgagaccaagggcagatggctgtacaagggcgagtggacccacggcttcaagggcagatacggcatcagacagagcagcagcagcggcgccaagtacgagggcacctggaacaacggcctgcaggacggctacggcaccgagacctacgccgacggcggcacctaccagggccagttcaccaacggcatgagacacggctacggcgtgagacagagcgtgccctacggcatggccgtggtggtgagaagccccctgagaaccagcctgagcagcctgagaagcgagcacagcaacggcaccgtggcccccgacagccccgccagccccgccagcgacggccccgccctgcccagccccgccatccccagaggcggcttcgccctgagcctgctggccaacgccgaggccgccgccagagcccccaagggcggcggcctgttccagagaggcgccctgctgggcaagctgagaagagccgagagcagaaccagcgtgggcagccagagaagcagagtgagcttcctgaagagcgacctgagcagcggcgccagcgacgccgccagcaccgccagcctgggcgaggccgccgagggcgccgacgaggccgcccccttcgaggccgacatcgacgccaccaccaccgagacctacatgggcgagtggaagaacgacaagagaagcggcttcggcgtgagcgagagaagcagcggcctgagatacgagggcgagtggctggacaacctgagacacggctacggctgcaccaccctgcccgacggccacagagaggagggcaagtacagacacaacgtgctggtgaaggacaccaagagaagaatgctgcagctgaagagcaacaaggtgagacagaaggtggagcacagcgtggagggcgcccagagagccgccgccatcgccagacagaaggccgagatcgccgccagcagaaccagccacgccaaggccaaggccgaggccgccgagcaggccgccctggccgccaaccaggagagcaacatcgccagaaccctggccagagagctggcccccgacttctaccagcccggccccgagtaccagaagagaagactgctgcaggagatcctggagaacagcgagagcctgctggagccccccgacagaggcgccggcgccgccggcctgccccagccccccagagagagcccccagctgcacgagagagagacccccagacccgagggcggcagccccagccccgccggcacccccccccagcccaagagacccagacccggcgtgagcaaggacggcctgctgagccccggcgcctggaacggcgagcccagcggcgagggcagcagaagcgtgacccccagcgagggcgccggcagaagaagccccgccagacccgccaccgagagaatggccatcgaggccctgcaggccccccccgcccccagcagagagcccgaggtggccctgtaccagggctaccacagctacgccgtgagaaccaccccccccgagcccccccccttcgaggaccagcccgagcccgaggtgagcggcagcgagagcgcccccagcagccccgccaccgcccccctgcaggcccccaccctgagaggccccgagcccgccagagagacccccgccaagctggagcccaagcccatcatccccaaggccgagcccagagccaaggccagaaagaccgaggccagaggcctgaccaaggccggcgccaagaagaaggccagaaaggaggccgccctggccgccgaggccgaggtggaggtggaggaggtgcccaacaccatcctgatctgcatggtgatcctgctgaacatcggcctggccatcctgttcgtgcacctgctgacctag

SEQ ID NO: 85909 - DNA, 2247 bp, synthetic construct
  misc_feature 1..2247: note = Description of Artificial Sequence: Synthetic coding sequence
  source 1..2247: mol_type = other DNA
atgagcagcggcggcagattcaacttcgacgacggcggcagctactgcggcggctgggaggacggcaaggcccacggccacggcgtgtgcaccggccccaagggccagggcgagtacaccggcagctggagccacggcttcgaggtgctgggcgtgtacacctggcccagcggcaacacctaccagggcacctgggcccagggcaagagacacggcatcggcctggagagcaagggcaagtgggtgtacaagggcgagtggacccacggcttcaagggcagatacggcgtgagagagtgcgccggcaacggcgccaagtacgagggcacctggagcaacggcctgcaggacggctacggcaccgagacctacagcgacggcggcacctaccagggccagtgggtgggcggcatgagacagggctacggcgtgagacagagcgtgccctacggcatggccgccgtgatcagaagccccctgagaaccagcatcaacagcctgagaagcgagcacaccaacggcaccgccctgcaccccgacgccagccccgccgtggccggcagccccgccgtgagcagaggcggcttcgtgctggtggcccacagcgacagcgagatcctgaagagcaagaagaagggcctgttcagaagaagcctgctgagcggcctgaagctgagaaagagcgagagcaagagcagcctggccagccagagaagcaagcagagcagcttcagaagcgaggccggcatgagcaccgtgagcagcaccgccagcgacatccacagcaccatcagcctgggcgaggccgaggccgagctggccgtgatcgaggacgacatcgacgccaccaccaccgagacctacgtgggcgagtggaagaacgacaagagaagcggcttcggcgtgagccagagaagcgacggcctgaagtacgagggcgagtgggccagcaacagaagacacggctacggctgcatgaccttccccgacggcaccaaggaggagggcaagtacaagcagaacatcctggtgggcggcaagagaaagaacctgatccccctgagagccagcaagatcagagagaaggtggacagagccgtggaggccgccgagagagccgccaccatcgccaagcagaaggccgagatcgccgccagcagaaccagccacagcagagccaaggccgaggccgccctgaccgccgcccagaaggcccaggaggaggccagaatcgccagaatcaccgccaaggagttcagccccagcttccagcacagagagaacggcctggagtaccagagacccaagagacagaccagctgcgacgacatcgaggtgctgagcaccggcacccccctgcagcaggagagccccgagctgtacagaaagggcaccacccccagcgacctgacccccgacgacagccccctgcagagcttccccaccagccccgccgccacccccccccccgcccccgccgccagaaacaaggtggcccacttcagcagacaggtgagcgtggacgaggagagaggcggcgacatccagatgctgctggagggcagagccggcgactgcgccagaagcagctggggcgaggagcaggccggcggcagcagaggcgtgagaagcggcgccctgagaggcggcctgctggtggacgacttcagaaccagaggcagcggcagaaagcagcccggcaaccccaagcccagagagagaagaaccgagagcccccccgtgttcacctggaccagccaccacagagccagcaaccacagccccggcggcagcagactgctggagctgcaggaggagaagctgagcaactacagaatggagatgaagcccctgctgagaatggagacccacccccagaagagaagatacagcaagggcggcgcctgcagaggcctgggcgacgaccacagacccgaggacagaggcttcggcgtgcagagactgagaagcaaggcccagaacaaggagaacttcagacccgccagcagcgccgagcccgccgtgcagaagctggccagcctgagactgggcggcgccgagcccagactgctgagatgggacctgaccttcagccccccccagaagagcctgcccgtggccctggagagcgacgaggagaacggcgacgagctgaagagcagcaccggcagcgcccccatcctggtggtgatggtgatcctgctgaacatcggcgtggccatcctgttcatcaacttcttcatctag

SEQ ID NO: 85910 - DNA, 561 bp, synthetic construct
  misc_feature 1..561: note = Description of Artificial Sequence: Synthetic coding sequence
  source 1..561: mol_type = other DNA
atgagcagcggcggcagattcaacttcgacgacggcggcagctactgcggcggctgggaggacggcaaggcccacggccacggcgtgtgcaccggccccaagggccagggcgagtacaccggcagctggagccacggcttcgaggtgctgggcgtgtacacctggcccagcggcaacacctaccagggcacctgggcccagggcaagagacacggcatcggcctggagagcaagggcaagtgggtgtacaagggcgagtggacccacggcttcaagggcagatacggcgtgagagagtgcgccggcaacggcgccaagtacgagggcacctggagcaacggcctgcaggacggctacggcaccgagacctacagcgacggcgacgccaccgccttcggcgccgagcccggccccgaggccagagagctgcccgccgccgccgccgccgccgccgccgccgccgccgccgccgtgagatggttcctgtgcagagagccctggcccgccctgcagctgcccgcctgcctggacagccccatcagcaccccccagtgcacctag

SEQ ID NO: 85911 - DNA, 96 bp, synthetic construct
  misc_feature 1..96: note = Description of Artificial Sequence: Synthetic coding sequence
  source 1..96: mol_type = other DNA
atgcccccccacagcggccagagcagaggcagaaagcccggcagctgcctgctgctgctgctgctgctgctgctgctgctgctgctgctgctgtag

SEQ ID NO: 85912 - DNA, 1836 bp, synthetic construct
  misc_feature 1..1836: note = Description of Artificial Sequence: Synthetic coding sequence
  source 1..1836: mol_type = other DNA
atgagacagggctacggcgtgagacagagcgtgccctacggcatggccgccgtgatcagaagccccctgagaaccagcatcaacagcctgagaagcgagcacaccaacggcaccgccctgcaccccgacgccagccccgccgtggccggcagccccgccgtgagcagaggcggcttcgtgctggtggcccacagcgacagcgagatcctgaagagcaagaagaagggcctgttcagaagaagcctgctgagcggcctgaagctgagaaagagcgagagcaagagcagcctggccagccagagaagcaagcagagcagcttcagaagcgaggccggcatgagcaccgtgagcagcaccgccagcgacatccacagcaccatcagcctgggcgaggccgaggccgagctggccgtgatcgaggacgacatcgacgccaccaccaccgagacctacgtgggcgagtggaagaacgacaagagaagcggcttcggcgtgagccagagaagcgacggcctgaagtacgagggcgagtgggccagcaacagaagacacggctacggctgcatgaccttccccgacggcaccaaggaggagggcaagtacaagcagaacatcctggtgggcggcaagagaaagaacctgatccccctgagagccagcaagatcagagagaaggtggacagagccgtggaggccgccgagagagccgccaccatcgccaagcagaaggccgagatcgccgccagcagaaccagccacagcagagccaaggccgaggccgccctgaccgccgcccagaaggcccaggaggaggccagaatcgccagaatcaccgccaaggagttcagccccagcttccagcacagagagaacggcctggagtaccagagacccaagagacagaccagctgcgacgacatcgaggtgctgagcaccggcacccccctgcagcaggagagccccgagctgtacagaaagggcaccacccccagcgacctgacccccgacgacagccccctgcagagcttccccaccagccccgccgccacccccccccccgcccccgccgccagaaacaaggtggcccacttcagcagacaggtgagcgtggacgaggagagaggcggcgacatccagatgctgctggagggcagagccggcgactgcgccagaagcagctggggcgaggagcaggccggcggcagcagaggcgtgagaagcggcgccctgagaggcggcctgctggtggacgacttcagaaccagaggcagcggcagaaagcagcccggcaaccccaagcccagagagagaagaaccgagagcccccccgtgttcacctggaccagccaccacagagccagcaaccacagccccggcggcagcagactgctggagctgcaggaggagaagctgagcaactacagaatggagatgaagcccctgctgagaatggagacccacccccagaagagaagatacagcaagggcggcgcctgcagaggcctgggcgacgaccacagacccgaggacagaggcttcggcgtgcagagactgagaagcaaggcccagaacaaggagaacttcagacccgccagcagcgccgagcccgccgtgcagaagctggccagcctgagactgggcggcgccgagcccagactgctgagatgggacctgaccttcagccccccccagaagagcctgcccgtggccctggagagcgacgaggagaacggcgacgagctgaagagcagcaccggcagcgcccccatcctggtggtgatggtgatcctgctgaacatcggcgtggccatcctgttcatcaacttcttcatctag

SEQ ID NO: 85913 - DNA, 1347 bp, synthetic construct
  misc_feature 1..1347: note = Description of Artificial Sequence: Synthetic coding sequence
  source 1..1347: mol_type = other DNA
atgaccagcagctgctgcgtgaccaacaacctgcaggccagcctgaagagctgccccagacccgccagcgtgtgcagcagcggcgtgaactgcagacccgagctgtgcctgggctacgtgtgccagcccatggcctgcctgcccagcgtgtgcctgcccaccaccttcagacccgccagctgcctgagcaagacctacctgagcagcagctgccaggccgccagcggcatcagcggcagcatgggccccggcagctggtacagcgagggcgccttcaacggcaacgagaaggagaccatgcagttcctgaacgacagactggccagctacctgaccagagtgagacagctggagcaggagaacgccgagctggagagcagaatccaggaggccagccacagccaggtgctgaccatgacccccgactaccagagccacttcagaaccatcgaggagctgcagcagaagatcctgtgcaccaaggccgagaacgccagaatggtggtgaacatcgacaacgccaagctggccgccgacgacttcagagccaagtacgaggccgagctggccatgagacagctggtggaggccgacatcaacggcctgagaagaatcctggacgacctgaccctgtgcaaggccgacctggaggcccaggtggagagcctgaaggaggagctgatgtgcctgaagaagaaccacgaggaggaggtgggcagcctgagatgccagctgggcgacagactgaacatcgaggtggacgccgccccccccgtggacctgaccagagtgctggaggagatgagatgccagtacgaggccatggtggaggccaacagaagagacgtggaggagtggttcaacatgcagatggaggagctgaaccagcaggtggccaccagcagcgagcagctgcagaactaccagagcgacatcatcgacctgagaagaaccgtgaacaccctggagatcgagctgcaggcccagcacagcctgagagacagcctggagaacaccctgaccgagagcgaggccagatacagcagccagctggcccagatgcagtgcatgatcaccaacgtggaggcccagctggccgagatcagagccgacctggagagacagaaccaggagtaccaggtgctgctggacgtgagagccagactggagggcgagatcaacacctacagaagcctgctggagaacgaggactgcaagctgccctgcaacccctgcagcacccccagctgcaccacctgcgtgcccagcccctgcgtgcccagaaccgtgtgcgtgcccagaaccgtgggcatgccctgcagcccctgcccccagggcagatactag

SEQ ID NO: 85914 - DNA, 1641 bp, synthetic construct
  misc_feature 1..1641: note = Description of Artificial Sequence: Synthetic coding sequence
  source 1..1641: mol_type = other DNA
atggccgaggtggtgagccccgtgcccggcgccggcagaagagagcccggcgaggtgggcagagccagaggcccccccgtggccgaccccggcgtggccctgagcccccagggcgagatcatcgagggctgcagactgcccgtgctgagaagaaaccaggacaacgaggacgagtggcccctggccgagatcctgagcgtgaaggacatcagcggcagaaagctgttctacgtgcactacatcgacttcaacaagagactggacgagtgggtgacccacgagagactggacctgaagaagatccagttccccaagaaggaggccaagacccccaccaagaacggcctgcccggcagcagacccggcagccccgagagagaggtgcccgccagcgcccaggccagcggcaagaccctgcccatccccgtgcagatcaccctgagattcaacctgcccaaggagagagaggccatccccggcggcgagcccgaccagcccctgagcagcagcagctgcctgcagcccaaccacagaagcaccaagagaaaggtggaggtggtgagccccgccacccccgtgcccagcgagaccgcccccgccagcgtgttcccccagaacggcgccgccagaagagccgtggccgcccagcccggcagaaagagaaagagcaactgcctgggcaccgacgaggacagccaggacagcagcgacggcatccccagcgcccccagaatgaccggcagcctggtgagcgacagaagccacgacgacatcgtgaccagaatgaagaacatcgagtgcatcgagctgggcagacacagactgaagccctggtacttcagcccctacccccaggagctgaccaccctgcccgtgctgtacctgtgcgagttctgcctgaagtacggcagaagcctgaagtgcctgcagagacacctgaccaagtgcgacctgagacacccccccggcaacgagatctacagaaagggcaccatcagcttcttcgagatcgacggcagaaagaacaagagctacagccagaacctgtgcctgctggccaagtgcttcctggaccacaagaccctgtactacgacaccgaccccttcctgttctacgtgatgaccgagtacgactgcaagggcttccacatcgtgggctacttcagcaaggagaaggagagcaccgaggactacaacgtggcctgcatcctgaccctgcccccctaccagagaagaggctacggcaagctgctgatcgagttcagctacgagctgagcaaggtggagggcaagaccggcacccccgagaagcccctgagcgacctgggcctgctgagctacagaagctactggagccagaccatcctggagatcctgatgggcctgaagagcgagagcggcgagagaccccagatcaccatcaacgagatcagcgagatcaccagcatcaagaaggaggacgtgatcagcaccctgcagtacctgaacctgatcaactactacaagggccagtacatcctgaccctgagcgaggacatcgtggacggccacgagagagccatgctgaagagactgctgagaatcgacagcaagtgcctgcacttcacccccaaggactggagcaagagaggcaagtggtag

SEQ ID NO: 85915 - DNA, 1386 bp, synthetic construct
  misc_feature 1..1386: note = Description of Artificial Sequence: Synthetic coding sequence
  source 1..1386: mol_type = other DNA
atggccgaggtgggcgagatcatcgagggctgcagactgcccgtgctgagaagaaaccaggacaacgaggacgagtggcccctggccgagatcctgagcgtgaaggacatcagcggcagaaagctgttctacgtgcactacatcgacttcaacaagagactggacgagtgggtgacccacgagagactggacctgaagaagatccagttccccaagaaggaggccaagacccccaccaagaacggcctgcccggcagcagacccggcagccccgagagagaggtgaagagaaaggtggaggtggtgagccccgccacccccgtgcccagcgagaccgcccccgccagcgtgttcccccagaacggcgccgccagaagagccgtggccgcccagcccggcagaaagagaaagagcaactgcctgggcaccgacgaggacagccaggacagcagcgacggcatccccagcgcccccagaatgaccggcagcctggtgagcgacagaagccacgacgacatcgtgaccagaatgaagaacatcgagtgcatcgagctgggcagacacagactgaagccctggtacttcagcccctacccccaggagctgaccaccctgcccgtgctgtacctgtgcgagttctgcctgaagtacggcagaagcctgaagtgcctgcagagacacctgaccaagtgcgacctgagacacccccccggcaacgagatctacagaaagggcaccatcagcttcttcgagatcgacggcagaaagaacaagagctacagccagaacctgtgcctgctggccaagtgcttcctggaccacaagaccctgtactacgacaccgaccccttcctgttctacgtgatgaccgagtacgactgcaagggcttccacatcgtgggctacttcagcaaggagaaggagagcaccgaggactacaacgtggcctgcatcctgaccctgcccccctaccagagaagaggctacggcaagctgctgatcgagttcagctacgagctgagcaaggtggagggcaagaccggcacccccgagaagcccctgagcgacctgggcctgctgagctacagaagctactggagccagaccatcctggagatcctgatgggcctgaagagcgagagcggcgagagaccccagatcaccatcaacgagatcagcgagatcaccagcatcaagaaggaggacgtgatcagcaccctgcagtacctgaacctgatcaactactacaagggccagtacatcctgaccctgagcgaggacatcgtggacggccacgagagagccatgctgaagagactgctgagaatcgacagcaagtgcctgcacttcacccccaaggactggagcaagagaggcaagtggtag

SEQ ID NO: 85916 - DNA, 1542 bp, synthetic construct
  misc_feature 1..1542: note = Description of Artificial Sequence: Synthetic coding sequence
  source 1..1542: mol_type = other DNA
atggccgaggtgggcgagatcatcgagggctgcagactgcccgtgctgagaagaaaccaggacaacgaggacgagtggcccctggccgagatcctgagcgtgaaggacatcagcggcagaaagctgttctacgtgcactacatcgacttcaacaagagactggacgagtgggtgacccacgagagactggacctgaagaagatccagttccccaagaaggaggccaagacccccaccaagaacggcctgcccggcagcagacccggcagccccgagagagaggtgcccgccagcgcccaggccagcggcaagaccctgcccatccccgtgcagatcaccctgagattcaacctgcccaaggagagagaggccatccccggcggcgagcccgaccagcccctgagcagcagcagctgcctgcagcccaaccacagaagcaccaagagaaaggtggaggtggtgagccccgccacccccgtgcccagcgagaccgcccccgccagcgtgttcccccagaacggcgccgccagaagagccgtggccgcccagcccggcagaaagagaaagagcaactgcctgggcaccgacgaggacagccaggacagcagcgacggcatccccagcgcccccagaatgaccggcagcctggtgagcgacagaagccacgacgacatcgtgaccagaatgaagaacatcgagtgcatcgagctgggcagacacagactgaagccctggtacttcagcccctacccccaggagctgaccaccctgcccgtgctgtacctgtgcgagttctgcctgaagtacggcagaagcctgaagtgcctgcagagacacctgaccaagtgcgacctgagacacccccccggcaacgagatctacagaaagggcaccatcagcttcttcgagatcgacggcagaaagaacaagagctacagccagaacctgtgcctgctggccaagtgcttcctggaccacaagaccctgtactacgacaccgaccccttcctgttctacgtgatgaccgagtacgactgcaagggcttccacatcgtgggctacttcagcaaggagaaggagagcaccgaggactacaacgtggcctgcatcctgaccctgcccccctaccagagaagaggctacggcaagctgctgatcgagttcagctacgagctgagcaaggtggagggcaagaccggcacccccgagaagcccctgagcgacctgggcctgctgagctacagaagctactggagccagaccatcctggagatcctgatgggcctgaagagcgagagcggcgagagaccccagatcaccatcaacgagatcagcgagatcaccagcatcaagaaggaggacgtgatcagcaccctgcagtacctgaacctgatcaactactacaagggccagtacatcctgaccctgagcgaggacatcgtggacggccacgagagagccatgctgaagagactgctgagaatcgacagcaagtgcctgcacttcacccccaaggactggagcaagagaggcaagtggtag

SEQ ID NO: 85917 - DNA, 1485 bp, synthetic construct
  misc_feature 1..1485: note = Description of Artificial Sequence: Synthetic coding sequence
  source 1..1485: mol_type = other DNA
atggccgaggtggtgagccccgtgcccggcgccggcagaagagagcccggcgaggtgggcagagccagaggcccccccgtggccgaccccggcgtggccctgagcccccagggcgagatcatcgagggctgcagactgcccgtgctgagaagaaaccaggacaacgaggacgagtggcccctggccgagatcctgagcgtgaaggacatcagcggcagaaagctgttctacgtgcactacatcgacttcaacaagagactggacgagtgggtgacccacgagagactggacctgaagaagatccagttccccaagaaggaggccaagacccccaccaagaacggcctgcccggcagcagacccggcagccccgagagagaggtgaagagaaaggtggaggtggtgagccccgccacccccgtgcccagcgagaccgcccccgccagcgtgttcccccagaacggcgccgccagaagagccgtggccgcccagcccggcagaaagagaaagagcaactgcctgggcaccgacgaggacagccaggacagcagcgacggcatccccagcgcccccagaatgaccggcagcctggtgagcgacagaagccacgacgacatcgtgaccagaatgaagaacatcgagtgcatcgagctgggcagacacagactgaagccctggtacttcagcccctacccccaggagctgaccaccctgcccgtgctgtacctgtgcgagttctgcctgaagtacggcagaagcctgaagtgcctgcagagacacctgaccaagtgcgacctgagacacccccccggcaacgagatctacagaaagggcaccatcagcttcttcgagatcgacggcagaaagaacaagagctacagccagaacctgtgcctgctggccaagtgcttcctggaccacaagaccctgtactacgacaccgaccccttcctgttctacgtgatgaccgagtacgactgcaagggcttccacatcgtgggctacttcagcaaggagaaggagagcaccgaggactacaacgtggcctgcatcctgaccctgcccccctaccagagaagaggctacggcaagctgctgatcgagttcagctacgagctgagcaaggtggagggcaagaccggcacccccgagaagcccctgagcgacctgggcctgctgagctacagaagctactggagccagaccatcctggagatcctgatgggcctgaagagcgagagcggcgagagaccccagatcaccatcaacgagatcagcgagatcaccagcatcaagaaggaggacgtgatcagcaccctgcagtacctgaacctgatcaactactacaagggccagtacatcctgaccctgagcgaggacatcgtggacggccacgagagagccatgctgaagagactgctgagaatcgacagcaagtgcctgcacttcacccccaaggactggagcaagagaggcaagtggtag

SEQ ID NO: 85918 - DNA, 6222 bp, synthetic construct
  misc_feature 1..6222: note = Description of Artificial Sequence: Synthetic coding sequence
  source 1..6222: mol_type = other DNA
atggtgaagctggccaaccccctgtacaccgagtggatcctggaggccatccagaagatcaagaagcagaagcagagacccagcgaggagagaatctgccacgccgtgagcaccagccacggcctggacaagaagaccgtgagcgagcagctggagctgagcgtgcaggacggcagcgtgctgaaggtgaccaacaagggcctggccagctacaaggaccccgacaaccccggcagattcagcagcgtgaagcccggcaccttccccaagagcgccaagggcagcagaggcagctgcaacgacctgagaaacgtggactggaacaagctgctgagaagagccatcgagggcctggaggagcccaacggcagcagcctgaagaacatcgagaagtacctgagaagccagagcgacctgaccagcaccaccaacaaccccgccttccagcagagactgagactgggcgccaagagagccgtgaacaacggcagactgctgaaggacggcccccagtacagagtgaactacggcagcctggacggcaagggcgccccccagtaccccagcgccttccccagcagcctgccccccgtgagcctgctgccccacgagaaggaccagcccagagccgaccccatccccatctgcagcttctgcctgggcaccaaggagagcaacagagagaagaagcccgaggagctgctgagctgcgccgactgcggcagcagcggccaccccagctgcctgaagttctgccccgagctgaccaccaacgtgaaggccctgagatggcagtgcatcgagtgcaagacctgcagcgcctgcagagtgcagggcagaaacgccgacaacatgctgttctgcgacagctgcgacagaggcttccacatggagtgctgcgacccccccctgagcagaatgcccaagggcatgtggatctgccaggtgtgcagacccaagaagaagggcagaaagctgctgcacgagaaggccgcccagatcaagagaagatacgccaagcccatcggcagacccaagaacaagctgaagcagagactgctgagcgtgaccagcgacgagggcagcatgaacgccttcaccggcagaggcagccccggcagaggccagaagaccaaggtgtgcaccacccccagcagcggccacgccgccagcggcaaggacagcagcagcagactggccgtgaccgaccccaccagacccggcgccaccaccaagatcaccaccaccagcacctacatcagcgccagcaccctgaaggtgaacaagaagaccaagggcctgatcgacggcctgaccaagttcttcacccccagccccgacggcagaagaagcagaggcgagatcatcgacttcagcaagcactacagacccagaaagaaggtgagccagaagcagagctgcaccagccacgtgctggccaccggcaccacccagaagctgaagcccccccccagcagcctgcccccccccacccccatcagcggccagagccccagcagccagaagagcagcaccgccaccagcagccccagcccccagagcagcagcagccagtgcagcgtgcccagcctgagcagcctgaccaccaacagccagctgaaggccctgttcgacggcctgagccacatctacaccacccagggccagagcagaaagaagggccaccccagctacgccccccccaagagaatgagaagaaagaccgagctgagcagcaccgccaagagcaaggcccacttcttcggcaagagagacatcagaagcagattcatcagccacagcagcagcagcagctggggcatggccagaggcagcatcttcaaggccatcgcccacttcaagagaaccaccttcctgaagaagcacagaatgctgggcagactgaagtacaaggtgaccccccagatgggcacccccagccccggcaagggcagcctgaccgacggcagaatcaagcccgaccaggacgacgacaccgagatcaagatcaacatcaagcaggagagcgccgacgtgaacgtgatcggcaacaaggacgtggtgaccgaggaggacctggacgtgttcaagcaggcccaggagctgagctgggagaagatcgagtgcgagagcggcgtggaggactgcggcagataccccagcgtgatcgagttcggcaagtacgagatccagacctggtacagcagcccctacccccaggagtacgccagactgcccaagctgtacctgtgcgagttctgcctgaagtacatgaagagcaagaacatcctgctgagacacagcaagaagtgcggctggttccacccccccgccaacgagatctacagaagaaaggacctgagcgtgttcgaggtggacggcaacatgagcaagatctactgccagaacctgtgcctgctggccaagctgttcctggaccacaagaccctgtactacgacgtggagcccttcctgttctacgtgctgaccaagaacgacgagaagggctgccacctggtgggctacttcagcaaggagaagctgtgccagcagaagtacaacgtgagctgcatcatgatcatgccccagcaccagagacagggcttcggcagattcctgatcgacttcagctacctgctgagcagaagagagggccaggccggcagccccgagaagcccctgagcgacctgggcagactgagctacctggcctactggaagagcgtgatcctggagtacctgtaccaccaccacgagagacacatcagcatcaaggccatcagcagagccaccggcatgtgcccccacgacatcgccaccaccctgcagcacctgcacatgatcgacaagagagacggcagattcgtgatcatcagaagagagaagctgatcctgagccacatggagaagctgaagacctgcagcagagccaacgagctggaccccgacagcctgagatggacccccatcctgatcagcaacgccgccgtgagcgaggaggagagagaggccgagaaggaggccgagagactgatggagcaggccagctgctgggagaaggaggagcaggagatcctgagcaccagagccaacagcagacagagccccgccaaggtgcagagcaagaacaagtacctgcacagccccgagagcagacccgtgaccggcgagagaggccagctgctggagctgagcaaggagagcagcgaggaggaggaggaggaggaggacgaggaggaggaggaggaggaggaggaggaggaggaggacgaggaggaggaggaggaggaggaggaggaggaggaggaggagaacatccagagcagcccccccagactgaccaagccccagagcgtggccatcaagagaaagagacccttcgtgctgaagaagaagagaggcagaaagagaagaagaatcaacagcagcgtgaccaccgagaccatcagcgagaccaccgaggtgctgaacgagcccttcgacaacagcgacgaggagagacccatgccccagctggagcccacctgcgagatcgaggtggaggaggacggcagaaagcccgtgctgagaaaggccttccagcaccagcccggcaagaagagacagaccgaggaggaggagggcaaggacaaccactgcttcaagaacgccgacccctgcagaaacaacatgaacgacgacagcagcaacctgaaggagggcagcaaggacaaccccgagcccctgaagtgcaagcaggtgtggcccaagggcaccaagagaggcctgagcaagtggagacagaacaaggagagaaagaccggcttcaagctgaacctgtacaccccccccgagacccccatggagcccgacgagcaggtgaccgtggaggagcagaaggagaccagcgagggcaagaccagccccagccccatcagaatcgaggaggaggtgaaggagaccggcgaggccctgctgccccaggaggagaacagaagagaggagacctgcgcccccgtgagccccaacaccagccccggcgagaagcccgaggacgacctgatcaagcccgaggaggaggaggaggaggaggaggaggaggaggaggaggaggaggaggaggagggcgaggaggaggagggcggcggcaacgtggagaaggaccccgacggcgccaagagccaggagaaggaggagcccgagatcagcaccgagaaggaggacagcgccagactggacgaccacgaggaggaggaggaggaggacgaggagcccagccacaacgaggaccacgacgccgacgacgaggacgacagccacatggagagcgccgaggtggagaaggaggagctgcccagagagagcttcaaggaggtgctggagaaccaggagaccttcctggacctgaacgtgcagcccggccacagcaaccccgaggtgctgatggactgcggcgtggacctgaccgccagctgcaacagcgagcccaaggagctggccggcgaccccgaggccgtgcccgagagcgacgaggagcccccccccggcgagcaggcccagaagcaggaccagaagaacagcaaggaggtggacaccgagttcaaggagggcaaccccgccaccatggagatcgacagcgagaccgtgcaggccgtgcagagcctgacccaggagagcagcgagcaggacgacaccttccaggactgcgccgagacccaggaggcctgcagaagcctgcagaactacaccagagccgaccagagcccccagatcgccaccaccctggacgactgccagcagagcgaccacagcagccccgtgagcagcgtgcacagccaccccggccagagcgtgagaagcgtgaacagccccagcgtgcccgccctggagaacagctacgcccagatcagccccgaccagagcgccatcagcgtgcccagcctgcagaacatggagaccagccccatgatggacgtgcccagcgtgagcgaccacagccagcaggtggtggacagcggcttcagcgacctgggcagcatcgagagcaccaccgagaactacgagaaccccagcagctacgacagcaccatgggcggcagcatctgcggcaacggcagcagccagaacagctgcagctacagcaacctgaccagcagcagcctgacccagagcagctgcgccgtgacccagcagatgagcaacatcagcggcagctgcagcatgctgcagcagaccagcatcagcagcccccccacctgcagcgtgaagagcccccagggctgcgtggtggagagaccccccagcagcagccagcagctggcccagtgcagcatggccgccaacttcaccccccccatgcagctggccgagatccccgagaccagcaacgccaacatcggcctgtacgagagaatgggccagagcgacttcggcgccggccactacccccagcccagcgccaccttcagcctggccaagctgcagcagctgaccaacaccctgatcgaccacagcctgccctacagccacagcgccgccgtgaccagctacgccaacagcgccagcctgagcacccccctgagcaacaccggcctggtgcagctgagccagagcccccacagcgtgcccggcggcccccaggcccaggccaccatgacccccccccccaacctgacccccccccccatgaacctgcccccccccctgctgcagagaaacatggccgccagcaacatcggcatcagccacagccagagactgcagacccagatcgccagcaagggccacatcagcatgagaaccaagagcgccagcctgagccccgccgccgccacccaccagagccagatctacggcagaagccagaccgtggccatgcagggccccgccagaaccctgaccatgcagagaggcatgaacatgagcgtgaacctgatgcccgcccccgcctacaacgtgaacagcgtgaacatgaacatgaacaccctgaacgccatgaacggctacagcatgagccagcccatgatgaacagcggctaccacagcaaccacggctacatgaaccagaccccccagtaccccatgcagatgcagatgggcatgatgggcacccagccctacgcccagcagcccatgcagacccccccccacggcaacatgatgtacaccgcccccggccaccacggctacatgaacaccggcatgagcaagcagagcctgaacggcagctacatgagaagatag

SEQ ID NO: 85919 - DNA, 5673 bp, synthetic construct
  misc_feature 1..5673: note = Description of Artificial Sequence: Synthetic coding sequence
  source 1..5673: mol_type = other DNA
atggtgaagctggccaaccccctgtacaccgagtggatcctggaggccatccagaagatcaagaagcagaagcagagacccagcgaggagagaatctgccacgccgtgagcaccagccacggcctggacaagaagaccgtgagcgagcagctggagctgagcgtgcaggacggcagcgtgctgaaggtgaccaacaagggcctggccagctacaaggaccccgacaaccccggcagattcagcagcgtgaagcccggcaccttccccaagagcgccaagggcagcagaggcagctgcaacgacctgagaaacgtggactggaacaagctgctgagaagagccatcgagggcctggaggagcccaacggcagcagcctgaagaacatcgagaagtacctgagaagccagagcgacctgaccagcaccaccaacaaccccgccttccagcagagactgagactgggcgccaagagagccgtgaacaacggcagactgctgaaggacggcccccagtacagagtgaactacggcagcctggacggcaagggcgccccccagtaccccagcgccttccccagcagcctgccccccgtgagcctgctgccccacgagaaggaccagcccagagccgaccccatccccatctgcagcttctgcctgggcaccaaggagagcaacagagagaagaagcccgaggagctgctgagctgcgccgactgcggcagcagcggccaccccagctgcctgaagttctgccccgagctgaccaccaacgtgaaggccctgagatggcagtgcatcgagtgcaagacctgcagcgcctgcagagtgcagggcagaaacgccgacaacatgctgttctgcgacagctgcgacagaggcttccacatggagtgctgcgacccccccctgagcagaatgcccaagggcatgtggatctgccaggtgtgcagacccaagaagaagggcagaaagctgctgcacgagaaggccgcccagatcaagagaagatacgccaagcccatcggcagacccaagaacaagctgaagcagagactgctgagcgtgaccagcgacgagggcagcatgaacgccttcaccggcagaggcagccccggcagaggccagaagaccaaggtgtgcaccacccccagcagcggccacgccgccagcggcaaggacagcagcagcagactggccgtgaccgaccccaccagacccggcgccaccaccaagatcaccaccaccagcacctacatcagcgccagcaccctgaaggtgaacaagaagaccaagggcctgatcgacggcctgaccaagttcttcacccccagccccgacggcagaagaagcagaggcgagatcatcgacttcagcaagcactacagacccagaaagaaggtgagccagaagcagagctgcaccagccacgtgctggccaccgacaccgagatcaagatcaacatcaagcaggagagcgccgacgtgaacgtgatcggcaacaaggacgtggtgaccgaggaggacctggacgtgttcaagcaggcccaggagctgagctgggagaagatcgagtgcgagagcggcgtggaggactgcggcagataccccagcgtgatcgagttcggcaagtacgagatccagacctggtacagcagcccctacccccaggagtacgccagactgcccaagctgtacctgtgcgagttctgcctgaagtacatgaagagcaagaacatcctgctgagacacagcaagaagtgcggctggttccacccccccgccaacgagatctacagaagaaaggacctgagcgtgttcgaggtggacggcaacatgagcaagatctactgccagaacctgtgcctgctggccaagctgttcctggaccacaagaccctgtactacgacgtggagcccttcctgttctacgtgctgaccaagaacgacgagaagggctgccacctggtgggctacttcagcaaggagaagctgtgccagcagaagtacaacgtgagctgcatcatgatcatgccccagcaccagagacagggcttcggcagattcctgatcgacttcagctacctgctgagcagaagagagggccaggccggcagccccgagaagcccctgagcgacctgggcagactgagctacctggcctactggaagagcgtgatcctggagtacctgtaccaccaccacgagagacacatcagcatcaaggccatcagcagagccaccggcatgtgcccccacgacatcgccaccaccctgcagcacctgcacatgatcgacaagagagacggcagattcgtgatcatcagaagagagaagctgatcctgagccacatggagaagctgaagacctgcagcagagccaacgagctggaccccgacagcctgagatggacccccatcctgatcagcaacgccgccgtgagcgaggaggagagagaggccgagaaggaggccgagagactgatggagcaggccagctgctgggagaaggaggagcaggagatcctgagcaccagagccaacagcagacagagccccgccaaggtgcagagcaagaacaagtacctgcacagccccgagagcagacccgtgaccggcgagagaggccagctgctggagctgagcaaggagagcagcgaggaggaggaggaggaggaggacgaggaggaggaggaggaggaggaggaggaggaggaggacgaggaggaggaggaggaggaggaggaggaggaggaggaggagaacatccagagcagcccccccagactgaccaagccccagagcgtggccatcaagagaaagagacccttcgtgctgaagaagaagagaggcagaaagagaagaagaatcaacagcagcgtgaccaccgagaccatcagcgagaccaccgaggtgctgaacgagcccttcgacaacagcgacgaggagagacccatgccccagctggagcccacctgcgagatcgaggtggaggaggacggcagaaagcccgtgctgagaaaggccttccagcaccagcccggcaagaagagacagaccgaggaggaggagggcaaggacaaccactgcttcaagaacgccgacccctgcagaaacaacatgaacgacgacagcagcaacctgaaggagggcagcaaggacaaccccgagcccctgaagtgcaagcaggtgtggcccaagggcaccaagagaggcctgagcaagtggagacagaacaaggagagaaagaccggcttcaagctgaacctgtacaccccccccgagacccccatggagcccgacgagcaggtgaccgtggaggagcagaaggagaccagcgagggcaagaccagccccagccccatcagaatcgaggaggaggtgaaggagaccggcgaggccctgctgccccaggaggagaacagaagagaggagacctgcgcccccgtgagccccaacaccagccccggcgagaagcccgaggacgacctgatcaagcccgaggaggaggaggaggaggaggaggaggaggaggaggaggaggaggaggaggagggcgaggaggaggagggcggcggcaacgtggagaaggaccccgacggcgccaagagccaggagaaggaggagcccgagatcagcaccgagaaggaggacagcgccagactggacgaccacgaggaggaggaggaggaggacgaggagcccagccacaacgaggaccacgacgccgacgacgaggacgacagccacatggagagcgccgaggtggagaaggaggagctgcccagagagagcttcaaggaggtgctggagaaccaggagaccttcctggacctgaacgtgcagcccggccacagcaaccccgaggtgctgatggactgcggcgtggacctgaccgccagctgcaacagcgagcccaaggagctggccggcgaccccgaggccgtgcccgagagcgacgaggagcccccccccggcgagcaggcccagaagcaggaccagaagaacagcaaggaggtggacaccgagttcaaggagggcaaccccgccaccatggagatcgacagcgagaccgtgcaggccgtgcagagcctgacccaggagagcagcgagcaggacgacaccttccaggactgcgccgagacccaggaggcctgcagaagcctgcagaactacaccagagccgaccagagcccccagatcgccaccaccctggacgactgccagcagagcgaccacagcagccccgtgagcagcgtgcacagccaccccggccagagcgtgagaagcgtgaacagccccagcgtgcccgccctggagaacagctacgcccagatcagccccgaccagagcgccatcagcgtgcccagcctgcagaacatggagaccagccccatgatggacgtgcccagcgtgagcgaccacagccagcaggtggtggacagcggcttcagcgacctgggcagcatcgagagcaccaccgagaactacgagaaccccagcagctacgacagcaccatgggcggcagcatctgcggcaacggcagcagccagaacagctgcagctacagcaacctgaccagcagcagcctgacccagagcagctgcgccgtgacccagcagatgagcaacatcagcggcagctgcagcatgctgcagcagaccagcatcagcagcccccccacctgcagcgtgaagagcccccagggctgcgtggtggagagaccccccagcagcagccagcagctggcccagtgcagcatggccgccaacttcaccccccccatgcagctggccgagatccccgagaccagcaacgccaacatcggcctgtacgagagaatgggccagagcgacttcggcgccggccactacccccagcccagcgccaccttcagcctggccaagctgcagcagctgaccaacaccctgatcgaccacagcctgccctacagccacagcgccgccgtgaccagctacgccaacagcgccagcctgagcacccccctgagcaacaccggcctggtgcagctgagccagagcccccacagcgtgcccggcggcccccaggcccaggccaccatgacccccccccccaacctgacccccccccccatgaacctgcccccccccctgctgcagagaaacatggccgccagcaacatcggcatcagccacagccagagactgcagacccagatcgccagcaagggccacatcagcatgagaaccaagagcgccagcctgagccccgccgccgccacccaccagagccagatctacggcagaagccagaccgtggccatgcagggccccgccagaaccctgaccatgcagagaggcatgaacatgagcgtgaacctgatgcccgcccccgcctacaacgtgaacagcgtgaacatgaacatgaacaccctgaacgccatgaacggctacagcatgagccagcccatgatgaacagcggctaccacagcaaccacggctacatgaaccagaccccccagtaccccatgcagatgcagatgggcatgatgggcacccagccctacgcccagcagcccatgcagacccccccccacggcaacatgatgtacaccgcccccggccaccacggctacatgaacaccggcatgagcaagcagagcctgaacggcagctacatgagaagatag

SEQ ID NO: 85920 - DNA, 5346 bp, synthetic construct
  misc_feature 1..5346: note = Description of Artificial Sequence: Synthetic coding sequence
  source 1..5346: mol_type = other DNA
atggtgaagctggccaaccccctgtacaccgagtggatcctggaggccatccagaagatcaagaagcagaagcagagacccagcgaggagagaatctgccacgccgtgagcaccagccacggcctggacaagaagaccgtgagcgagcagctggagctgagcgtgcaggacggcagcgtgctgaaggtgaccaacaagggcctggccagctacaaggaccccgacaaccccggcagattcagcagcgtgaagcccggcaccttccccaagagcgccaagggcagcagaggcagctgcaacgacctgagaaacgtggactggaacaagctgctgagaagagccatcgagggcctggaggagcccaacggcagcagcctgaagaacatcgagaagtacctgagaagccagagcgacctgaccagcaccaccaacaaccccgccttccagcagagactgagactgggcgccaagagagccgtgaacaacggcagactgctgaaggacggcccccagtacagagtgaactacggcagcctggacggcaagggcgccccccagtaccccagcgccttccccagcagcctgccccccgtgagcctgctgccccacgagaaggaccagcccagagccgaccccatccccatctgcagcttctgcctgggcaccaaggagagcaacagagagaagaagcccgaggagctgctgagctgcgccgactgcggcagcagcggccaccccagctgcctgaagttctgccccgagctgaccaccaacgtgaaggccctgagatggcagtgcatcgagtgcaagacctgcagcgcctgcagagtgcagggcagaaacgccgacaacatgctgttctgcgacagctgcgacagaggcttccacatggagtgctgcgacccccccctgagcagaatgcccaagggcatgtggatctgccaggtgtgcagacccaagaagaagggcagaaagctgctgcacgagaaggccgcccagatcaagagaagatacgccaagcccatcggcagacccaagaacaagctgaagcagagactgctgagcgtgaccagcgacgagggcagcatgaacgccttcaccggcagaggcagccccgacaccgagatcaagatcaacatcaagcaggagagcgccgacgtgaacgtgatcggcaacaaggacgtggtgaccgaggaggacctggacgtgttcaagcaggcccaggagctgagctgggagaagatcgagtgcgagagcggcgtggaggactgcggcagataccccagcgtgatcgagttcggcaagtacgagatccagacctggtacagcagcccctacccccaggagtacgccagactgcccaagctgtacctgtgcgagttctgcctgaagtacatgaagagcaagaacatcctgctgagacacagcaagaagtgcggctggttccacccccccgccaacgagatctacagaagaaaggacctgagcgtgttcgaggtggacggcaacatgagcaagatctactgccagaacctgtgcctgctggccaagctgttcctggaccacaagaccctgtactacgacgtggagcccttcctgttctacgtgctgaccaagaacgacgagaagggctgccacctggtgggctacttcagcaaggagaagctgtgccagcagaagtacaacgtgagctgcatcatgatcatgccccagcaccagagacagggcttcggcagattcctgatcgacttcagctacctgctgagcagaagagagggccaggccggcagccccgagaagcccctgagcgacctgggcagactgagctacctggcctactggaagagcgtgatcctggagtacctgtaccaccaccacgagagacacatcagcatcaaggccatcagcagagccaccggcatgtgcccccacgacatcgccaccaccctgcagcacctgcacatgatcgacaagagagacggcagattcgtgatcatcagaagagagaagctgatcctgagccacatggagaagctgaagacctgcagcagagccaacgagctggaccccgacagcctgagatggacccccatcctgatcagcaacgccgccgtgagcgaggaggagagagaggccgagaaggaggccgagagactgatggagcaggccagctgctgggagaaggaggagcaggagatcctgagcaccagagccaacagcagacagagccccgccaaggtgcagagcaagaacaagtacctgcacagccccgagagcagacccgtgaccggcgagagaggccagctgctggagctgagcaaggagagcagcgaggaggaggaggaggaggaggacgaggaggaggaggaggaggaggaggaggaggaggaggacgaggaggaggaggaggaggaggaggaggaggaggaggaggagaacatccagagcagcccccccagactgaccaagccccagagcgtggccatcaagagaaagagacccttcgtgctgaagaagaagagaggcagaaagagaagaagaatcaacagcagcgtgaccaccgagaccatcagcgagaccaccgaggtgctgaacgagcccttcgacaacagcgacgaggagagacccatgccccagctggagcccacctgcgagatcgaggtggaggaggacggcagaaagcccgtgctgagaaaggccttccagcaccagcccggcaagaagagacagaccgaggaggaggagggcaaggacaaccactgcttcaagaacgccgacccctgcagaaacaacatgaacgacgacagcagcaacctgaaggagggcagcaaggacaaccccgagcccctgaagtgcaagcaggtgtggcccaagggcaccaagagaggcctgagcaagtggagacagaacaaggagagaaagaccggcttcaagctgaacctgtacaccccccccgagacccccatggagcccgacgagcaggtgaccgtggaggagcagaaggagaccagcgagggcaagaccagccccagccccatcagaatcgaggaggaggtgaaggagaccggcgaggccctgctgccccaggaggagaacagaagagaggagacctgcgcccccgtgagccccaacaccagccccggcgagaagcccgaggacgacctgatcaagcccgaggaggaggaggaggaggaggaggaggaggaggaggaggaggaggaggaggagggcgaggaggaggagggcggcggcaacgtggagaaggaccccgacggcgccaagagccaggagaaggaggagcccgagatcagcaccgagaaggaggacagcgccagactggacgaccacgaggaggaggaggaggaggacgaggagcccagccacaacgaggaccacgacgccgacgacgaggacgacagccacatggagagcgccgaggtggagaaggaggagctgcccagagagagcttcaaggaggtgctggagaaccaggagaccttcctggacctgaacgtgcagcccggccacagcaaccccgaggtgctgatggactgcggcgtggacctgaccgccagctgcaacagcgagcccaaggagctggccggcgaccccgaggccgtgcccgagagcgacgaggagcccccccccggcgagcaggcccagaagcaggaccagaagaacagcaaggaggtggacaccgagttcaaggagggcaaccccgccaccatggagatcgacagcgagaccgtgcaggccgtgcagagcctgacccaggagagcagcgagcaggacgacaccttccaggactgcgccgagacccaggaggcctgcagaagcctgcagaactacaccagagccgaccagagcccccagatcgccaccaccctggacgactgccagcagagcgaccacagcagccccgtgagcagcgtgcacagccaccccggccagagcgtgagaagcgtgaacagccccagcgtgcccgccctggagaacagctacgcccagatcagccccgaccagagcgccatcagcgtgcccagcctgcagaacatggagaccagccccatgatggacgtgcccagcgtgagcgaccacagccagcaggtggtggacagcggcttcagcgacctgggcagcatcgagagcaccaccgagaactacgagaaccccagcagctacgacagcaccatgggcggcagcatctgcggcaacggcagcagccagaacagctgcagctacagcaacctgaccagcagcagcctgacccagagcagctgcgccgtgacccagcagatgagcaacatcagcggcagctgcagcatgctgcagcagaccagcatcagcagcccccccacctgcagcgtgaagagcccccagggctgcgtggtggagagaccccccagcagcagccagcagctggcccagtgcagcatggccgccaacttcaccccccccatgcagctggccgagatccccgagaccagcaacgccaacatcggcctgtacgagagaatgggccagagcgacttcggcgccggccactacccccagcccagcgccaccttcagcctggccaagctgcagcagctgaccaacaccctgatcgaccacagcctgccctacagccacagcgccgccgtgaccagctacgccaacagcgccagcctgagcacccccctgagcaacaccggcctggtgcagctgagccagagcccccacagcgtgcccggcggcccccaggcccaggccaccatgacccccccccccaacctgacccccccccccatgaacctgcccccccccctgctgcagagaaacatggccgccagcaacatcggcatcagccacagccagagactgcagacccagatcgccagcaagggccacatcagcatgagaaccaagagcgccagcctgagccccgccgccgccacccaccagagccagatctacggcagaagccagaccgtggccatgcagggccccgccagaaccctgaccatgcagagaggcatgaacatgagcgtgaacctgatgcccgcccccgcctacaacgtgaacagcgtgaacatgaacatgaacaccctgaacgccatgaacggctacagcatgagccagcccatgatgaacagcggctaccacagcaaccacggctacatgaaccagaccccccagtaccccatgcagatgcagatgggcatgatgggcacccagccctacgcccagcagcccatgcagacccccccccacggcaacatgatgtacaccgcccccggccaccacggctacatgaacaccggcatgagcaagcagagcctgaacggcagctacatgagaagatag

SEQ ID NO: 85921 - DNA, 5346 bp, synthetic construct; identical to SEQ ID NO: 85920
  misc_feature 1..5346: note = Description of Artificial Sequence: Synthetic coding sequence
  source 1..5346: mol_type = other DNA

SEQ ID NO: 85922 - DNA, 5346 bp, synthetic construct; identical to SEQ ID NO: 85920
  misc_feature 1..5346: note = Description of Artificial Sequence: Synthetic coding sequence
  source 1..5346: mol_type = other DNA

SEQ ID NO: 85923 - DNA, 4992 bp, synthetic construct
  misc_feature 1..4992: note = Description of Artificial Sequence: Synthetic coding sequence
  source 1..4992: mol_type = other DNA
atgaccgacagattctgggaccagtggtacctgtggtacctgagactgctgagactgctggacagaggcagcttcagaaacgacggcctgaaggccagcgacgtgctgcccatcctgaaggagaaggtggccttcgtgagcggcggcagagacaagagaggcggccccatcctgaccttccccgccagaagcaaccacgacagaatcagacaggaggacctgagaaagctggtgacctacctggccagcgtgcccagcgaggacgtgtgcaagagaggcttcaccgtgatcatcgacatgagaggcagcaagtgggacctgatcaagcccctgctgaagaccctgcaggaggccttccccgccgagatccacgtggccctgatcatcaagcccgacaacttctggcagaagcagaagaccaacttcggcagcagcaagttcatcttcgagaccagcatggtgagcgtggagggcctgaccaagctggtggaccccagccagctgaccgaggagttcgacggcagcctggactacaaccacgaggagtggatcgagctgagactgagcctggaggagttcttcaacagcgccgtgcacctgctgagcagactggaggacctgcaggagatgctggccagaaaggagttccccgtggacgtggagggcagcagaagactgatcgacgagcacacccagctgaagaagaaggtgctgaaggcccccgtggaggagctggacagagagggccagagactgctgcagtgcatcagatgcagcgacggcttcagcggcagaaactgcatccccggcagcgccgacttccagagcctggtgcccaagatcaccagcctgctggacaagctgcacagcaccagacagcacctgcaccagatgtggcacgtgagaaagctgaagctggaccagtgcttccagctgagactgttcgagcaggacgccgagaagatgttcgactggatcagccacaacaaggagctgttcctgcagagccacaccgagatcggcgtgagctaccagtacgccctggacctgcagacccagcacaaccacttcgccatgaacagcatgaacgcctacgtgaacatcaacagaatcatgagcgtggccagcagactgagcgaggccggccactacgccagccagcagatcaagcagatcagcacccagctggaccaggagtggaagagcttcgccgccgccctggacgagagaagcaccatcctggccatgagcgccgtgttccaccagaaggccgagcagttcctgagcggcgtggacgcctggtgcaagatgtgcagcgagggcggcctgcccagcgagatgcaggacctggagctggccatccaccaccaccagaccctgtacgagcaggtgacccaggcctacaccgaggtgagccaggacggcaaggccctgctggacgtgctgcagagacccctgagccccggcaacagcgagagcctgaccgccaccgccaactacagcaaggccgtgcaccaggtgctggacgtggtgcacgaggtgctgcaccaccagagaagactggagagcatctggcagcacagaaaggtgagactgcaccagagactgcagctgtgcgtgttccagcaggacgtgcagcaggtgctggactggatcgagaaccacggcgaggccttcctgagcaagcacaccggcgtgggcaagagcctgcacagagccagagccctgcagaagagacacgacgacttcgaggaggtggcccagaacacctacaccaacgccgacaagctgctggaggccgccgagcagctggcccagaccggcgagtgcgaccccgaggagatctacaaggccgccagacacctggaggtgagaatccaggacttcgtgagaagagtggagcagagaaagctgctgctggacatgagcgtgagcttccacacccacaccaaggagctgtggacctggatggaggacctgcagaaggagatgctggaggacgtgtgcgccgacagcgtggacgccgtgcaggagctgatcaagcagttccagcagcagcagaccgccaccctggacgccaccctgaacgtgatcaaggagggcgaggacctgatccagcagctgagaagcgccccccccagcctgggcgagcccagcgaggccagagacagcgccgtgagcaacaacaagaccccccacagcagcagcatcagccacatcgagagcgtgctgcagcagctggacgacgcccaggtgcagatggaggagctgttccacgagagaaagatcaagctggacatcttcctgcagctgagaatcttcgagcagtacaccatcgaggtgaccgccgagctggacgcctggaacgaggacctgctgagacagatgaacgacttcaacaccgaggacctgaccctggccgagcagagactgcagagacacaccgagagaaagctggccatgaacaacatgaccttcgaggtgatccagcagggccaggacctgcaccagtacatcaccgaggtgcaggccagcggcatcgagctgatctgcgagaaggacatcgacctggccgcccaggtgcaggagctgctggagttcctgcacgagaagcagcacgagctggagctgaacgccgagcagacccacaagagactggagcagtgcctgcagctgagacacctgcaggccgaggtgaagcaggtgctgggctggatcagaaacggcgagagcatgctgaacgccagcctggtgaacgccagcagcctgagcgaggccgagcagctgcagagagagcacgagcagttccagctggccatcgagagcctgttccacgccaccagcctgcagaagacccaccagagcgccctgcaggtgcagcagaaggccgaggtgctgctgcaggccggccactacgacgccgacgccatcagagagtgcgccgagaaggtggccctgcactggcagcagctgatgctgaagatggaggacagactgaagctggtgaacgccagcgtggccttctacaagaccagcgagcaggtgtgcagcgtgctggagagcctggagcaggagtacagaagagacgaggactggtgcggcggcagagacaagctgggccccgccgccgagatcgaccacgtgatccccctgatcagcaagcacctggagcagaaggaggccttcctgaaggcctgcaccctggccagaagaaacgccgaggtgttcctgaagtacatccacagaaacaacgtgagcatgcccagcgtggccagccacaccagaggccccgagcagcaggtgaaggccatcctgagcgagctgctgcagagagagaacagagtgctgcacttctggaccctgaagaagagaagactggaccagtgccagcagtacgtggtgttcgagagaagcgccaagcaggccctggactggatccaggagaccggcgagttctacctgagcacccacaccagcaccggcgagaccaccgaggagacccaggagctgctgaaggagtacggcgagttcagagtgcccgccaagcagaccaaggagaaggtgaagctgctgatccagctggccgacagcttcgtggagaagggccacatccacgccaccgagatcagaaagtgggtgaccaccgtggacaagcactacagagacttcagcctgagaatgggcaagtacagatacagcctggagaaggccctgggcgtgaacaccgaggacaacaaggacctggagctggacatcatccccgccagcctgagcgacagagaggtgaagctgagagacgccaaccacgaggtgaacgaggagaagagaaagagcgccagaaagaaggagttcatcatggccgagctgctgcagaccgagaaggcctacgtgagagacctgcacgagtgcctggagacctacctgtgggagatgaccagcggcgtggaggagatcccccccggcatcctgaacaaggagcacatcatcttcggcaacatccaggagatctacgacttccacaacaacatcttcctgaaggagctggagaagtacgagcagctgcccgaggacgtgggccactgcttcgtgacctgggccgacaagttccagatgtacgtgacctactgcaagaacaagcccgacagcaaccagctgatcctggagcacgccggcaccttcttcgacgagatccagcagagacacggcctggccaacagcatcagcagctacctgatcaagcccgtgcagagaatcaccaagtaccagctgctgctgaaggagctgctgacctgctgcgaggagggcaagggcgagctgaaggacggcctggaggtgatgctgagcgtgcccaagaaggccaacgacgccatgcacgtgagcatgctggagggcttcgacgagaacctggacgtgcagggcgagctgatcctgcaggacgccttccaggtgtgggaccccaagagcctgatcagaaagggcagagagagacacctgttcctgttcgagatcagcctggtgttcagcaaggagatcaaggacagcagcggccacaccaagtacgtgtacaagaacaagctgctgaccagcgagctgggcgtgaccgagcacgtggagggcgacccctgcaagttcgccctgtggagcggcagaacccccagcagcgacaacaagaccgtgctgaaggccagcaacatcgagaccaagcaggagtggatcaagaacatcagagaggtgatccaggagagaatcatccacctgaagggcgccctgaaggagcccctgcagctgcccaagacccccgccaagcagagaaacaacagcaagagagacggcgtggaggacatcgacagccagggcgacggcagcagccagcccgacaccatcagcatcgccagcagaaccagccagaacaccgtggacagcgacaaggacggcaacctggtgcccagatggcacctgggccccggcgaccccttcagcacctacgtgtag

SEQ ID NO: 85924 - DNA, 3870 bp, synthetic construct
  misc_feature 1..3870: note = Description of Artificial Sequence: Synthetic coding sequence
  source 1..3870: mol_type = other DNA
atgaagggcggcgacagagcctacaccagaggccccagcctgggctggctgttcgccaagtgctgctgctgcttcccctgcagagacgcctacagccacagcagcagcgagaacggcggcaagagcgagagcgtggccaacctgcaggcccagcccagcctgaacagcatccacagcagccccggccccaagagaagcaccaacaccctgaagaagtggctgaccagccccgtgagaagactgaacagcggcaaggccgacggcaacatcaagaagcagaagaaggtgagagacggcagaaagagcttcgacctgggcagccccaagcccggcgacgagaccaccccccagggcgacagcgccgacgagaagagcaagaagggctggggcgaggacgagcccgacgaggagagccacacccccctgcccccccccatgaagatcttcgacaacgaccccacccaggacgagatgagcagcagcctgctggccgccagacaggccagcaccgaggtgcccaccgccgccgacctggtgaacgccatcgagaagctggtgaagaacaagctgagcctggagggcagcagctacagaggcagcctgaaggaccccgccggctgcctgaacgagggcatggccccccccaccccccccaagaaccccgaggaggagcagaaggccaaggccctgagaggcagaatgttcgtgctgaacgagctggtgcagaccgagaaggactacgtgaaggacctgggcatcgtggtggagggcttcatgaagagaatcgaggagaagggcgtgcccgaggacatgagaggcaaggacaagatcgtgttcggcaacatccaccagatctacgactggcacaaggacttcttcctggccgagctggagaagtgcatccaggagcaggacagactggcccagctgttcatcaagcacgagagaaagctgcacatctacgtgtggtactgccagaacaagcccagaagcgagtacatcgtggccgagtacgacgcctacttcgaggaggtgaagcaggagatcaaccagagactgaccctgagcgacttcctgatcaagcccatccagagaatcaccaagtaccagctgctgctgaaggacttcctgagatacagcgagaaggccggcctggagtgcagcgacatcgagaaggccgtggagctgatgtgcctggtgcccaagagatgcaacgacatgatgaacctgggcagactgcagggcttcgagggcaccctgaccgcccagggcaagctgctgcagcaggacaccttctacgtgatcgagctggacgccggcatgcagagcagaaccaaggagagaagagtgttcctgttcgagcagatcgtgatcttcagcgagctgctgagaaagggcagcctgacccccggctacatgttcaagagaagcatcaagatgaactacctggtgctggaggagaacgtggacaacgacccctgcaagttcgccctgatgaacagagagaccagcgagagagtggtgctgcaggccgccaacgccgacatccagcaggcctgggtgcaggacatcaaccaggtgctggagacccagagagacttcctgaacgccctgcagagccccatcgagtaccagagaaaggagagaagcaccgccgtgatgagaagccagcccgccagactgccccaggccagccccagaccctacagcagcgtgcccgccggcagcgagaagccccccaagggcagcagctacaacccccccctgccccccctgaagatcagcaccagcaacggcagccccggcttcgagtaccaccagcccggcgacaagttcgaggccagcaagcagaacgacctgggcggctgcaacggcaccagcagcatggccgtgatcaaggactactacgccctgaaggagaacgagatctgcgtgagccagggcgaggtggtgcaggtgctggccgtgaaccagcagaacatgtgcctggtgtaccagcccgccagcgaccacagccccgccgccgagggctgggtgcccggcagcatcctggcccccctgaccaaggccaccgccgccgagagcagcgacggcagcatcaagaagagctgcagctggcacaccctgagaatgagaaagagagccgaggtggagaacaccggcaagaacgaggccaccggccccagaaagcccaaggacatcctgggcaacaaggtgagcgtgaaggagaccaacagcagcgaggagagcgagtgcgacgacctggaccccaacaccagcatggagatcctgaaccccaacttcatccaggaggtggcccccgagttcctggtgcccctggtggacgtgacctgcctgctgggcgacaccgtgatcctgcagtgcaaggtgtgcggcagacccaagcccaccatcacctggaagggccccgaccagaacatcctggacaccgacaacagcagcgccacctacaccgtgagcagctgcgacagcggcgagatcaccctgaagatctgcaacctgatgccccaggacagcggcatctacacctgcatcgccaccaacgaccacggcaccaccagcaccagcgccaccgtgaaggtgcagggcgtgcccgccgcccccaacagacccatcgcccaggagagaagctgcaccagcgtgatcctgagatggctgccccccagcagcaccggcaactgcaccatcagcggctacaccgtggagtacagagaggagggcagccagatctggcagcagagcgtggccagcaccctggacacctacctggtgatcgaggacctgagccccggctgcccctaccagttcagagtgagcgccagcaacccctggggcatcagcctgcccagcgagcccagcgagttcgtgagactgcccgagtacgacgccgccgccgacggcgccaccatcagctggaaggagaacttcgacagcgcctacaccgagctgaacgagatcggcagaggcagattcagcatcgtgaagaagtgcatccacaaggccaccagaaaggacgtggccgtgaagttcgtgagcaagaagatgaagaagaaggagcaggccgcccacgaggccgccctgctgcagcacctgcagcacccccagtacatcaccctgcacgacacctacgagagccccaccagctacatcctgatcctggagctgatggacgacggcagactgctggactacctgatgaaccacgacgagctgatggaggagaaggtggccttctacatcagagacatcatggaggccctgcagtacctgcacaactgcagagtggcccacctggacatcaagcccgagaacctgctgatcgacctgagaatccccgtgcccagagtgaagctgatcgacctggaggacgccgtgcagatcagcggccacttccacatccaccacctgctgggcaaccccgagttcgccgcccccgaggtgatccagggcatccccgtgagcctgggcaccgacatctggagcatcggcgtgctgacctacgtgatgctgagcggcgtgagccccttcctggacgagagcaaggaggagacctgcatcaacgtgtgcagagtggacttcagcttcccccacgagtacttctgcggcgtgagcaacgccgccagagacttcatcaacgtgatcctgcaggaggacttcagaagaagacccaccgccgccacctgcctgcagcacccctggctgcagccccacaacggcagctacagcaagatccccctggacaccagcagactggcctgcttcatcgagagaagaaagcaccagaacgacgtgagacccatccccaacgtgaagagctacatcgtgaacagagtgaaccagggcacctag

SEQ ID NO: 85925 - DNA, 8961 bp, synthetic construct
  misc_feature 1..8961: note = Description of Artificial Sequence: Synthetic coding sequence
  source 1..8961: mol_type = other DNA
atgaccgacagattctgggaccagtggtacctgtggtacctgagactgctgagactgctggacagaggcagcttcagaaacgacggcctgaaggccagcgacgtgctgcccatcctgaaggagaaggtggccttcgtgagcggcggcagagacaagagaggcggccccatcctgaccttccccgccagaagcaaccacgacagaatcagacaggaggacctgagaaagctggtgacctacctggccagcgtgcccagcgaggacgtgtgcaagagaggcttcaccgtgatcatcgacatgagaggcagcaagtgggacctgatcaagcccctgctgaagaccctgcaggaggccttccccgccgagatccacgtggccctgatcatcaagcccgacaacttctggcagaagcagaagaccaacttcggcagcagcaagttcatcttcgagaccagcatggtgagcgtggagggcctgaccaagctggtggaccccagccagctgaccgaggagttcgacggcagcctggactacaaccacgaggagtggatcgagctgagactgagcctggaggagttcttcaacagcgccgtgcacctgctgagcagactggaggacctgcaggagatgctggccagaaaggagttccccgtggacgtggagggcagcagaagactgatcgacgagcacacccagctgaagaagaaggtgctgaaggcccccgtggaggagctggacagagagggccagagactgctgcagtgcatcagatgcagcgacggcttcagcggcagaaactgcatccccggcagcgccgacttccagagcctggtgcccaagatcaccagcctgctggacaagctgcacagcaccagacagcacctgcaccagatgtggcacgtgagaaagctgaagctggaccagtgcttccagctgagactgttcgagcaggacgccgagaagatgttcgactggatcagccacaacaaggagctgttcctgcagagccacaccgagatcggcgtgagctaccagtacgccctggacctgcagacccagcacaaccacttcgccatgaacagcatgaacgcctacgtgaacatcaacagaatcatgagcgtggccagcagactgagcgaggccggccactacgccagccagcagatcaagcagatcagcacccagctggaccaggagtggaagagcttcgccgccgccctggacgagagaagcaccatcctggccatgagcgccgtgttccaccagaaggccgagcagttcctgagcggcgtggacgcctggtgcaagatgtgcagcgagggcggcctgcccagcgagatgcaggacctggagctggccatccaccaccaccagaccctgtacgagcaggtgacccaggcctacaccgaggtgagccaggacggcaaggccctgctggacgtgctgcagagacccctgagccccggcaacagcgagagcctgaccgccaccgccaactacagcaaggccgtgcaccaggtgctggacgtggtgcacgaggtgctgcaccaccagagaagactggagagcatctggcagcacagaaaggtgagactgcaccagagactgcagctgtgcgtgttccagcaggacgtgcagcaggtgctggactggatcgagaaccacggcgaggccttcctgagcaagcacaccggcgtgggcaagagcctgcacagagccagagccctgcagaagagacacgacgacttcgaggaggtggcccagaacacctacaccaacgccgacaagctgctggaggccgccgagcagctggcccagaccggcgagtgcgaccccgaggagatctacaaggccgccagacacctggaggtgagaatccaggacttcgtgagaagagtggagcagagaaagctgctgctggacatgagcgtgagcttccacacccacaccaaggagctgtggacctggatggaggacctgcagaaggagatgctggaggacgtgtgcgccgacagcgtggacgccgtgcaggagctgatcaagcagttccagcagcagcagaccgccaccctggacgccaccctgaacgtgatcaaggagggcgaggacctgatccagcagctgagaagcgccccccccagcctgggcgagcccagcgaggccagagacagcgccgtgagcaacaacaagaccccccacagcagcagcatcagccacatcgagagcgtgctgcagcagctggacgacgcccaggtgcagatggaggagctgttccacgagagaaagatcaagctggacatcttcctgcagctgagaatcttcgagcagtacaccatcgaggtgaccgccgagctggacgcctggaacgaggacctgctgagacagatgaacgacttcaacaccgaggacctgaccctggccgagcagagactgcagagacacaccgagagaaagctggccatgaacaacatgaccttcgaggtgatccagcagggccaggacctgcaccagtacatcaccgaggtgcaggccagcggcatcgagctgatctgcgagaaggacatcgacctggccgcccaggtgcaggagctgctggagttcctgcacgagaagcagcacgagctggagctgaacgccgagcagacccacaagagactggagcagtgcctgcagctgagacacctgcaggccgaggtgaagcaggtgctgggctggatcagaaacggcgagagcatgctgaacgccagcctggtgaacgccagcagcctgagcgaggccgagcagctgcagagagagcacgagcagttccagctggccatcgagagcctgttccacgccaccagcctgcagaagacccaccagagcgccctgcaggtgcagcagaaggccgaggtgctgctgcaggccggccactacgacgccgacgccatcagagagtgcgccgagaaggtggccctgcactggcagcagctgatgctgaagatggaggacagactgaagctggtgaacgccagcgtggccttctacaagaccagcgagcaggtgtgcagcgtgctggagagcctggagcaggagtacagaagagacgaggactggtgcggcggcagagacaagctgggccccgccgccgagatcgaccacgtgatccccctgatcagcaagcacctggagcagaaggaggccttcctgaaggcctgcaccctggccagaagaaacgccgaggtgttcctgaagtacatccacagaaacaacgtgagcatgcccagcgtggccagccacaccagaggccccgagcagcaggtgaaggccatcctgagcgagctgctgcagagagagaacagagtgctgcacttctggaccctgaagaagagaagactggaccagtgccagcagtacgtggtgttcgagagaagcgccaagcaggccctggactggatccaggagaccggcgagttctacctgagcacccacaccagcaccggcgagaccaccgaggagacccaggagctgctgaaggagtacggcgagttcagagtgcccgccaagcagaccaaggagaaggtgaagctgctgatccagctggccgacagcttcgtggagaagggccacatccacgccaccgagatcagaaagtgggtgaccaccgtggacaagcactacagagacttcagcctgagaatgggcaagtacagatacagcctggagaaggccctgggcgtgaacaccgaggacaacaaggacctggagctggacatcatccccgccagcctgagcgacagagaggtgaagctgagagacgccaaccacgaggtgaacgaggagaagagaaagagcgccagaaagaaggagttcatcatggccgagctgctgcagaccgagaaggcctacgtgagagacctgcacgagtgcctggagacctacctgtgggagatgaccagcggcgtggaggagatcccccccggcatcctgaacaaggagcacatcatcttcggcaacatccaggagatctacgacttccacaacaacatcttcctgaaggagctggagaagtacgagcagctgcccgaggacgtgggccactgcttcgtgacctgggccgacaagttccagatgtacgtgacctactgcaagaacaagcccgacagcaaccagctgatcctggagcacgccggcaccttcttcgacgagatccagcagagacacggcctggccaacagcatcagcagctacctgatcaagcccgtgcagagaatcaccaagtaccagctgctgctgaaggagctgctgacctgctgcgaggagggcaagggcgagctgaaggacggcctggaggtgatgctgagcgtgcccaagaaggccaacgacgccatgcacgtgagcatgctggagggcttcgacgagaacctggacgtgcagggcgagctgatcctgcaggacgccttccaggtgtgggaccccaagagcctgatcagaaagggcagagagagacacctgttcctgttcgagatcagcctggtgttcagcaaggagatcaaggacagcagcggccacaccaagtacgtgtacaagaacaagctgctgaccagcgagctgggcgtgaccgagcacgtggagggcgacccctgcaagttcgccctgtggagcggcagaacccccagcagcgacaacaagaccgtgctgaaggccagcaacatcgagaccaagcaggagtggatcaagaacatcagagaggtgatccaggagagaatcatccacctgaagggcgccctgaaggagcccctgcagctgcccaagacccccgccaagcagagaaacaacagcaagagagacggcgtggaggacatcgacagccagggcgacggcagcagccagcccgacaccatcagcatcgccagcagaaccagccagaacaccgtggacagcgacaagctgagcggcggctgcgagctgaccgtggtgctgcaggacttcagcgccggccacagcagcgagctgaccatccaggtgggccagaccgtggagctgctggagagacccagcgagagacccggctggtgcctggtgagaaccaccgagagaagcccccccctggagggcctggtgcccagcagcgccctgtgcatcagccacagcagaagcagcgtggagatggactgcttcttccccctggtgaaggacgcctacagccacagcagcagcgagaacggcggcaagagcgagagcgtggccaacctgcaggcccagcccagcctgaacagcatccacagcagccccggccccaagagaagcaccaacaccctgaagaagtggctgaccagccccgtgagaagactgaacagcggcaaggccgacggcaacatcaagaagcagaagaaggtgagagacggcagaaagagcttcgacctgggcagccccaagcccggcgacgagaccaccccccagggcgacagcgccgacgagaagagcaagaagggctggggcgaggacgagcccgacgaggagagccacacccccctgcccccccccatgaagatcttcgacaacgaccccacccaggacgagatgagcagcagcctgctggccgccagacaggccagcaccgaggtgcccaccgccgccgacctggtgaacgccatcgagaagctggtgaagaacaagctgagcctggagggcagcagctacagaggcagcctgaaggaccccgccggctgcctgaacgagggcatggccccccccaccccccccaagaaccccgaggaggagcagaaggccaaggccctgagaggcagaatgttcgtgctgaacgagctggtgcagaccgagaaggactacgtgaaggacctgggcatcgtggtggagggcttcatgaagagaatcgaggagaagggcgtgcccgaggacatgagaggcaaggacaagatcgtgttcggcaacatccaccagatctacgactggcacaaggacttcttcctggccgagctggagaagtgcatccaggagcaggacagactggcccagctgttcatcaagcacgagagaaagctgcacatctacgtgtggtactgccagaacaagcccagaagcgagtacatcgtggccgagtacgacgcctacttcgaggaggtgaagcaggagatcaaccagagactgaccctgagcgacttcctgatcaagcccatccagagaatcaccaagtaccagctgctgctgaaggacttcctgagatacagcgagaaggccggcctggagtgcagcgacatcgagaaggccgtggagctgatgtgcctggtgcccaagagatgcaacgacatgatgaacctgggcagactgcagggcttcgagggcaccctgaccgcccagggcaagctgctgcagcaggacaccttctacgtgatcgagctggacgccggcatgcagagcagaaccaaggagagaagagtgttcctgttcgagcagatcgtgatcttcagcgagctgctgagaaagggcagcctgacccccggctacatgttcaagagaagcatcaagatgaactacctggtgctggaggagaacgtggacaacgacccctgcaagttcgccctgatgaacagagagaccagcgagagagtggtgctgcaggccgccaacgccgacatccagcaggcctgggtgcaggacatcaaccaggtgctggagacccagagagacttcctgaacgccctgcagagccccatcgagtaccagagaaaggagagaagcaccgccgtgatgagaagccagcccgccagactgccccaggccagccccagaccctacagcagcgtgcccgccggcagcgagaagccccccaagggcagcagctacaacccccccctgccccccctgaagatcagcaccagcaacggcagccccggcttcgagtaccaccagcccggcgacaagttcgaggccagcaagcagaacgacctgggcggctgcaacggcaccagcagcatggccgtgatcaaggactactacgccctgaaggagaacgagatctgcgtgagccagggcgaggtggtgcaggtgctggccgtgaaccagcagaacatgtgcctggtgtaccagcccgccagcgaccacagccccgccgccgagggctgggtgcccggcagcatcctggcccccctgaccaaggccaccgccgccgagagcagcgacggcagcatcaagaagagctgcagctggcacaccctgagaatgagaaagagagccgaggtggagaacaccggcaagaacgaggccaccggccccagaaagcccaaggacatcctgggcaacaaggtgagcgtgaaggagaccaacagcagcgaggagagcgagtgcgacgacctggaccccaacaccagcatggagatcctgaaccccaacttcatccaggaggtggcccccgagttcctggtgcccctggtggacgtgacctgcctgctgggcgacaccgtgatcctgcagtgcaaggtgtgcggcagacccaagcccaccatcacctggaagggccccgaccagaacatcctggacaccgacaacagcagcgccacctacaccgtgagcagctgcgacagcggcgagatcaccctgaagatctgcaacctgatgccccaggacagcggcatctacacctgcatcgccaccaacgaccacggcaccaccagcaccagcgccaccgtgaaggtgcagggcgtgcccgccgcccccaacagacccatcgcccaggagagaagctgcaccagcgtgatcctgagatggctgccccccagcagcaccggcaactgcaccatcagcggctacaccgtggagtacagagaggagggcagccagatctggcagcagagcgtggccagcaccctggacacctacctggtgatcgaggacctgagccccggctgcccctaccagttcagagtgagcgccagcaacccctggggcatcagcctgcccagcgagcccagcgagttcgtgagactgcccgagtacgacgccgccgccgacggcgccaccatcagctggaaggagaacttcgacagcgcctacaccgagctgaacgagatcggcagaggcagattcagcatcgtgaagaagtgcatccacaaggccaccagaaaggacgtggccgtgaagttcgtgagcaagaagatgaagaagaaggagcaggccgcccacgaggccgccctgctgcagcacctgcagcacccccagtacatcaccctgcacgacacctacgagagccccaccagctacatcctgatcctggagctgatggacgacggcagactgctggactacctgatgaaccacgacgagctgatggaggagaaggtggccttctacatcagagacatcatggaggccctgcagtacctgcacaactgcagagtggcccacctggacatcaagcccgagaacctgctgatcgacctgagaatccccgtgcccagagtgaagctgatcgacctggaggacgccgtgcagatcagcggccacttccacatccaccacctgctgggcaaccccgagttcgccgcccccgaggtgatccagggcatccccgtgagcctgggcaccgacatctggagcatcggcgtgctgacctacgtgatgctgagcggcgtgagccccttcctggacgagagcaaggaggagacctgcatcaacgtgtgcagagtggacttcagcttcccccacgagtacttctgcggcgtgagcaacgccgccagagacttcatcaacgtgatcctgcaggaggacttcagaagaagacccaccgccgccacctgcctgcagcacccctggctgcagccccacaacggcagctacagcaagatccccctggacaccagcagactggcctgcttcatcgagagaagaaagcaccagaacgacgtgagacccatccccaacgtgaagagctacatcgtgaacagagtgaaccagggcacctag

SEQ ID NO: 85926 - DNA, 3774 bp, synthetic construct
  misc_feature 1..3774: note = Description of Artificial Sequence: Synthetic coding sequence
  source 1..3774: mol_type = other DNA
atgaagggcggcgacagagcctacaccagaggccccagcctgggctggctgttcgccaagtgctgctgctgcttcccctgcagagacgcctacagccacagcagcagcgagaacggcggcaagagcgagagcgtggccaacctgcaggcccagcccagcctgaacagcatccacagcagccccggccccaagagaagcaccaacaccctgaagaagtggctgaccagccccgtgagaagactgaacagcggcaaggccgacggcaacatcaagaagcagaagaaggtgagagacggcagaaagagcttcgacctgggcagccccaagcccggcgacgagaccaccccccagggcgacagcgccgacgagaagagcaagaagggctggggcgaggacgagcccgacgaggagagccacacccccctgcccccccccatgaagatcttcgacaacgaccccacccaggacgagatgagcctggagggcagcagctacagaggcagcctgaaggaccccgccggctgcctgaacgagggcatggccccccccaccccccccaagaaccccgaggaggagcagaaggccaaggccctgagaggcagaatgttcgtgctgaacgagctggtgcagaccgagaaggactacgtgaaggacctgggcatcgtggtggagggcttcatgaagagaatcgaggagaagggcgtgcccgaggacatgagaggcaaggacaagatcgtgttcggcaacatccaccagatctacgactggcacaaggacttcttcctggccgagctggagaagtgcatccaggagcaggacagactggcccagctgttcatcaagcacgagagaaagctgcacatctacgtgtggtactgccagaacaagcccagaagcgagtacatcgtggccgagtacgacgcctacttcgaggaggtgaagcaggagatcaaccagagactgaccctgagcgacttcctgatcaagcccatccagagaatcaccaagtaccagctgctgctgaaggacttcctgagatacagcgagaaggccggcctggagtgcagcgacatcgagaaggccgtggagctgatgtgcctggtgcccaagagatgcaacgacatgatgaacctgggcagactgcagggcttcgagggcaccctgaccgcccagggcaagctgctgcagcaggacaccttctacgtgatcgagctggacgccggcatgcagagcagaaccaaggagagaagagtgttcctgttcgagcagatcgtgatcttcagcgagctgctgagaaagggcagcctgacccccggctacatgttcaagagaagcatcaagatgaactacctggtgctggaggagaacgtggacaacgacccctgcaagttcgccctgatgaacagagagaccagcgagagagtggtgctgcaggccgccaacgccgacatccagcaggcctgggtgcaggacatcaaccaggtgctggagacccagagagacttcctgaacgccctgcagagccccatcgagtaccagagaaaggagagaagcaccgccgtgatgagaagccagcccgccagactgccccaggccagccccagaccctacagcagcgtgcccgccggcagcgagaagccccccaagggcagcagctacaacccccccctgccccccctgaagatcagcaccagcaacggcagccccggcttcgagtaccaccagcccggcgacaagttcgaggccagcaagcagaacgacctgggcggctgcaacggcaccagcagcatggccgtgatcaaggactactacgccctgaaggagaacgagatctgcgtgagccagggcgaggtggtgcaggtgctggccgtgaaccagcagaacatgtgcctggtgtaccagcccgccagcgaccacagccccgccgccgagggctgggtgcccggcagcatcctggcccccctgaccaaggccaccgccgccgagagcagcgacggcagcatcaagaagagctgcagctggcacaccctgagaatgagaaagagagccgaggtggagaacaccggcaagaacgaggccaccggccccagaaagcccaaggacatcctgggcaacaaggtgagcgtgaaggagaccaacagcagcgaggagagcgagtgcgacgacctggaccccaacaccagcatggagatcctgaaccccaacttcatccaggaggtggcccccgagttcctggtgcccctggtggacgtgacctgcctgctgggcgacaccgtgatcctgcagtgcaaggtgtgcggcagacccaagcccaccatcacctggaagggccccgaccagaacatcctggacaccgacaacagcagcgccacctacaccgtgagcagctgcgacagcggcgagatcaccctgaagatctgcaacctgatgccccaggacagcggcatctacacctgcatcgccaccaacgaccacggcaccaccagcaccagcgccaccgtgaaggtgcagggcgtgcccgccgcccccaacagacccatcgcccaggagagaagctgcaccagcgtgatcctgagatggctgccccccagcagcaccggcaactgcaccatcagcggctacaccgtggagtacagagaggagggcagccagatctggcagcagagcgtggccagcaccctggacacctacctggtgatcgaggacctgagccccggctgcccctaccagttcagagtgagcgccagcaacccctggggcatcagcctgcccagcgagcccagcgagttcgtgagactgcccgagtacgacgccgccgccgacggcgccaccatcagctggaaggagaacttcgacagcgcctacaccgagctgaacgagatcggcagaggcagattcagcatcgtgaagaagtgcatccacaaggccaccagaaaggacgtggccgtgaagttcgtgagcaagaagatgaagaagaaggagcaggccgcccacgaggccgccctgctgcagcacctgcagcacccccagtacatcaccctgcacgacacctacgagagccccaccagctacatcctgatcctggagctgatggacgacggcagactgctggactacctgatgaaccacgacgagctgatggaggagaaggtggccttctacatcagagacatcatggaggccctgcagtacctgcacaactgcagagtggcccacctggacatcaagcccgagaacctgctgatcgacctgagaatccccgtgcccagagtgaagctgatcgacctggaggacgccgtgcagatcagcggccacttccacatccaccacctgctgggcaaccccgagttcgccgcccccgaggtgatccagggcatccccgtgagcctgggcaccgacatctggagcatcggcgtgctgacctacgtgatgctgagcggcgtgagccccttcctggacgagagcaaggaggagacctgcatcaacgtgtgcagagtggacttcagcttcccccacgagtacttctgcggcgtgagcaacgccgccagagacttcatcaacgtgatcctgcaggaggacttcagaagaagacccaccgccgccacctgcctgcagcacccctggctgcagccccacaacggcagctacagcaagatccccctggacaccagcagactggcctgcttcatcgagagaagaaagcaccagaacgacgtgagacccatccccaacgtgaagagctacatcgtgaacagagtgaaccagggcacctag

SEQ ID NO: 85927 - DNA, 4965 bp, synthetic construct
  misc_feature 1..4965: note = Description of Artificial Sequence: Synthetic coding sequence
  source 1..4965: mol_type = other DNA
atgaccgacagattctgggaccagtggtacctgtggtacctgagactgctgagactgctggacagaggcagcttcagaaacgacggcctgaaggccagcgacgtgctgcccatcctgaaggagaaggtggccttcgtgagcggcggcagagacaagagaggcggccccatcctgaccttccccgccagaagcaaccacgacagaatcagacaggaggacctgagaaagctggtgacctacctggccagcgtgcccagcgaggacgtgtgcaagagaggcttcaccgtgatcatcgacatgagaggcagcaagtgggacctgatcaagcccctgctgaagaccctgcaggaggccttccccgccgagatccacgtggccctgatcatcaagcccgacaacttctggcagaagcagaagaccaacttcggcagcagcaagttcatcttcgagaccagcatggtgagcgtggagggcctgaccaagctggtggaccccagccagctgaccgaggagttcgacggcagcctggactacaaccacgaggagtggatcgagctgagactgagcctggaggagttcttcaacagcgccgtgcacctgctgagcagactggaggacctgcaggagatgctggccagaaaggagttccccgtggacgtggagggcagcagaagactgatcgacgagcacacccagctgaagaagaaggtgctgaaggcccccgtggaggagctggacagagagggccagagactgctgcagtgcatcagatgcagcgacggcttcagcggcagaaactgcatccccggcagcgccgacttccagagcctggtgcccaagatcaccagcctgctggacaagctgcacagcaccagacagcacctgcaccagatgtggcacgtgagaaagctgaagctggaccagtgcttccagctgagactgttcgagcaggacgccgagaagatgttcgactggatcagccacaacaaggagctgttcctgcagagccacaccgagatcggcgtgagctaccagtacgccctggacctgcagacccagcacaaccacttcgccatgaacagcatgaacgcctacgtgaacatcaacagaatcatgagcgtggccagcagactgagcgaggccggccactacgccagccagcagatcaagcagatcagcacccagctggaccaggagtggaagagcttcgccgccgccctggacgagagaagcaccatcctggccatgagcgccgtgttccaccagaaggccgagcagttcctgagcggcgtggacgcctggtgcaagatgtgcagcgagggcggcctgcccagcgagatgcaggacctggagctggccatccaccaccaccagaccctgtacgagcaggtgacccaggcctacaccgaggtgagccaggacggcaaggccctgctggacgtgctgcagagacccctgagccccggcaacagcgagagcctgaccgccaccgccaactacagcaaggccgtgcaccaggtgctggacgtggtgcacgaggtgctgcaccaccagagaagactggagagcatctggcagcacagaaaggtgagactgcaccagagactgcagctgtgcgtgttccagcaggacgtgcagcaggtgctggactggatcgagaaccacggcgaggccttcctgagcaagcacaccggcgtgggcaagagcctgcacagagccagagccctgcagaagagacacgacgacttcgaggaggtggcccagaacacctacaccaacgccgacaagctgctggaggccgccgagcagctggcccagaccggcgagtgcgaccccgaggagatctacaaggccgccagacacctggaggtgagaatccaggacttcgtgagaagagtggagcagagaaagctgctgctggacatgagcgtgagcttccacacccacaccaaggagctgtggacctggatggaggacctgcagaaggagatgctggaggacgtgtgcgccgacagcgtggacgccgtgcaggagctgatcaagcagttccagcagcagcagaccgccaccctggacgccaccctgaacgtgatcaaggagggcgaggacctgatccagcagctgagaagcgccccccccagcctgggcgagcccagcgaggccagagacagcgccgtgagcaacaacaagaccccccacagcagcagcatcagccacatcgagagcgtgctgcagcagctggacgacgcccaggtgcagatggaggagctgttccacgagagaaagatcaagctggacatcttcctgcagctgagaatcttcgagcagtacaccatcgaggtgaccgccgagctggacgcctggaacgaggacctgctgagacagatgaacgacttcaacaccgaggacctgaccctggccgagcagagactgcagagacacaccgagagaaagctggccatgaacaacatgaccttcgaggtgatccagcagggccaggacctgcaccagtacatcaccgaggtgcaggccagcggcatcgagctgatctgcgagaaggacatcgacctggccgcccaggtgcaggagctgctggagttcctgcacgagaagcagcacgagctggagctgaacgccgagcagacccacaagagactggagcagtgcctgcagctgagacacctgcaggccgaggtgaagcaggtgctgggctggatcagaaacggcgagagcatgctgaacgccagcctggtgaacgccagcagcctgagcgaggccgagcagctgcagagagagcacgagcagttccagctggccatcgagaagacccaccagagcgccctgcaggtgcagcagaaggccgaggtgctgctgcaggccggccactacgacgccgacgccatcagagagtgcgccgagaaggtggccctgcactggcagcagctgatgctgaagatggaggacagactgaagctggtgaacgccagcgtggccttctacaagaccagcgagcaggtgtgcagcgtgctggagagcctggagcaggagtacagaagagacgaggactggtgcggcggcagagacaagctgggccccgccgccgagatcgaccacgtgatccccctgatcagcaagcacctggagcagaaggaggccttcctgaaggcctgcaccctggccagaagaaacgccgaggtgttcctgaagtacatccacagaaacaacgtgagcatgcccagcgtggccagccacaccagaggccccgagcagcaggtgaaggccatcctgagcgagctgctgcagagagagaacagagtgctgcacttctggaccctgaagaagagaagactggaccagtgccagcagtacgtggtgttcgagagaagcgccaagcaggccctggactggatccaggagaccggcgagttctacctgagcacccacaccagcaccggcgagaccaccgaggagacccaggagctgctgaaggagtacggcgagttcagagtgcccgccaagcagaccaaggagaaggtgaagctgctgatccagctggccgacagcttcgtggagaagggccacatccacgccaccgagatcagaaagtgggtgaccaccgtggacaagcactacagagacttcagcctgagaatgggcaagtacagatacagcctggagaaggccctgggcgtgaacaccgaggacaacaaggacctggagctggacatcatccccgccagcctgagcgacagagaggtgaagctgagagacgccaaccacgaggtgaacgaggagaagagaaagagcgccagaaagaaggagttcatcatggccgagctgctgcagaccgagaaggcctacgtgagagacctgcacgagtgcctggagacctacctgtgggagatgaccagcggcgtggaggagatcccccccggcatcctgaacaaggagcacatcatcttcggcaacatccaggagatctacgacttccacaacaacatcttcctgaaggagctggagaagtacgagcagctgcccgaggacgtgggccactgcttcgtgacctgggccgacaagttccagatgtacgtgacctactgcaagaacaagcccgacagcaaccagctgatcctggagcacgccggcaccttcttcgacgagatccagcagagacacggcctggccaacagcatcagcagctacctgatcaagcccgtgcagagaatcaccaagtaccagctgctgctgaaggagctgctgacctgctgcgaggagggcaagggcgagctgaaggacggcctggaggtgatgctgagcgtgcccaagaaggccaacgacgccatgcacgtgagcatgctggagggcttcgacgagaacctggacgtgcagggcgagctgatcctgcaggacgccttccaggtgtgggaccccaagagcctgatcagaaagggcagagagagacacctgttcctgttcgagatcagcctggtgttcagcaaggagatcaaggacagcagcggccacaccaagtacgtgtacaagaacaagctgctgaccagcgagctgggcgtgaccgagcacgtggagggcgacccctgcaagttcgccctgtggagcggcagaacccccagcagcgacaacaagaccgtgctgaaggccagcaacatcgagaccaagcaggagtggatcaagaacatcagagaggtgatccaggagagaatcatccacctgaagggcgccctgaaggagcccctgcagctgcccaagacccccgccaagcagagaaacaacagcaagagagacggcgtggaggacatcgacagccagggcgacggcagcagccagcccgacaccatcagcatcgccagcagaaccagccagaacaccgtggacagcgacaaggacggcaacctggtgcccagatggcacctgggccccggcgaccccttcagcacctacgtgtag

SEQ ID NO: 85928 - DNA, 789 bp, synthetic construct
  misc_feature 1..789: note = Description of Artificial Sequence: Synthetic coding sequence
  source 1..789: mol_type = other DNA
atgtggttcctggtgctgtgcctggccctgagcctgggcggcaccggcgccgccccccccatccagagcagaatcgtgggcggctgggagtgcgagcagcacagccagccctggcaggccgccctgtaccacttcagcaccttccagtgcggcggcatcctggtgcacagacagtgggtgctgaccgccgcccactgcatcagcgacaactaccagctgtggctgggcagacacaacctgttcgacgacgagaacaccgcccagttcgtgcacgtgagcgagagcttcccccaccccggcttcaacatgagcctgctggagaaccacaccagacaggccgacgaggactacagccacgacctgatgctgctgagactgaccgagcccgccgacaccatcaccgacgccgtgaaggtggtggagctgcccaccgaggagcccgaggtgggcagcacctgcctggccagcggctggggcagcatcgagcccgagaacttcagcttccccgacgacctgcagtgcgtggacctgaagatcctgcccaacgacgagtgcaagaaggcccacgtgcagaaggtgaccgacttcatgctgtgcgtgggccacctggagggcggcaaggacacctgcgtgggcgacagcggcggccccctgatgtgcgacggcgtgctgcagggcgtgaccagctggggctacgtgccctgcggcacccccaacaagcccagcgtggccgtgagagtgctgagctacgtgaagtggatcgaggacaccatcgccgagaacagctag

SEQ ID NO: 85929 - DNA, 483 bp, synthetic construct
  misc_feature 1..483: note = Description of Artificial Sequence: Synthetic coding sequence
  source 1..483: mol_type = other DNA
atgagcctgctggagaaccacaccagacaggccgacgaggactacagccacgacctgatgctgctgagactgaccgagcccgccgacaccatcaccgacgccgtgaaggtggtggagctgcccaccgaggagcccgaggtgggcagcacctgcctggccagcggctggggcagcatcgagcccgagaacttcagcttccccgacgacctgcagtgcgtggacctgaagatcctgcccaacgacgagtgcaagaaggcccacgtgcagaaggtgaccgacttcatgctgtgcgtgggccacctggagggcggcaaggacacctgcgtgggcgacagcggcggccccctgatgtgcgacggcgtgctgcagggcgtgaccagctggggctacgtgccctgcggcacccccaacaagcccagcgtggccgtgagagtgctgagctacgtgaagtggatcgaggacaccatcgccgagaacagctag

SEQ ID NO: 85930 - DNA, 1917 bp, synthetic construct
  misc_feature 1..1917: note = Description of Artificial Sequence: Synthetic coding sequence
  source 1..1917: mol_type = other DNA
atgatcctgttcaagcaggccacctacttcatcagcctgttcgccaccgtgagctgcggctgcctgacccagctgtacgagaacgccttcttcagaggcggcgacgtggccagcatgtacacccccaacgcccagtactgccagatgagatgcaccttccaccccagatgcctgctgttcagcttcctgcccgccagcagcatcaacgacatggagaagagattcggctgcttcctgaaggacagcgtgaccggcaccctgcccaaggtgcacagaaccggcgccgtgagcggccacagcctgaagcagtgcggccaccagatcagcgcctgccacagagacatctacaagggcgtggacatgagaggcgtgaacttcaacgtgagcaaggtgagcagcgtggaggagtgccagaagagatgcaccagcaacatcagatgccagttcttcagctacgccacccagaccttccacaaggccgagtacagaaacaactgcctgctgaagtacagccccggcggcacccccaccgccatcaaggtgctgagcaacgtggagagcggcttcagcctgaagccctgcgccctgagcgagatcggctgccacatgaacatcttccagcacctggccttcagcgacgtggacgtggccagagtgctgacccccgacgccttcgtgtgcagaaccatctgcacctaccaccccaactgcctgttcttcaccttctacaccaacgtgtggaagatcgagagccagagaaacgtgtgcctgctgaagaccagcgagagcggcacccccagcagcagcaccccccaggagaacaccatcagcggctacagcctgctgacctgcaagagaaccctgcccgagccctgccacagcaagatctaccccggcgtggacttcggcggcgaggagctgaacgtgaccttcgtgaagggcgtgaacgtgtgccaggagacctgcaccaagatgatcagatgccagttcttcacctacagcctgctgcccgaggactgcaaggaggagaagtgcaagtgcttcctgagactgagcatggacggcagccccaccagaatcgcctacggcacccagggcagcagcggctacagcctgagactgtgcaacaccggcgacaacagcgtgtgcaccaccaagaccagcaccagaatcgtgggcggcaccaacagcagctggggcgagtggccctggcaggtgagcctgcaggtgaagctgaccgcccagagacacctgtgcggcggcagcctgatcggccaccagtgggtgctgaccgccgcccactgcttcgacggcctgcccctgcaggacgtgtggagaatctacagcggcatcctgaacctgagcgacatcaccaaggacacccccttcagccagatcaaggagatcatcatccaccagaactacaaggtgagcgagggcaaccacgacatcgccctgatcaagctgcaggcccccctgaactacaccgagttccagaagcccatctgcctgcccagcaagggcgacaccagcaccatctacaccaactgctgggtgaccggctggggcttcagcaaggagaagggcgagatccagaacatcctgcagaaggtgaacatccccctggtgaccaacgaggagtgccagaagagataccaggactacaagatcacccagagaatggtgtgcgccggctacaaggagggcggcaaggacgcctgcaagggcgacagcggcggccccctggtgtgcaagcacaacggcatgtggagactggtgggcatcaccagctggggcgagggctgcgccagaagagagcagcccggcgtgtacaccaaggtggccgagtacatggactggatcctggagaagacccagagcagcgacggcaaggcccagatgcagagccccgcctag

SEQ ID NO: 85931 - DNA, 1545 bp, synthetic construct
  misc_feature 1..1545: note = Description of Artificial Sequence: Synthetic coding sequence
  source 1..1545: mol_type = other DNA
atgtacacccccaacgcccagtactgccagatgagatgcaccttccaccccagatgcctgctgttcagcttcctgcccgccagcagcatcaacgacatggagaagagattcggctgcttcctgaaggacagcgtgaccggcaccctgcccaaggtgcacagaaccggcgccgtgagcggccacagcctgaagcagtgcggccaccagatcagcgcctgccacagagacatctacaagggcgtggacatgagaggcgtgaacttcaacgtgagcaaggtgagcagcgtggaggagtgccagaagagatgcaccagcaacatcagatgccagttcttcagctacgccacccagaccttccacaaggccgagtacagaaacaactgcctgctgaagtacagccccggcggcacccccaccgccatcaaggtgctgagcaacgtggagagcggcttcagcctgaagccctgcgccctgagcgagatcggctgccacatgaacatcttccagcacctggccttcagcgacgtggacgtggccagagtgctgacccccgacgccttcgtgtgcagaaccatctgcacctaccaccccaactgcctgttcttcaccttctacaccaacgtgtggaagatcgagagccagagaaacgtgtgcctgctgaagaccagcgagagcggcacccccagcagcagcaccccccaggagaacaccatcagcggctacagcctgctgacctgcaagagaaccctgcccgagccctgccacagcaagatctaccccggcgtggacttcggcggcgaggagctgaacgtgaccttcgtgaagggcgtgaacgtgtgccaggagacctgcaccaagatgatcagatgccagttcttcacctacagcctgctgcccgaggactgcaaggaggagaagtgcaagtgcttcctgagactgagcatggacggcagccccaccagaatcgcctacggcacccagggcagcagcggctacagcctgagactgtgcaacaccggcgacaacagcgtgtgcaccaccaagaccagcaccagaatcgtgggcggcaccaacagcagctggggcgagtggccctggcaggtgagcctgcaggtgaagctgaccgcccagagacacctgtgcggcggcagcctgatcggccaccagtgggtgctgaccgccgcccactgcttcgacggcctgcccctgcaggacgtgtggagaatctacagcggcatcctgaacctgagcgacatcaccaaggacacccccttcagccagatcaaggagatcatcatccaccagaactacaaggtgagcgagggcaaccacgacatcgccctgatcaagctgcaggcccccctgaactacaccgagttccagaagcccatctgcctgcccagcaagggcgacaccagcaccatctacaccaactgctgggtgaccggctggggcttcagcaaggagaagggcagattcagatggagcctgagcctgcagacccagtggaacgtggccttcggcggccaccaccagctgggctag

SEQ ID NO: 85932 - DNA, 447 bp, synthetic construct
  misc_feature 1..447: note = Description of Artificial Sequence: Synthetic coding sequence
  source 1..447: mol_type = other DNA
atgatcctgttcaagcaggccacctacttcatcagcctgttcgccaccgtgagctgcggctgcctgacccagctgtacgagaacgccttcttcagaggcggcgacgtggccagcatgtacacccccaacgcccagtactgccagatgagatgcaccttccaccccagatgcctgctgttcagcttcctgcccgccagcagcatcaacgacatggagaagagattcggctgcttcctgaaggacagcgtgaccggcaccctgcccaaggtgcacagaaccggcgccgtgagcggccacagcctgaagcagtgcggccaccagatcagcgcctgccacagagacatctacaagggcgtggacatgagaggcgtgaacttcaacgtgagcaaggtgagcagcgtggaggagtgccagaagagatgcaccagcaacatcagatgccagtag

SEQ ID NO: 85933 - DNA, 753 bp, synthetic construct
  misc_feature 1..753: note = Description of Artificial Sequence: Synthetic coding sequence
  source 1..753: mol_type = other DNA
atgagaatcctgcagctgatcctgctggccctggccaccggcctggtgggcggcgagaccagaatcatcaagggcttcgagtgcaagccccacagccagccctggcaggccgccctgttcgagaagaccagactgctgtgcggcgccaccctgatcgcccccagatggctgctgaccgccgcccactgcctgaagcccagatacatcgtgcacctgggccagcacaacctgcagaaggaggagggctgcgagcagaccagaaccgccaccgagagcttcccccaccccggcttcaacaacagcctgcccaacaaggaccacagaaacgacatcatgctggtgaagatggccagccccgtgagcatcacctgggccgtgagacccctgaccctgagcagcagatgcgtgaccgccggcaccagctgcctgatcagcggctggggcagcaccagcagcccccagctgagactgccccacaccctgagatgcgccaacatcaccatcatcgagcaccagaagtgcgagaacgcctaccccggcaacatcaccgacaccatggtgtgcgccagcgtgcaggagggcggcaaggacagctgccagggcgacagcggcggccccctggtgtgcaaccagagcctgcagggcatcatcagctggggccaggacccctgcgccatcaccagaaagcccggcgtgtacaccaaggtgtgcaagtacgtggactggatccaggagaccatgaagaacaactag

SEQ ID NO: 85934 - DNA, 849 bp, synthetic construct
  misc_feature 1..849: note = Description of Artificial Sequence: Synthetic coding sequence
  source 1..849: mol_type = other DNA
atgcagagactgagatggctgagagactggaagagcagcggcagaggcctgaccgccgccaaggagcccggcgccagaagcagccccctgcaggccatgagaatcctgcagctgatcctgctggccctggccaccggcctggtgggcggcgagaccagaatcatcaagggcttcgagtgcaagccccacagccagccctggcaggccgccctgttcgagaagaccagactgctgtgcggcgccaccctgatcgcccccagatggctgctgaccgccgcccactgcctgaagcccagatacatcgtgcacctgggccagcacaacctgcagaaggaggagggctgcgagcagaccagaaccgccaccgagagcttcccccaccccggcttcaacaacagcctgcccaacaaggaccacagaaacgacatcatgctggtgaagatggccagccccgtgagcatcacctgggccgtgagacccctgaccctgagcagcagatgcgtgaccgccggcaccagctgcctgatcagcggctggggcagcaccagcagcccccagctgagactgccccacaccctgagatgcgccaacatcaccatcatcgagcaccagaagtgcgagaacgcctaccccggcaacatcaccgacaccatggtgtgcgccagcgtgcaggagggcggcaaggacagctgccagggcgacagcggcggccccctggtgtgcaaccagagcctgcagggcatcatcagctggggccaggacccctgcgccatcaccagaaagcccggcgtgtacaccaaggtgtgcaagtacgtggactggatccaggagaccatgaagaacaactag

SEQ ID NO: 85935 - DNA, 828 bp, synthetic construct
  misc_feature 1..828: note = Description of Artificial Sequence: Synthetic coding sequence
  source 1..828: mol_type = other DNA
atgagaatcctgcagctgatcctgctggccctggccaccggcctggtgggcggcgagaccagaatcatcaagggcttcgagtgcaagccccacagccagccctggcaggccgccctgttcgagaagaccagactgctgtgcggcgccaccctgatcgcccccagatggctgctgaccgccgcccactgcctgaagccctgggtgagcctgaccagccccacccacgtgagccccgacctgagcagcagcaactactgcctgagccacctgagcagatacatcgtgcacctgggccagcacaacctgcagaaggaggagggctgcgagcagaccagaaccgccaccgagagcttcccccaccccggcttcaacaacagcctgcccaacaaggaccacagaaacgacatcatgctggtgaagatggccagccccgtgagcatcacctgggccgtgagacccctgaccctgagcagcagatgcgtgaccgccggcaccagctgcctgatcagcggctggggcagcaccagcagcccccagctgagactgccccacaccctgagatgcgccaacatcaccatcatcgagcaccagaagtgcgagaacgcctaccccggcaacatcaccgacaccatggtgtgcgccagcgtgcaggagggcggcaaggacagctgccagggcgacagcggcggccccctggtgtgcaaccagagcctgcagggcatcatcagctggggccaggacccctgcgccatcaccagaaagcccggcgtgtacaccaaggtgtgcaagtacgtggactggatccaggagaccatgaagaacaactag

SEQ ID NO: 85936 - DNA, 753 bp, synthetic construct; identical to SEQ ID NO: 85933
  misc_feature 1..753: note = Description of Artificial Sequence: Synthetic coding sequence
  source 1..753: mol_type = other DNA

SEQ ID NO: 85937 - DNA, 849 bp, synthetic construct; identical to SEQ ID NO: 85934
  misc_feature 1..849: note = Description of Artificial Sequence: Synthetic coding sequence
  source 1..849: mol_type = other DNA

SEQ ID NO: 85938 - DNA, 765 bp, synthetic construct
  misc_feature 1..765: note = Description of Artificial Sequence: Synthetic coding sequence
  source 1..765: mol_type = other DNA
atgggcctgagcatcttcctgctgctgtgcgtgctgggcctgagccaggccgccacccccaagatcttcaacggcaccgagtgcggcagaaacagccagccctggcaggtgggcctgttcgagggcaccagcctgagatgcggcggcgtgctgatcgaccacagatgggtgctgaccgccgcccactgcagcggcagcagatactgggtgagactgggcgagcacagcctgagccagctggactggaccgagcagatcagacacagcggcttcagcgtgacccaccccggctacctgggcgccagcaccagccacgagcacgacctgagactgctgagactgagactgcccgtgagagtgaccagcagcgtgcagcccctgcccctgcccaacgactgcgccaccgccggcaccgagtgccacgtgagcggctggggcatcaccaaccaccccagaaaccccttccccgacctgctgcagtgcctgaacctgagcatcgtgagccacgccacctgccacggcgtgtaccccggcagaatcaccagcaacatggtgtgcgccggcggcgtgcccggccaggacgcctgccagggcgacagcggcggccccctggtgtgcggcggcgtgctgcagggcctggtgagctggggcagcgtgggcccctgcggccaggacggcatccccggcgtgtacacctacatctgcaacagcaccctggtgggcctgggcaccagctggaacttcaacagctgccagcccttctag

SEQ ID NO: 85939 - DNA, 435 bp, synthetic construct
  misc_feature 1..435: note = Description of Artificial Sequence: Synthetic coding sequence
  source 1..435: mol_type = other DNA
atggccctgagcgtgggcgtgacccacagcagaggcagatggggctgcctgagagcccccgcctgcgccgccggcgtgagcctgctgaccaccggcggcagcagccagagactgaccgccgccgccgaccccttccccgacctgctgcagtgcctgaacctgagcatcgtgagccacgccacctgccacggcgtgtaccccggcagaatcaccagcaacatggtgtgcgccggcggcgtgcccggccaggacgcctgccagggcgacagcggcggccccctggtgtgcggcggcgtgctgcagggcctggtgagctggggcagcgtgggcccctgcggccaggacggcatccccggcgtgtacacctacatctgcaacagcaccctggtgggcctgggcaccagctggaacttcaacagctgccagcccttctag

SEQ ID NO: 85940 - DNA, 747 bp, synthetic construct
  misc_feature 1..747: note = Description of Artificial Sequence: Synthetic coding sequence
  source 1..747: mol_type = other DNA
atgggcctgagcatcttcctgctgctgtgcgtgctgggcctgagccaggccgccacccccaagatcttcaacggcaccgagtgcggcagaaacagccagccctggcaggtgggcctgttcgagggcaccagcctgagatgcggcggcgtgctgatcgaccacagatgggtgctgaccgccgcccactgcagcggcagcagatactgggtgagactgggcgagcacagcctgagccagctggactggaccgagcagatcagacacagcggcttcagcgtgacccaccccggctacctgggcgccagcaccagccacgagcacgacctgagactgctgagactgagactgcccgtgagagtgaccagcagcgtgcagcccctgcccctgcccaacgactgcgccaccgccggcaccgagtgccacgtgagcggctggggcatcaccaaccaccccagaaaccccttccccgacctgctgcagtgcctgaacctgagcatcgtgagccacgccacctgccacggcgtgtaccccggcagaatcaccagcaacatggtgtgcgccggcggcgtgcccggccaggacgcctgccagggcgacagcggcggccccctggtgtgcggcggcgtgctgcagggcctggtgagctggggcagcgtgggcccctgcggccaggacggcatccccggcgtgtacacctacatctgcaagtacgtggactggatcagaatgatcatgagaaacaactag

SEQ ID NO: 85941 - DNA, 747 bp, synthetic construct; identical to SEQ ID NO: 85940
  misc_feature 1..747: note = Description of Artificial Sequence: Synthetic coding sequence
  source 1..747: mol_type = other DNA

SEQ ID NO: 85942 - DNA, 336 bp, synthetic construct
  misc_feature 1..336: note = Description of Artificial Sequence: Synthetic coding sequence
  source 1..336: mol_type = other DNA
atgggcctgagcatcttcctgctgctgtgcgtgctgggcctgagccaggccgccacccccaagatcttcaacggcaccgagtgcggcagaaacagccagccctggcaggtgggcctgttcgagggcaccagcctgagatgcggcggcgtgctgatcgaccacagatgggtgctgaccgccgcccactgcagcggcagacccatccccggcagcgcccccgtgccccagcccctgcacagactgccctgccacctgccctggtgcgtgagcagagagaaccacgagcagcacggcgtgtgcagaagaagacccggcgccggctgcctgcccggctag

SEQ ID NO: 85943 - DNA, 834 bp, synthetic construct
  misc_feature 1..834: note = Description of Artificial Sequence: Synthetic coding sequence
  source 1..834: mol_type = other DNA
atgtggcccctggccctggtgatcgccagcctgaccctggccctgagcggcggcgtgagccaggagagcagcaaggtgctgaacaccaacggcaccagcggcttcctgcccggcggctacacctgcttcccccacagccagccctggcaggccgccctgctggtgcagggcagactgctgtgcggcggcgtgctggtgcaccccaagtgggtgctgaccgccgcccactgcctgaaggagggcctgaaggtgtacctgggcaagcacgccctgggcagagtggaggccggcgagcaggtgagagaggtggtgcacagcatcccccaccccgagtacagaagaagccccacccacctgaaccacgaccacgacatcatgctgctggagctgcagagccccgtgcagctgaccggctacatccagaccctgcccctgagccacaacaacagactgacccccggcaccacctgcagagtgagcggctggggcaccaccaccagcccccaggtgaactaccccaagaccctgcagtgcgccaacatccagctgagaagcgacgaggagtgcagacaggtgtaccccggcaagatcaccgacaacatgctgtgcgccggcaccaaggagggcggcaaggacagctgcgagggcgacagcggcggccccctggtgtgcaacagaaccctgtacggcatcgtgagctggggcgacttcccctgcggccagcccgacagacccggcgtgtacaccagagtgagcagatacgtgctgtggatcagagagaccatcagaaagtacgagacccagcagcagaagtggctgaagggcccccagtag

SEQ ID NO: 85944 - DNA, 378 bp, synthetic construct
  misc_feature 1..378: note = Description of Artificial Sequence: Synthetic coding sequence
  source 1..378: mol_type = other DNA
atgtggcccctggccctggtgatcgccagcctgaccctggccctgagcggcgtgaactaccccaagaccctgcagtgcgccaacatccagctgagaagcgacgaggagtgcagacaggtgtaccccggcaagatcaccgacaacatgctgtgcgccggcaccaaggagggcggcaaggacagctgcgagggcgacagcggcggccccctggtgtgcaacagaaccctgtacggcatcgtgagctggggcgacttcccctgcggccagcccgacagacccggcgtgtacaccagagtgagcagatacgtgctgtggatcagagagaccatcagaaagtacgagacccagcagcagaagtggctgaagggcccccagtag

SEQ ID NO: 85945 - DNA, 297 bp, synthetic construct
  misc_feature 1..297: note = Description of Artificial Sequence: Synthetic coding sequence
  source 1..297: mol_type = other DNA
atgggcctgatctacaagtgcctgcccgagaaggtgaccgtgaacatcgagaccagatgcctgcccggcgtgttccagggcagccagcaccagtgggaccagtgggtgagccccagatggctgcacctgctgccccccctgagcgccctggccggctgccccaccagcgccagagccgccaccctgtggggcagccccggccccccccagatgggcccccactgcagaaccctgagcaagggcggcgcccagagcctgcccagacaggccagacccagagcctgcggcagctggtag

SEQ ID NO: 85946 - DNA, 282 bp, synthetic construct
  misc_feature 1..282: note = Description of Artificial Sequence: Synthetic coding sequence
  source 1..282: mol_type = other DNA
atgtggcccctggccctggtgatcgccagcctgaccctggccctgagcggcggcgaggacttcaaggagcccagccagggccccagagacgtgatggccgccagcagacccgaggccttccccaagggcctgaccctggagcccagacccgagaagggcggcatctgcggctgcctggcccccggcaccatcctgggcctgaaggtgggctggctgttcagcagcggcgacaccccctggatccacgccagagccacccccgagtgccacaccctgggctag

SEQ ID NO: 85947 - DNA, 834 bp, synthetic construct; identical to SEQ ID NO: 85943
  misc_feature 1..834: note = Description of Artificial Sequence: Synthetic coding sequence
  source 1..834: mol_type = other DNA

SEQ ID NO: 85948 - DNA, 804 bp, synthetic construct
  misc_feature 1..804: note = Description of Artificial Sequence: Synthetic coding sequence
  source 1..804: mol_type = other DNA
atgagcctgagagtgctgggcagcggcacctggcccagcgcccccaagatgttcctgctgctgaccgccctgcaggtgctggccatcgccatgacccagagccaggaggacgagaacaagatcatcggcggccacacctgcaccagaagcagccagccctggcaggccgccctgctggccggccccagaagaagattcctgtgcggcggcgccctgctgagcggccagtgggtgatcaccgccgcccactgcggcagacccatcctgcaggtggccctgggcaagcacaacctgagaagatgggaggccacccagcaggtgctgagagtggtgagacaggtgacccaccccaactacaacagcagaacccacgacaacgacctgatgctgctgcagctgcagcagcccgccagaatcggcagagccgtgagacccatcgaggtgacccaggcctgcgccagccccggcaccagctgcagagtgagcggctggggcaccatcagcagccccatcgccagataccccgccagcctgcagtgcgtgaacatcaacatcagccccgacgaggtgtgccagaaggcctaccccagaaccatcacccccggcatggtgtgcgccggcgtgccccagggcggcaaggacagctgccagggcgacagcggcggccccctggtgtgcagaggccagctgcagggcctggtgagctggggcatggagagatgcgccctgcccggctaccccggcgtgtacaccaacctgtgcaagtacagaagctggatcgaggagaccatgagagacaagtag

SEQ ID NO: 85949 - DNA, 804 bp, synthetic construct; identical to SEQ ID NO: 85948
  misc_feature 1..804: note = Description of Artificial Sequence: Synthetic coding sequence
  source 1..804: mol_type = other DNA

SEQ ID NO: 85950 - DNA, 804 bp, synthetic construct; identical to SEQ ID NO: 85948
  misc_feature 1..804: note = Description of Artificial Sequence: Synthetic coding sequence
  source 1..804: mol_type = other DNA

SEQ ID NO: 85951 - DNA, 486 bp, synthetic construct
  misc_feature 1..486: note = Description of Artificial Sequence: Synthetic coding sequence
  source 1..486: mol_type = other DNA
atgtggctgctgctgaccctgagcttcctgctggccagcaccgccgcccaggacggcgacaagctgctggagggcgacgagtgcgccccccacagccagccctggcaggtggccctgtacgagagaggcagattcaactgcggcgccagcctgatcagcccccactgggtgctgagcgccgcccactgccagagcagattcatgagagtgagactgggcgagcacaacctgagaaagagagacggccccgagcagctgagaaccaccagcagagtgatcccccaccccagatacgaggccagaagccacagaaacgacatcatgctgctgagactggtgcagcccgccagactgaacccccaggtgagacccgccgtgctgcccaccagatgcccccaccccggcgaggcctgcgtggtgagcggctggggcctggtgagccacaacgagcccggcaccgccggcagccccagaagccagggctag

SEQ ID NO: 85952 - DNA, 771 bp, synthetic construct
  misc_feature 1..771: note = Description of Artificial Sequence: Synthetic coding sequence
  source 1..771: mol_type = other DNA
atgtggctgctgctgaccctgagcttcctgctggccagcaccgccgcccaggacggcgacaagctgctggagggcgacgagtgcgccccccacagccagccctggcaggtggccctgtacgagagaggcagattcaactgcggcgccagcctgatcagcccccactgggtgctgagcgccgcccactgccagagcagattcatgagagtgagactgggcgagcacaacctgagaaagagagacggccccgagcagctgagaaccaccagcagagtgatcccccaccccagatacgaggccagaagccacagaaacgacatcatgctgctgagactggtgcagcccgccagactgaacccccaggtgagacccgccgtgctgcccaccagatgcccccaccccggcgaggcctgcgtggtgagcggctggggcctggtgagccacaacgagcccggcaccgccggcagccccagaagccaggtgagcctgcccgacaccctgcactgcgccaacatcagcatcatcagcgacaccagctgcgacaagagctaccccggcagactgaccaacaccatggtgtgcgccggcgccgagggcagaggcgccgagagctgcgagggcgacagcggcggccccctggtgtgcggcggcatcctgcagggcatcgtgagctggggcgacgtgccctgcgacaacaccaccaagcccggcgtgtacaccaaggtgtgccactacctggagtggatcagagagaccatgaagagaaactag

SEQ ID NO: 85953 - DNA, 516 bp, synthetic construct
  misc_feature 1..516: note = Description of Artificial Sequence: Synthetic coding sequence
  source 1..516: mol_type = other DNA
atgtggctgctgctgaccctgagcttcctgctggccagcaccgccgcccaggacggcgacaagctgctggagggcgacgagtgcgccccccacagccagccctggcaggtggccctgtacgagagaggcagattcaactgcggcgccagcctgatcagcccccactgggtgctgagcgccgcccactgccagagcagattcatgagagtgagactgggcgagcacaacctgagaaagagagacggccccgagcagctgagaaccaccagcagagtgatcccccaccccagatacgaggccagaagccacagaaacgacatcatgctgctgagactggtgcagcccgccagactgaacccccagggcgacagcggcggccccctggtgtgcggcggcatcctgcagggcatcgtgagctggggcgacgtgccctgcgacaacaccaccaagcccggcgtgtacaccaaggtgtgccactacctggagtggatcagagagaccatgaagagaaactag

SEQ ID NO: 85954 - DNA, 489 bp, synthetic construct
  misc_feature 1..489: note = Description of Artificial Sequence: Synthetic coding sequence
  source 1..489: mol_type = other DNA
atgtggctgctgctgaccctgagcttcctgctggccagcaccgccgcccaggacggcgacaagctgctggagggcgacgagtgcgccccccacagccagccctggcaggtggccctgtacgagagaggcagattcaactgcggcgccagcctgatcagcccccactgggtgctgagcgccgcccactgccagagcagattcatgagagtgagactgggcgagcacaacctgagaaagagagacggccccgagcagctgagaaccaccagcagagtgatcccccaccccagatacgaggccagaagccacagaaacgacatcatgctgctgagactggtgcagcccgccagactgaacccccaggtgagacccgccgtgctgcccaccagatgcccccaccccggcgaggcctgcgtggtgagcggctggggcctggtgagccacaacgagcccggcaccgccggcagccccagaagccagggcgcctag

SEQ ID NO: 85955 - DNA, 771 bp, synthetic construct; identical to SEQ ID NO: 85952
  misc_feature 1..771: note = Description of Artificial Sequence: Synthetic coding sequence
  source 1..771: mol_type = other DNA

SEQ ID NO: 85956 - DNA, 786 bp, synthetic construct
  misc_feature 1..786: note = Description of Artificial Sequence: Synthetic coding sequence
  source 1..786: mol_type = other DNA
atgtgggacctggtgctgagcatcgccctgagcgtgggctgcaccggcgccgtgcccctgatccagagcagaatcgtgggcggctgggagtgcgagaagcacagccagccctggcaggtggccgtgtacagccacggctgggcccactgcggcggcgtgctggtgcacccccagtgggtgctgaccgccgcccactgcctgaagaagaacagccaggtgtggctgggcagacacaacctgttcgagcccgaggacaccggccagagagtgcccgtgagccacagcttcccccaccccctgtacaacatgagcctgctgaagcaccagagcctgagacccgacgaggacagcagccacgacctgatgctgctgagactgagcgagcccgccaagatcaccgacgtggtgaaggtgctgggcctgcccacccaggagcccgccctgggcaccacctgctacgccagcggctggggcagcatcgagcccgaggagttcctgagacccagaagcctgcagtgcgtgagcctgcacctgctgagcaacgacatgtgcgccagagcctacagcgagaaggtgaccgagttcatgctgtgcgccggcctgtggaccggcggcaaggacacctgcggcggcgacagcggcggccccctggtgtgcaacggcgtgctgcagggcatcaccagctggggccccgagccctgcgccctgcccgagaagcccgccgtgtacaccaaggtggtgcactacagaaagtggatcaaggacaccatcgccgccaacccctag

SEQ ID NO: 85957 - DNA, 672 bp, synthetic construct
  misc_feature 1..672: note = Description of Artificial Sequence: Synthetic coding sequence
  source 1..672: mol_type = other DNA
atgtgggacctggtgctgagcatcgccctgagcgtgggctgcaccggcgccgtgcccctgatccagagcagaatcgtgggcggctgggagtgcgagaagcacagccagccctggcaggtggccgtgtacagccacggctgggcccactgcggcggcgtgctggtgcacccccagtgggtgctgaccgccgcccactgcctgaagaagaacagccaggtgtggctgggcagacacaacctgttcgagcccgaggacaccggccagagagtgcccgtgagccacagcttcccccaccccctgtacaacatgagcctgctgaagcaccagagcctgagacccgacgaggacagcagccacgacctgatgctgctgagactgagcgagcccgccaagatcaccgacgtggtgaaggtgctgggcctgcccacccaggagcccgccctgggcaccacctgctacgccagcggctggggcagcatcgagcccgaggagttcctgagacccagaagcctgcagtgcgtgagcctgcacctgctgagcaacgacatgtgcgccagagcctacagcgagaaggtgaccgagttcatgctgtgcgccggcctgtggaccggcggcaaggacacctgcggcgtgagccacccctacagccagcacctggagggcaagggctag

SEQ ID NO: 85958 - DNA, 480 bp, synthetic construct
  misc_feature 1..480: note = Description of Artificial Sequence: Synthetic coding sequence
  source 1..480: mol_type = other DNA
atgagcctgctgaagcaccagagcctgagacccgacgaggacagcagccacgacctgatgctgctgagactgagcgagcccgccaagatcaccgacgtggtgaaggtgctgggcctgcccacccaggagcccgccctgggcaccacctgctacgccagcggctggggcagcatcgagcccgaggagttcctgagacccagaagcctgcagtgcgtgagcctgcacctgctgagcaacgacatgtgcgccagagcctacagcgagaaggtgaccgagttcatgctgtgcgccggcctgtggaccggcggcaaggacacctgcggcggcgacagcggcggccccctggtgtgcaacggcgtgctgcagggcatcaccagctggggccccgagccctgcgccctgcccgagaagcccgccgtgtacaccaaggtggtgcactacagaaagtggatcaaggacaccatcgccgccaacccctag

SEQ ID NO: 85959 - DNA, 786 bp, synthetic construct
  misc_feature 1..786: note = Description of Artificial Sequence: Synthetic coding sequence
  source 1..786: mol_type = other DNA
atgtgggtgcccgtggtgttcctgaccctgagcgtgacctggatcggcgccgcccccctgatcctgagcagaatcgtgggcggctgggagtgcgagaagcacagccagccctggcaggtgctggtggccagcagaggcagagccgtgtgcggcggcgtgctggtgcacccccagtgggtgctgaccgccgcccactgcatcagaaacaagagcgtgatcctgctgggcagacacagcctgttccaccccgaggacaccggccaggtgttccaggtgagccacagcttcccccaccccctgtacgacatgagcctgctgaagaacagattcctgagacccggcgacgacagcagccacgacctgatgctgctgagactgagcgagcccgccgagctgaccgacgccgtgaaggtgatggacctgcccacccaggagcccgccctgggcaccacctgctacgccagcggctggggcagcatcgagcccgaggagttcctgacccccaagaagctgcagtgcgtggacctgcacgtgatcagcaacgacgtgtgcgcccaggtgcacccccagaaggtgaccaagttcatgctgtgcgccggcagatggaccggcggcaagagcacctgcagcggcgacagcggcggccccctggtgtgcaacggcgtgctgcagggcatcaccagctggggcagcgagccctgcgccctgcccgagagacccagcctgtacaccaaggtggtgcactacagaaagtggatcaaggacaccatcgtggccaacccctag

SEQ ID NO: 85960 - DNA, 663 bp, synthetic construct
  misc_feature 1..663: note = Description of Artificial Sequence: Synthetic coding sequence
  source 1..663: mol_type = other DNA
atgtgggtgcccgtggtgttcctgaccctgagcgtgacctggatcggcgccgcccccctgatcctgagcagaatcgtgggcggctgggagtgcgagaagcacagccagccctggcaggtgctggtggccagcagaggcagagccgtgtgcggcggcgtgctggtgcacccccagtgggtgctgaccgccgcccactgcatcagaaacaagagcgtgatcctgctgggcagacacagcctgttccaccccgaggacaccggccaggtgttccaggtgagccacagcttcccccaccccctgtacgacatgagcctgctgaagaacagattcctgagacccggcgacgacagcagcatcgagcccgaggagttcctgacccccaagaagctgcagtgcgtggacctgcacgtgatcagcaacgacgtgtgcgcccaggtgcacccccagaaggtgaccaagttcatgctgtgcgccggcagatggaccggcggcaagagcacctgcagcggcgacagcggcggccccctggtgtgcaacggcgtgctgcagggcatcaccagctggggcagcgagccctgcgccctgcccgagagacccagcctgtacaccaaggtggtgcactacagaaagtggatcaaggacaccatcgtggccaacccctag

SEQ ID NO: 85961 - DNA, 717 bp, synthetic construct
  misc_feature 1..717: note = Description of Artificial Sequence: Synthetic coding sequence
  source 1..717: mol_type = other DNA
atgtgggtgcccgtggtgttcctgaccctgagcgtgacctggatcggcgccgcccccctgatcctgagcagaatcgtgggcggctgggagtgcgagaagcacagccagccctggcaggtgctggtggccagcagaggcagagccgtgtgcggcggcgtgctggtgcacccccagtgggtgctgaccgccgcccactgcatcagaaacaagagcgtgatcctgctgggcagacacagcctgttccaccccgaggacaccggccaggtgttccaggtgagccacagcttcccccaccccctgtacgacatgagcctgctgaagaacagattcctgagacccggcgacgacagcagccacgacctgatgctgctgagactgagcgagcccgccgagctgaccgacgccgtgaaggtgatggacctgcccacccaggagcccgccctgggcaccacctgctacgccagcggctggggcagcatcgagcccgaggagttcctgacccccaagaagctgcagtgcgtggacctgcacgtgatcagcaacgacgtgtgcgcccaggtgcacccccagaaggtgaccaagttcatgctgtgcgccggcagatggaccggcggcaagagcacctgcagctgggtgatcctgatcaccgagctgaccatgcccgccctgcccatggtgctgcacggcagcctggtgccctggagaggcggcgtgtag

SEQ ID NO: 85962 - DNA, 657 bp, synthetic construct
  misc_feature 1..657: note = Description of Artificial Sequence: Synthetic coding sequence
  source 1..657: mol_type = other DNA
atgtgggtgcccgtggtgttcctgaccctgagcgtgacctggatcggcgccgcccccctgatcctgagcagaatcgtgggcggctgggagtgcgagaagcacagccagccctggcaggtgctggtggccagcagaggcagagccgtgtgcggcggcgtgctggtgcacccccagtgggtgctgaccgccgcccactgcatcagaaagcccggcgacgacagcagccacgacctgatgctgctgagactgagcgagcccgccgagctgaccgacgccgtgaaggtgatggacctgcccacccaggagcccgccctgggcaccacctgctacgccagcggctggggcagcatcgagcccgaggagttcctgacccccaagaagctgcagtgcgtggacctgcacgtgatcagcaacgacgtgtgcgcccaggtgcacccccagaaggtgaccaagttcatgctgtgcgccggcagatggaccggcggcaagagcacctgcagcggcgacagcggcggccccctggtgtgcaacggcgtgctgcagggcatcaccagctggggcagcgagccctgcgccctgcccgagagacccagcctgtacaccaaggtggtgcactacagaaagtggatcaaggacaccatcgtggccaacccctag

SEQ ID NO: 85963 - DNA, 210 bp, synthetic construct
  misc_feature 1..210: note = Description of Artificial Sequence: Synthetic coding sequence
  source 1..210: mol_type = other DNA
atgtgggtgcccgtggtgttcctgaccctgagcgtgacctggatcggcgccgcccccctgatcctgagcagaatcgtgggcggctgggagtgcgagaagcacagccagccctggcaggtgctggtggccagcagaggcagagccgtgtgcggcggcgtgctggtgcacccccagtgggtgctgaccgccgcccactgcatcagaaagtag

SEQ ID NO: 85964 - DNA, 765 bp, synthetic construct
  misc_feature 1..765: note = Description of Artificial Sequence: Synthetic coding sequence
  source 1..765: mol_type = other DNA
atggccaccgccggcaacccctggggctggttcctgggctacctgatcctgggcgtggccggcagcctggtgagcggcagctgcagccagatcatcaacggcgaggactgcagcccccacagccagccctggcaggccgccctggtgatggagaacgagctgttctgcagcggcgtgctggtgcacccccagtgggtgctgagcgccgcccactgcttccagaacagctacaccatcggcctgggcctgcacagcctggaggccgaccaggagcccggcagccagatggtggaggccagcctgagcgtgagacaccccgagtacaacagacccctgctggccaacgacctgatgctgatcaagctggacgagagcgtgagcgagagcgacaccatcagaagcatcagcatcgccagccagtgccccaccgccggcaacagctgcctggtgagcggctggggcctgctggccaacggcagaatgcccaccgtgctgcagtgcgtgaacgtgagcgtggtgagcgaggaggtgtgcagcaagctgtacgaccccctgtaccaccccagcatgttctgcgccggcggcggccacgaccagaaggacagctgcaacggcgacagcggcggccccctgatctgcaacggctacctgcagggcctggtgagcttcggcaaggccccctgcggccaggtgggcgtgcccggcgtgtacaccaacctgtgcaagttcaccgagtggatcgagaagaccgtgcaggccagctag

SEQ ID NO: 85965 - DNA, 333 bp, synthetic construct
  misc_feature 1..333: note = Description of Artificial Sequence: Synthetic coding sequence
  source 1..333: mol_type = other DNA
atggagaacgagctgttctgcagcggcgtgctggtgcacccccagtgggtgctgagcgccgcccactgcttccagaacagctacaccatcggcctgggcctgcacagcctggaggccgaccaggagcccggcagccagatggtggaggccagcctgagcgtgagacaccccgagtacaacagacccctgctggccaacgacctgatgctgatcaagctggacgagagcgtgagcgagagcgacaccatcagaagcatcagcatcgccagccagtgccccaccgccggcaacagctgcctggtgagcggctggggcctgctggccaacggctag

SEQ ID NO: 85966 - DNA, 735 bp, synthetic construct
  misc_feature 1..735: note = Description of Artificial Sequence: Synthetic coding sequence
  source 1..735: mol_type = other DNA
atgaagaagctgatggtggtgctgagcctgatcgccgccgcctgggccgaggagcagaacaagctggtgcacggcggcccctgcgacaagaccagccacccctaccaggccgccctgtacaccagcggccacctgctgtgcggcggcgtgctgatccaccccctgtgggtgctgaccgccgcccactgcaagaagcccaacctgcaggtgttcctgggcaagcacaacctgagacagagagagagcagccaggagcagagcagcgtggtgagagccgtgatccaccccgactacgacgccgccagccacgaccaggacatcatgctgctgagactggccagacccgccaagctgagcgagctgatccagcccctgcccctggagagagactgcagcgccaacaccaccagctgccacatcctgggctggggcaagaccgccgacggcgacttccccgacaccatccagtgcgcctacatccacctggtgagcagagaggagtgcgagcacgcctaccccggccagatcacccagaacatgctgtgcgccggcgacgagaagtacggcaaggacagctgccagggcgacagcggcggccccctggtgtgcggcgaccacctgagaggcctggtgagctggggcaacatcccctgcggcagcaaggagaagcccggcgtgtacaccaacgtgtgcagatacaccaactggatccagaagaccatccaggccaagtag

SEQ ID NO: 85967 - DNA, 735 bp, synthetic construct; identical to SEQ ID NO: 85966
  misc_feature 1..735: note = Description of Artificial Sequence: Synthetic coding sequence
  source 1..735: mol_type = other DNA

SEQ ID NO: 85968 - DNA, 363 bp, synthetic construct
  misc_feature 1..363: note = Description of Artificial Sequence: Synthetic coding sequence
  source 1..363: mol_type = other DNA
atgaagaagctgatggtggtgctgagcctgatcgccgccgcctgggccgaggagcagaacaagctggtgcacggcggcccctgcgacaagaccagccacccctaccaggccgccctgtacaccagcggccacctgctgtgcggcggcgtgctgatccaccccctgtgggtgctgaccgccgcccactgcaagaagcccgtgatcctgggcgtgagatggtacgtggagaccaccagcgaggccctgtgccacggcgtgaccagccccgtggaccagagaagaagccaggagagcacccccaccagcgccgacaccagaaccggcagcaagaagcccttcagacccagcgaccccgacatgtag

SEQ ID NO: 85969 - DNA, 414 bp, synthetic construct
  misc_feature 1..414: note = Description of Artificial Sequence: Synthetic coding sequence
  source 1..414: mol_type = other DNA
atgctgctgagactggccagacccgccaagctgagcgagctgatccagcccctgcccctggagagagactgcagcgccaacaccaccagctgccacatcctgggctggggcaagaccgccgacggcgacttccccgacaccatccagtgcgcctacatccacctggtgagcagagaggagtgcgagcacgcctaccccggccagatcacccagaacatgctgtgcgccggcgacgagaagtacggcaaggacagctgccagggcgacagcggcggccccctggtgtgcggcgaccacctgagaggcctggtgagctggggcaacatcccctgcggcagcaaggagaagcccggcgtgtacaccaacgtgtgcagatacaccaactggatccagaagaccatccaggccaagtag

SEQ ID NO: 85970 - DNA, 123 bp, synthetic construct
  misc_feature 1..123: note = Description of Artificial Sequence: Synthetic coding sequence
  source 1..123: mol_type = other DNA
atgaagaagctgatggtggtgctgagcctgatcgccgccggcatcttcagaagcagctggggcagcatcaccttcggcaagggcagagtgcccagaagcagagtgctgctgagcggcctgtag

SEQ ID NO: 85971 - DNA, 414 bp, synthetic construct; identical to SEQ ID NO: 85969
  misc_feature 1..414: note = Description of Artificial Sequence: Synthetic coding sequence
  source 1..414: mol_type = other DNA

SEQ ID NO: 85972 - DNA, 783 bp, synthetic construct
  misc_feature 1..783: note = Description of Artificial Sequence: Synthetic coding sequence
  source 1..783: mol_type = other DNA
atgggcagacccagacccagagccgccaagacctggatgttcctgctgctgctgggcggcgcctgggccggccacagcagagcccaggaggacaaggtgctgggcggccacgagtgccagccccacagccagccctggcaggccgccctgttccagggccagcagctgctgtgcggcggcgtgctggtgggcggcaactgggtgctgaccgccgcccactgcaagaagcccaagtacaccgtgagactgggcgaccacagcctgcagaacaaggacggccccgagcaggagatccccgtggtgcagagcatcccccacccctgctacaacagcagcgacgtggaggaccacaaccacgacctgatgctgctgcagctgagagaccaggccagcctgggcagcaaggtgaagcccatcagcctggccgaccactgcacccagcccggccagaagtgcaccgtgagcggctggggcaccgtgaccagccccagagagaacttccccgacaccctgaactgcgccgaggtgaagatcttcccccagaagaagtgcgaggacgcctaccccggccagatcaccgacggcatggtgtgcgccggcagcagcaagggcgccgacacctgccagggcgacagcggcggccccctggtgtgcgacggcgccctgcagggcatcaccagctggggcagcgacccctgcggcagaagcgacaagcccggcgtgtacaccaacatctgcagatacctggactggatcaagaagatcatcggcagcaagggctag

SEQ ID NO: 85973 - DNA, 99 bp, synthetic construct
  misc_feature 1..99: note = Description of Artificial Sequence: Synthetic coding sequence
  source 1..99: mol_type = other DNA
atgggcagacccagacccagagccgccaagacctggatgttcctgctgctgctgggcggcgcctgggccggcagattctggagaccccccggcgtgtag

SEQ ID NO: 85974 - DNA, 360 bp, synthetic construct
  misc_feature 1..360: note = Description of Artificial Sequence: Synthetic coding sequence
  source 1..360: mol_type = other DNA
atgggcagacccagacccagagccgccaagacctggatgttcctgctgctgctgggcggcgcctgggccgagaacttccccgacaccctgaactgcgccgaggtgaagatcttcccccagaagaagtgcgaggacgcctaccccggccagatcaccgacggcatggtgtgcgccggcagcagcaagggcgccgacacctgccagggcgacagcggcggccccctggtgtgcgacggcgccctgcagggcatcaccagctggggcagcgacccctgcggcagaagcgacaagcccggcgtgtacaccaacatctgcagatacctggactggatcaagaagatcatcggcagcaagggctag

SEQ ID NO: 85975 - DNA, 918 bp, synthetic construct
  misc_feature 1..918: note = Description of Artificial Sequence: Synthetic coding sequence
  source 1..918: mol_type = other DNA
atgggcagacccagacccagagccgccaagacctggatgttcctgctgctgctgggcggcgcctgggccgcctgcggcagcctggacctgctgaccaagctgtacgccgagaacctgccctgcgtgcacctgaacccccagtggcccagccagcccagccactgccccagaggctggagaagcaaccccctgccccccgccgccggccacagcagagcccaggaggacaaggtgctgggcggccacgagtgccagccccacagccagccctggcaggccgccctgttccagggccagcagctgctgtgcggcggcgtgctggtgggcggcaactgggtgctgaccgccgcccactgcaagaagcccaagtacaccgtgagactgggcgaccacagcctgcagaacaaggacggccccgagcaggagatccccgtggtgcagagcatcccccacccctgctacaacagcagcgacgtggaggaccacaaccacgacctgatgctgctgcagctgagagaccaggccagcctgggcagcaaggtgaagcccatcagcctggccgaccactgcacccagcccggccagaagtgcaccgtgagcggctggggcaccgtgaccagccccagagagaacttccccgacaccctgaactgcgccgaggtgaagatcttcccccagaagaagtgcgaggacgcctaccccggccagatcaccgacggcatggtgtgcgccggcagcagcaagggcgccgacacctgccagggcgacagcggcggccccctggtgtgcgacggcgccctgcagggcatcaccagctggggcagcgacccctgcggcagaagcgacaagcccggcgtgtacaccaacatctgcagatacctggactggatcaagaagatcatcggcagcaagggctag

SEQ ID NO: 85976 - DNA, 783 bp, synthetic construct; identical to SEQ ID NO: 85972
  misc_feature 1..783: note = Description of Artificial Sequence: Synthetic coding sequence
  source 1..783: mol_type = other DNA

SEQ ID NO: 85977 - DNA, 753 bp, synthetic construct
  misc_feature 1..753: note = Description of Artificial Sequence: Synthetic coding sequence
  source 1..753: mol_type = other DNA
atgaagctgggcctgctgtgcgccctgctgagcctgctggccggccacggctgggccgacaccagagccatcggcgccgaggagtgcagacccaacagccagccctggcaggccggcctgttccacctgaccagactgttctgcggcgccaccctgatcagcgacagatggctgctgaccgccgcccactgcagaaagccctacctgtgggtgagactgggcgagcaccacctgtggaagtgggagggccccgagcagctgttcagagtgaccgacttcttcccccaccccggcttcaacaaggacctgagcgccaacgaccacaacgacgacatcatgctgatcagactgcccagacaggccagactgagccccgccgtgcagcccctgaacctgagccagacctgcgtgagccccggcatgcagtgcctgatcagcggctggggcgccgtgagcagccccaaggccctgttccccgtgaccctgcagtgcgccaacatcagcatcctggagaacaagctgtgccactgggcctaccccggccacatcagcgacagcatgctgtgcgccggcctgtgggagggcggcagaggcagctgccagggcgacagcggcggccccctggtgtgcaacggcaccctggccggcgtggtgagcggcggcgccgagccctgcagcagacccagaagacccgccgtgtacaccagcgtgtgccactacctggactggatccaggagatcatggagaactag

SEQ ID NO: 85978 - DNA, 753 bp, synthetic construct; identical to SEQ ID NO: 85977
  misc_feature 1..753: note = Description of Artificial Sequence: Synthetic coding sequence
  source 1..753: mol_type = other DNA

SEQ ID NO: 85979 - DNA, 186 bp, synthetic construct
  misc_feature 1..186: note = Description of Artificial Sequence: Synthetic coding sequence
  source 1..186: mol_type = other DNA
atgaagctgggcctgctgtgcgccctgctgagcctgctggccggcatctgcggcagcgccctggagagcaccaccagcggcaacggcagagtgagaagcagctgcagcggcctgagaaccagcagccccaccctggccagcaccagaaccagcgcccccatgaccaccatgatgaccagctgctag

SEQ ID NO: 85980 - DNA, 2043 bp, synthetic construct
  misc_feature 1..2043: note = Description of Artificial Sequence: Synthetic coding sequence
  source 1..2043: mol_type = other DNA
atggtgcccggcgtgcccggcgccgtgctgaccctgtgcctgtggctggccgccagcagcggctgcctggccgccggccccggcgccgccgccgccagaagactggacgagagcctgagcgccggcagcgtgcagagagccagatgcgccagcagatgcctgagcctgcagatcaccagaatcagcgccttcttccagcacttccagaacaacggcagcctggtgtggtgccagaaccacaagcagtgcagcaagtgcctggagccctgcaaggagagcggcgacctgagaaagcaccagtgccagagcttctgcgagcccctgttccccaagaagagctacgagtgcctgaccagctgcgagttcctgaagtacatcctgctggtgaagcagggcgactgccccgcccccgagaaggccagcggcttcgccgccgcctgcgtggagagctgcgaggtggacaacgagtgcagcggcgtgaagaagtgctgcagcaacggctgcggccacacctgccaggtgcccaagaccctgtacaagggcgtgcccctgaagcccagaaaggagctgagattcaccgagctgcagagcggccagctggaggtgaagtggagcagcaagttcaacatcagcatcgagcccgtgatctacgtggtgcagagaagatggaactacggcatccaccccagcgaggacgacgccacccactggcagaccgtggcccagaccaccgacgagagagtgcagctgaccgacatcagacccagcagatggtaccagttcagagtggccgccgtgaacgtgcacggcaccagaggcttcaccgcccccagcaagcacttcagaagcagcaaggaccccagcgccccccccgcccccgccaacctgagactggccaacagcaccgtgaacagcgacggcagcgtgaccgtgaccatcgtgtgggacctgcccgaggagcccgacatccccgtgcaccactacaaggtgttctggagctggatggtgagcagcaagagcctggtgcccaccaagaagaagagaagaaagaccaccgacggcttccagaacagcgtgatcctggagaagctgcagcccgactgcgactacgtggtggagctgcaggccatcacctactggggccagaccagactgaagagcgccaaggtgagcctgcacttcaccagcacccacgccaccaacaacaaggagcagctggtgaagaccagaaagggcggcatccagacccagctgcccttccagagaagaagacccaccagacccctggaggtgggcgcccccttctaccaggacggccagctgcaggtgaaggtgtactggaagaagaccgaggaccccaccgtgaacagataccacgtgagatggttccccgaggcctgcgcccacaacagaaccaccggcagcgaggccagcagcggcatgacccacgagaactacatcatcctgcaggacctgagcttcagctgcaagtacaaggtgaccgtgcagcccatcagacccaagagccacagcaaggccgaggccgtgttcttcaccacccccccctgcagcgccctgaagggcaagagccacaagcccgtgggctgcctgggcgaggccggccacgtgctgagcaaggtgctggccaagcccgagaacctgagcgccagcttcatcgtgcaggacgtgaacatcaccggccacttcagctggaagatggccaaggccaacctgtaccagcccatgaccggcttccaggtgacctgggccgaggtgaccaccgagagcagacagaacagcctgcccaacagcatcatcagccagagccagatcctgcccagcgaccactacgtgctgaccgtgcccaacctgagacccagcaccctgtacagactggaggtgcaggtgctgacccccggcggcgagggccccgccaccatcaagaccttcagaacccccgagctgccccccagcagcgcccacagaagccacctgaagcacagacacccccaccactacaagcccagccccgagagatactag

SEQ ID NO: 85981 - DNA, 2631 bp, synthetic construct
  misc_feature 1..2631: note = Description of Artificial Sequence: Synthetic coding sequence
  source 1..2631: mol_type = other DNA
atggagctgatcaccatcctggagaagaccgtgagccccgacagactggagctggaggccgcccagaagttcctggagagagccgccgtggagaacctgcccaccttcctggtggagctgagcagagtgctggccaaccccggcaacagccaggtggccagagtggccgccggcctgcagatcaagaacagcctgaccagcaaggaccccgacatcaaggcccagtaccagcagagatggctggccatcgacgccaacgccagaagagaggtgaagaactacgtgctgcagaccctgggcaccgagacctacagacccagcagcgccagccagtgcgtggccggcatcgcctgcgccgagatccccgtgaaccagtggcccgagctgatcccccagctggtggccaacgtgaccaaccccaacagcaccgagcacatgaaggagagcaccctggaggccatcggctacatctgccaggacatcgaccccgagcagctgcaggacaagagcaacgagatcctgaccgccatcatccagggcatgagaaaggaggagcccagcaacaacgtgaagctggccgccaccaacgccctgctgaacagcctggagttcaccaaggccaacttcgacaaggagagcgagagacacttcatcatgcaggtggtgtgcgaggccacccagtgccccgacaccagagtgagagtggccgccctgcagaacctggtgaagatcatgagcctgtactaccagtacatggagacctacatgggccccgccctgttcgccatcaccatcgaggccatgaagagcgacatcgacgaggtggccctgcagggcatcgagttctggagcaacgtgtgcgacgaggagatggacctggccatcgaggccagcgaggccgccgagcagggcagaccccccgagcacaccagcaagttctacgccaagggcgccctgcagtacctggtgcccatcctgacccagaccctgaccaagcaggacgagaacgacgacgacgacgactggaacccctgcaaggccgccggcgtgtgcctgatgctgctggccacctgctgcgaggacgacatcgtgccccacgtgctgcccttcatcaaggagcacatcaagaaccccgactggagatacagagacgccgccgtgatggccttcggctgcatcctggagggccccgagcccagccagctgaagcccctggtgatccaggccatgcccaccctgatcgagctgatgaaggaccccagcgtggtggtgagagacaccgccgcctggaccgtgggcagaatctgcgagctgctgcccgaggccgccatcaacgacgtgtacctggcccccctgctgcagtgcctgatcgagggcctgagcgccgagcccagagtggccagcaacgtgtgctgggccttcagcagcctggccgaggccgcctacgaggccgccgacgtggccgacgaccaggaggagcccgccacctactgcctgagcagcagcttcgagctgatcgtgcagaagctgctggagaccaccgacagacccgacggccaccagaacaacctgagaagcagcgcctacgagagcctgatggagatcgtgaagaacagcgccaaggactgctaccccgccgtgcagaagaccaccctggtgatcatggagagactgcagcaggtgctgcagatggagagccacatccagagcaccagcgacagaatccagttcaacgacctgcagagcctgctgtgcgccaccctgcagaacgtgctgagaaaggtgcagcaccaggacgccctgcagatcagcgacgtggtgatggccagcctgctgagaatgttccagagcaccgccggcagcggcggcgtgcaggaggacgccctgatggccgtgagcaccctggtggaggtgctgggcggcgagttcctgaagtacatggaggccttcaagcccttcctgggcatcggcctgaagaactacgccgagtaccaggtgtgcctggccgccgtgggcctggtgggcgacctgtgcagagccctgcagagcaacatcatccccttctgcgacgaggtgatgcagctgctgctggagaacctgggcaacgagaacgtgcacagaagcgtgaagccccagatcctgagcgtgttcggcgacatcgccctggccatcggcggcgagttcaagaagtacctggaggtggtgctgaacaccctgcagcaggccagccaggcccaggtggacaagagcgactacgacatggtggactacctgaacgagctgagagagagctgcctggaggcctacaccggcatcgtgcagggcctgaagggcgaccaggagaacgtgcaccccgacgtgatgctggtgcagcccagagtggagttcatcctgagcttcatcgaccacatcgccggcgacgaggaccacaccgacggcgtggtggcctgcgccgccggcctgatcggcgacctgtgcaccgccttcggcaaggacgtgctgaagctggtggaggccagacccatgatccacgagctgctgaccgagggcagaagaagcaagaccaacaaggccaagaccctggccacctgggccaccaaggagctgagaaagctgaagaaccaggcctag

SEQ ID NO: 85982 - DNA, 2196 bp, synthetic construct
  misc_feature 1..2196: note = Description of Artificial Sequence: Synthetic coding sequence
  source 1..2196: mol_type = other DNA
atgaaggagagcaccctggaggccatcggctacatctgccaggacatcgaccccgagcagctgcaggacaagagcaacgagatcctgaccgccatcatccagggcatgagaaaggaggagcccagcaacaacgtgaagctggccgccaccaacgccctgctgaacagcctggagttcaccaaggccaacttcgacaaggagagcgagagacacttcatcatgcaggtggtgtgcgaggccacccagtgccccgacaccagagtgagagtggccgccctgcagaacctggtgaagatcatgagcctgtactaccagtacatggagacctacatgggccccgccctgttcgccatcaccatcgaggccatgaagagcgacatcgacgaggtggccctgcagggcatcgagttctggagcaacgtgtgcgacgaggagatggacctggccatcgaggccagcgaggccgccgagcagggcagaccccccgagcacaccagcaagttctacgccaagggcgccctgcagtacctggtgcccatcctgacccagaccctgaccaagcaggacgagaacgacgacgacgacgactggaacccctgcaaggccgccggcgtgtgcctgatgctgctggccacctgctgcgaggacgacatcgtgccccacgtgctgcccttcatcaaggagcacatcaagaaccccgactggagatacagagacgccgccgtgatggccttcggctgcatcctggagggccccgagcccagccagctgaagcccctggtgatccaggccatgcccaccctgatcgagctgatgaaggaccccagcgtggtggtgagagacaccgccgcctggaccgtgggcagaatctgcgagctgctgcccgaggccgccatcaacgacgtgtacctggcccccctgctgcagtgcctgatcgagggcctgagcgccgagcccagagtggccagcaacgtgtgctgggccttcagcagcctggccgaggccgcctacgaggccgccgacgtggccgacgaccaggaggagcccgccacctactgcctgagcagcagcttcgagctgatcgtgcagaagctgctggagaccaccgacagacccgacggccaccagaacaacctgagaagcagcgcctacgagagcctgatggagatcgtgaagaacagcgccaaggactgctaccccgccgtgcagaagaccaccctggtgatcatggagagactgcagcaggtgctgcagatggagagccacatccagagcaccagcgacagaatccagttcaacgacctgcagagcctgctgtgcgccaccctgcagaacgtgctgagaaaggtgcagcaccaggacgccctgcagatcagcgacgtggtgatggccagcctgctgagaatgttccagagcaccgccggcagcggcggcgtgcaggaggacgccctgatggccgtgagcaccctggtggaggtgctgggcggcgagttcctgaagtacatggaggccttcaagcccttcctgggcatcggcctgaagaactacgccgagtaccaggtgtgcctggccgccgtgggcctggtgggcgacctgtgcagagccctgcagagcaacatcatccccttctgcgacgaggtgatgcagctgctgctggagaacctgggcaacgagaacgtgcacagaagcgtgaagccccagatcctgagcgtgttcggcgacatcgccctggccatcggcggcgagttcaagaagtacctggaggtggtgctgaacaccctgcagcaggccagccaggcccaggtggacaagagcgactacgacatggtggactacctgaacgagctgagagagagctgcctggaggcctacaccggcatcgtgcagggcctgaagggcgaccaggagaacgtgcaccccgacgtgatgctggtgcagcccagagtggagttcatcctgagcttcatcgaccacatcgccggcgacgaggaccacaccgacggcgtggtggcctgcgccgccggcctgatcggcgacctgtgcaccgccttcggcaaggacgtgctgaagctggtggaggccagacccatgatccacgagctgctgaccgagggcagaagaagcaagaccaacaaggccaagaccctggccacctgggccaccaaggagctgagaaagctgaagaaccaggcctag

SEQ ID NO: 85983 - DNA, 1983 bp, synthetic construct
  misc_feature 1..1983: note = Description of Artificial Sequence: Synthetic coding sequence
  source 1..1983: mol_type = other DNA
atgaaggagagcaccctggaggccatcggctacatctgccaggacatcgaccccgagcagctgcaggacaagagcaacgagatcctgaccgccatcatccagggcatgagaaaggaggagcccagcaacaacgtgaagctggccgccaccaacgccctgctgaacagcctggagttcaccaaggccaacttcgacaaggagagcgagagacacttcatcatgcaggtggtgtgcgaggccacccagtgccccgacaccagagtgagagtggccgccctgcagaacctggtgaagatcatgagcctgtactaccagtacatggagacctacatgggccccgccctgttcgccgacgagaacgacgacgacgacgactggaacccctgcaaggccgccggcgtgtgcctgatgctgctggccacctgctgcgaggacgacatcgtgccccacgtgctgcccttcatcaaggagcacatcaagaaccccgactggagatacagagacgccgccgtgatggccttcggctgcatcctggagggccccgagcccagccagctgaagcccctggtgatccaggccatgcccaccctgatcgagctgatgaaggaccccagcgtggtggtgagagacaccgccgcctggaccgtgggcagaatctgcgagctgctgcccgaggccgccatcaacgacgtgtacctggcccccctgctgcagtgcctgatcgagggcctgagcgccgagcccagagtggccagcaacgtgtgctgggccttcagcagcctggccgaggccgcctacgaggccgccgacgtggccgacgaccaggaggagcccgccacctactgcctgagcagcagcttcgagctgatcgtgcagaagctgctggagaccaccgacagacccgacggccaccagaacaacctgagaagcagcgcctacgagagcctgatggagatcgtgaagaacagcgccaaggactgctaccccgccgtgcagaagaccaccctggtgatcatggagagactgcagcaggtgctgcagatggagagccacatccagagcaccagcgacagaatccagttcaacgacctgcagagcctgctgtgcgccaccctgcagaacgtgctgagaaaggtgcagcaccaggacgccctgcagatcagcgacgtggtgatggccagcctgctgagaatgttccagagcaccgccggcagcggcggcgtgcaggaggacgccctgatggccgtgagcaccctggtggaggtgctgggcggcgagttcctgaagtacatggaggccttcaagcccttcctgggcatcggcctgaagaactacgccgagtaccaggtgtgcctggccgccgtgggcctggtgggcgacctgtgcagagccctgcagagcaacatcatccccttctgcgacgaggtgatgcagctgctgctggagaacctgggcaacgagaacgtgcacagaagcgtgaagccccagatcctgagcgtgttcggcgacatcgccctggccatcggcggcgagttcaagaagtacctggaggtggtgctgaacaccctgcagcaggccagccaggcccaggtggacaagagcgactacgacatggtggactacctgaacgagctgagagagagctgcctggaggcctacaccggcatcgtgcagggcctgaagggcgaccaggagaacgtgcaccccgacgtgatgctggtgcagcccagagtggagttcatcctgagcttcatcgaccacatcgccggcgacgaggaccacaccgacggcgtggtggcctgcgccgccggcctgatcggcgacctgtgcaccgccttcggcaaggacgtgctgaagctggtggaggccagacccatgatccacgagctgctgaccgagggcagaagaagcaagaccaacaaggccaagaccctggccacctgggccaccaaggagctgagaaagctgaagaaccaggcctag

SEQ ID NO: 85984 - DNA, 2196 bp, synthetic construct; identical to SEQ ID NO: 85982
  misc_feature 1..2196: note = Description of Artificial Sequence: Synthetic coding sequence
  source 1..2196: mol_type = other DNA

SEQ ID NO: 85985 - DNA, 1617 bp, synthetic construct
  misc_feature 1..1617: note = Description of Artificial Sequence: Synthetic coding sequence
  source 1..1617: mol_type = other DNA
atgaccacccccggcaaggagaacttcagactgaagagctacaagaacaagagcctgaaccccgacgagatgagaagaagaagagaggaggagggcctgcagctgagaaagcagaagagagaggagcagctgttcaagagaagaaacgtggccaccgccgaggaggagaccgaggaggaggtgatgagcgacggcggcttccacgaggcccagatcagcaacatggagatggcccccggcggcgtgatcaccagcgacatgatcgagatgatcttcagcaagagccccgagcagcagctgagcgccacccagaagttcagaaagctgctgagcaaggagcccaacccccccatcgacgaggtgatcagcacccccggcgtggtggccagattcgtggagttcctgaagagaaaggagaactgcaccctgcagttcgagagcgcctgggtgctgaccaacatcgccagcggcaacagcctgcagaccagaatcgtgatccaggccggcgccgtgcccatcttcatcgagctgctgagcagcgagttcgaggacgtgcaggagcaggccgtgtgggccctgggcaacatcgccggcgacagcaccatgtgcagagactacgtgctggactgcaacatcctgccccccctgctgcagctgttcagcaagcagaacagactgaccatgaccagaaacgccgtgtgggccctgagcaacctgtgcagaggcaagagccccccccccgagttcgccaaggtgagcccctgcctgaacgtgctgagctggctgctgttcgtgagcgacaccgacgtgctggccgacgcctgctgggccctgagctacctgagcgacggccccaacgacaagatccaggccgtgatcgacgccggcgtgtgcagaagactggtggagctgctgatgcacaacgactacaaggtggtgagccccgccctgagagccgtgggcaacatcgtgaccggcgacgacatccagacccaggtgatcctgaactgcagcgccctgcagagcctgctgcacctgctgagcagccccaaggagagcatcaagaaggaggcctgctggaccatcagcaacatcaccgccggcaacagagcccagatccagaccgtgatcgacgccaacatcttccccgccctgatcagcatcctgcagaccgccgagttcagaaccagaaaggaggccgcctgggccatcaccaacgccaccagcggcggcagcgccgagcagatcaagtacctggtggagctgggctgcatcaagcccctgtgcgacctgctgaccgtgatggacagcaagatcgtgcaggtggccctgaacggcctggagaacatcctgagactgggcgagcaggaggccaagagaaacggcaccggcatcaacccctactgcgccctgatcgaggaggcctacggcctggacaagatcgagttcctgcagagccacgagaaccaggagatctaccagaaggccttcgacctgatcgagcactacttcggcaccgaggacgaggacagcagcatcgccccccaggtggacctgaaccagcagcagtacatcttccagcagtgcgaggcccccatggagggcttccagctgtag

SEQ ID NO: 85986 - DNA, 987 bp, synthetic construct
  misc_feature 1..987: note = Description of Artificial Sequence: Synthetic coding sequence
  source 1..987: mol_type = other DNA
atgaccacccccggcaaggagaacttcagactgaagagctacaagaacaagagcctgaaccccgacgagatgagaagaagaagagaggaggagggcctgcagctgagaaagcagaagagagaggagcagctgttcaagagaagaaacgtggccaccgccgaggaggagaccgaggaggaggtgatgagcgacggcggcttccacgaggcccagatcagcaacatggagatggcccccggcggcgtgatcaccagcgacatgatcgagatgatcttcagcaagagccccgagcagcagctgagcgccacccagaagttcagaaagctgctgagcaaggagcccaacccccccatcgacgaggtgatcagcacccccggcgtggtggccagattcgtggagttcctgaagagaaaggagaactgcaccctgcagttcgagagcgcctgggtgctgaccaacatcgccagcggcaacagcctgcagaccagaatcgtgatccaggccggcgccgtgcccatcttcatcgagctgctgagcagcgagttcgaggacgtgcaggagcaggccgtgtgggccctgggcaacatcgccggcgacagcaccatgtgcagagactacgtgctggactgcaacatcctgccccccctgctgcagctgttcagcaagcagaacagactgaccatgaccagaaacgccgtgtgggccctgagcaacctgtgcagaggcaagagccccccccccgagttcgccaaggtgagcccctgcctgaacgtgctgagctggctgctgttcgtgagcgacaccgacgtgctggccgacgcctgctgggccctgagctacctgagcgacggccccaacgacaagatccaggccgtgatcgacgccggcgtgtgcagaagactggtggagctgctgatgcacaacgactacaaggtggtgagccccgccctgagagccgtgggcaacatcgtgaccggcgacgactag

SEQ ID NO: 85987 - DNA, 648 bp, synthetic construct
  misc_feature 1..648: note = Description of Artificial Sequence: Synthetic coding sequence
  source 1..648: mol_type = other DNA
atgaccacccccggcaaggagaacttcagactgaagagctacaagaacaagagcctgaaccccgacgagatgagaagaagaagagaggaggagggcctgcagctgagaaagcagaagagagaggagcagctgttcaagagaagaaacgtggccaccgccgaggaggagaccgaggaggaggtgatgagcgacggcggcttccacgaggcccagatcagcaacatggagatggcccccggcggcgtgatcaccagcgacatgatcgagatgatcttcagcaagagccccgagcagcagctgagcgccacccagaagttcagaaagctgctgagcaaggagcccaacccccccatcgacgaggtgatcagcacccccggcgtggtggccagattcgtggagttcctgaagagaaaggagaactgcaccctgcagttcgagagcgcctgggtgctgaccaacatcgccagcggcaacagcctgcagaccagaatcgtgatccaggccggcgccgtgcccatcttcatcgagctgctgagcagcgagttcgaggacgtgcaggagcaggccgtgtgggccctgggcaacatcgccggcgacagcaccatgtgcagagactacgtgctggactgcaacatcctgcccccctag

SEQ ID NO: 85988 - DNA, 525 bp, synthetic construct
  misc_feature 1..525: note = Description of Artificial Sequence: Synthetic coding sequence
  source 1..525: mol_type = other DNA
atgaccacccccggcaaggagaacttcagactgaagagctacaagaacaagagcctgaaccccgacgagatgagaagaagaagagaggaggagggcctgcagctgagaaagcagaagagagaggagcagctgttcaagagaagaaacgtggccaccgccgaggaggagaccgaggaggaggtgatgagcgacggcggcttccacgaggcccagatcagcaacatggagatggcccccggcggcgtgatcaccagcgacatgatcgagatgatcttcagcaagagccccgagcagcagctgagcgccacccagaagttcagaaagctgctgagcaaggagcccaacccccccatcgacgaggtgatcagcacccccggcgtggtggccagattcgtggagttcctgaagagaaaggagaactgcaccctgcagttcgagagcgcctgggtgctgaccaacatcgccagcggcaacagcctgcagaccagaatcgtgatccaggccggcgccgtgcccatcttctag

SEQ ID NO: 85989 - DNA, 1566 bp, synthetic construct
  misc_feature 1..1566: note = Description of Artificial Sequence: Synthetic coding sequence
  source 1..1566: mol_type = other DNA
atggccgagaaccccagcctggagaaccacagaatcaagagcttcaagaacaagggcagagacgtggagaccatgagaagacacagaaacgaggtgaccgtggagctgagaaagaacaagagagacgagcacctgctgaagaagagaaacgtgccccaggaggagagcctggaggacagcgacgtggacgccgacttcaaggcccagaacgtgaccctggaggccatcctgcagaacgccaccagcgacaaccccgtggtgcagctgagcgccgtgcaggccgccagaaagctgctgagcagcgacagaaacccccccatcgacgacctgatcaagagcggcatcctgcccatcctggtgaagtgcctggagagagacgacaaccccagcctgcagttcgaggccgcctgggccctgaccaacatcgccagcggcaccagcgcccagacccaggccgtggtgcagagcaacgccgtgcccctgttcctgagactgctgagaagcccccaccagaacgtgtgcgagcaggccgtgtgggccctgggcaacatcatcggcgacggcccccagtgcagagactacgtgatcagcctgggcgtggtgaagcccctgctgagcttcatcagccccagcatccccatcaccttcctgagaaacgtgacctgggtgatcgtgaacctgtgcagaaacaaggacccccccccccccatggagaccgtgcaggagatcctgcccgccctgtgcgtgctgatctaccacaccgacatcaacatcctggtggacaccgtgtgggccctgagctacctgaccgacggcggcaacgagcagatccagatggtgatcgacagcggcgtggtgcccttcctggtgcccctgctgagccaccaggaggtgaaggtgcagaccgccgccctgagagccgtgggcaacatcgtgaccggcaccgacgagcagacccaggtggtgctgaactgcgacgtgctgagccacttccccaacctgctgagccaccccaaggagaagatcaacaaggaggccgtgtggttcctgagcaacatcaccgccggcaaccagcagcaggtgcaggccgtgatcgacgccggcctgatccccatgatcatccaccagctggccaagggcgacttcggcacccagaaggaggccgcctgggccatcagcaacctgaccatcagcggcagaaaggaccaggtggagtacctggtgcagcagaacgtgatcccccccttctgcaacctgctgagcgtgaaggacagccaggtggtgcaggtggtgctggacggcctgaagaacatcctgatcatggccggcgacgaggccagcaccatcgccgagatcatcgaggagtgcggcggcctggagaagatcgaggtgctgcagcagcacgagaacgaggacatctacaagctggccttcgagatcatcgaccagtacttcagcggcgacgacatcgacgaggacccctgcctgatccccgaggccacccagggcggcacctacaacttcgaccccaccgccaacctgcagaccaaggagttcaacttctag

SEQ ID NO: 85990 - DNA, 1566 bp, synthetic construct
  misc_feature 1..1566: note = Description of Artificial Sequence: Synthetic coding sequence
  source 1..1566: mol_type = other DNA
atggccgacaacgagaagctggacaaccagagactgaagaacttcaagaacaagggcagagacctggagaccatgagaagacagagaaacgaggtggtggtggagctgagaaagaacaagagagacgagcacctgctgaagagaagaaacgtgccccacgaggacatctgcgaggacagcgacatcgacggcgactacagagtgcagaacaccagcctggaggccatcgtgcagaacgccagcagcgacaaccagggcatccagctgagcgccgtgcaggccgccagaaagctgctgagcagcgacagaaacccccccatcgacgacctgatcaagagcggcatcctgcccatcctggtgcactgcctggagagagacgacaaccccagcctgcagttcgaggccgcctgggccctgaccaacatcgccagcggcaccagcgagcagacccaggccgtggtgcagagcaacgccgtgcccctgttcctgagactgctgcacagcccccaccagaacgtgtgcgagcaggccgtgtgggccctgggcaacatcatcggcgacggcccccagtgcagagactacgtgatcagcctgggcgtggtgaagcccctgctgagcttcatcagccccagcatccccatcaccttcctgagaaacgtgacctgggtgatggtgaacctgtgcagacacaaggacccccccccccccatggagaccatccaggagatcctgcccgccctgtgcgtgctgatccaccacaccgacgtgaacatcctggtggacaccgtgtgggccctgagctacctgaccgacgccggcaacgagcagatccagatggtgatcgacagcggcatcgtgccccacctggtgcccctgctgagccaccaggaggtgaaggtgcagaccgccgccctgagagccgtgggcaacatcgtgaccggcaccgacgagcagacccaggtggtgctgaactgcgacgccctgagccacttccccgccctgctgacccaccccaaggagaagatcaacaaggaggccgtgtggttcctgagcaacatcaccgccggcaaccagcagcaggtgcaggccgtgatcgacgccaacctggtgcccatgatcatccacctgctggacaagggcgacttcggcacccagaaggaggccgcctgggccatcagcaacctgaccatcagcggcagaaaggaccaggtggcctacctgatccagcagaacgtgatcccccccttctgcaacctgctgaccgtgaaggacgcccaggtggtgcaggtggtgctggacggcctgagcaacatcctgaagatggccgaggacgaggccgagaccatcggcaacctgatcgaggagtgcggcggcctggagaagatcgagcagctgcagaaccacgagaacgaggacatctacaagctggcctacgagatcatcgaccagttcttcagcagcgacgacatcgacgaggaccccagcctggtgcccgaggccatccagggcggcaccttcggcttcaacagcagcgccaacgtgcccaccgagggcttccagttctag

SEQ ID NO: 85991 - DNA, 1551 bp, synthetic construct
  misc_feature 1..1551: note = Description of Artificial Sequence: Synthetic coding sequence
  source 1..1551: mol_type = other DNA
atgcccaccctggacgcccccgaggagagaagaagaaagttcaagtacagaggcaaggacgtgagcctgagaagacagcagagaatggccgtgagcctggagctgagaaaggccaagaaggacgagcagaccctgaagagaagaaacatcaccagcttctgccccgacacccccagcgagaagaccgccaagggcgtggccgtgagcctgaccctgggcgagatcatcaagggcgtgaacagcagcgaccccgtgctgtgcttccaggccacccagaccgccagaaagatgctgagccaggagaagaacccccccctgaagctggtgatcgaggccggcctgatccccagaatggtggagttcctgaagagcagcctgtacccctgcctgcagttcgaggccgcctgggccctgaccaacatcgccagcggcaccagcgagcagaccagagccgtggtggagggcggcgccatccagcccctgatcgagctgctgagcagcagcaacgtggccgtgtgcgagcaggccgtgtgggccctgggcaacatcgccggcgacggccccgagttcagagacaacgtgatcaccagcaacgccatcccccacctgctggccctgatcagccccaccctgcccatcaccttcctgagaaacatcacctggaccctgagcaacctgtgcagaaacaagaacccctacccctgcgacaccgccgtgaagcagatcctgcccgccctgctgcacctgctgcagcaccaggacagcgaggtgctgagcgacgcctgctgggccctgagctacctgaccgacggcagcaacaagagaatcggccaggtggtgaacaccggcgtgctgcccagactggtggtgctgatgaccagcagcgagctgaacgtgctgacccccagcctgagaaccgtgggcaacatcgtgaccggcaccgacgagcagacccagatggccatcgacgccggcatgctgaacgtgctgccccagctgctgcagcacaacaagcccagcatccagaaggaggccgcctgggccctgagcaacgtggccgccggcccctgccaccacatccagcagctgctggcctacgacgtgctgccccccctggtggccctgctgaagaacggcgagttcaaggtgcagaaggaggccgtgtggatggtggccaacttcgccaccggcgccaccatggaccagctgatccagctggtgcacagcggcgtgctggagcccctggtgaacctgctgaccgcccccgacgtgaagatcgtgctgatcatcctggacgtgatcagctgcatcctgcaggccgccgagaagagaagcgagaaggagaacctgtgcctgctgatcgaggagctgggcggcatcgacagaatcgaggccctgcagctgcacgagaacagacagatcggccagagcgccctgaacatcatcgagaagcacttcggcgaggaggaggacgagagccagaccctgctgagccaggtgatcgaccaggactacgagttcatcgactacgagtgcctggccaagaagtag

SEQ ID NO: 85992 - DNA, 3318 bp, synthetic construct
  misc_feature 1..3318: note = Description of Artificial Sequence: Synthetic coding sequence
  source 1..3318: mol_type = other DNA
atggccgccatggcccccgccctgaccgacgccgccgccgaggcccaccacatcagattcaagctggccccccccagcagcaccctgagccccggcagcgccgagaacaacggcaacgccaacatcctgatcgccgccaacggcaccaagagaaaggccatcgccgccgaggaccccagcctggacttcagaaacaaccccaccaaggaggacctgggcaagctgcagcccctggtggccagctacctgtgcagcgacgtgaccagcgtgcccagcaaggagagcctgaagctgcagggcgtgttcagcaagcagaccgtgctgaagagccaccccctgctgagccagagctacgagctgagagccgagctgctgggcagacagcccgtgctggagttcagcctggagaacctgagaaccatgaacaccagcggccagaccgccctgccccaggcccccgtgaacggcctggccaagaagctgaccaagagcagcacccacagcgaccacgacaacagcaccagcctgaacggcggcaagagagccctgaccagcagcgccctgcacggcggcgagatgggcggcagcgagagcggcgacctgaagggcggcatgaccaactgcaccctgccccacagaagcctggacgtggagcacaccaccctgtacagcaacaacagcaccgccaacaagagcagcgtgaacagcatggagcagcccgccctgcagggcagcagcagactgagccccggcaccgacagcagcagcaacctgggcggcgtgaagctggagggcaagaagagccccctgagcagcatcctgttcagcgccctggacagcgacaccagaatcaccgccctgctgagaagacaggccgacatcgagagcagagccagaagactgcagaagagactgcaggtggtgcaggccaagcaggtggagagacacatccagcaccagctgggcggcttcctggagaagaccctgagcaagctgcccaacctggagagcctgagacccagaagccagctgatgctgaccagaaaggccgaggccgccctgagaaaggccgccagcgagaccaccaccagcgagggcctgagcaacttcctgaagagcaacagcatcagcgaggagctggagagattcaccgccagcggcatcgccaacctgagatgcagcgagcaggccttcgacagcgacgtgaccgacagcagcagcggcggcgagagcgacatcgaggaggaggagctgaccagagccgaccccgagcagagacacgtgcccctgagaagaagaagcgagtggaagtgggccgccgacagagccgccatcgtgagcagatggaactggctgcaggcccacgtgagcgacctggagtacagaatcagacagcagaccgacatctacaagcagatcagagccaacaagggcctgatcgtgctgggcgaggtgcccccccccgagcacaccaccgacctgttcctgcccctgagcagcgaggtgaagaccgaccacggcaccgacaagctgatcgagagcgtgagccagcccctggagaaccacggcgccagaatcatcggccacatcagcgagagcctgagcaccaagagctgcggcgccctgagacccgtgaacggcgtgatcaacaccctgcagcccgtgctggccgaccacatccccggcgacagcagcgacgccgaggagcagctgcacaagaagcagagactgaacctggtgagcagcagcagcgacggcacctgcgtggccgccagaaccagacccgtgctgagctgcaagaagagaagactggtgagacccaacagcatcgtgcccctgagcaagaaggtgcacagaaacagcaccatcagacccggctgcgacgtgaaccccagctgcgccctgtgcggcagcggcagcatcaacaccatgccccccgagatccactacgaggcccccctgctggagagactgagccagctggacagctgcgtgcaccccgtgctggccttccccgacgacgtgcccaccagcctgcacttccagagcatgctgaagagccagtggcagaacaagcccttcgacaagatcaagccccccaagaagctgagcctgaagcacagagcccccatgcccggcagcctgcccgacagcgccagaaaggacagacacaagctggtgagcagcttcctgaccaccgccaagctgagccaccaccagaccagacccgacagaacccacagacagcacctggacgacgtgggcgccgtgcccatggtggagagagtgaccgcccccaaggccgagagactgctgaacccccccccccccgtgcacgaccccaaccacagcaagatgagactgagagaccacagcagcgagagaagcgaggtgctgaagcaccacaccgacatgagcagcagcagctacctggccgccacccaccaccccccccacagccccctggtgagacagctgagcaccagcagcgacagccccgcccccgccagcagcagcagccaggtgaccgccagcaccagccagcagcccgtgagaagaagaagaggcgagagcagcttcgacatcaacaacatcgtgatccccatgagcgtggccgccaccaccagagtggagaagctgcagtacaaggagatcctgacccccagctggagagaggtggacctgcagagcctgaagggcagccccgacgaggagaacgaggagatcgaggacctgagcgacgccgccttcgccgccctgcacgccaagtgcgaggagatggagagagccagatggctgtggaccaccagcgtgcccccccagagaagaggcagcagaagctacagaagcagcgacggcagaaccaccccccagctgggcagcgccaaccccagcaccccccagcccgccagccccgacgtgagcagcagccacagcctgagcgagtacagccacggccagagccccagaagccccatcagccccgagctgcacagcgcccccctgacccccgtggccagagacacccccagacacctggccagcgaggacaccagatgcagcacccccgagctgggcctggacgagcagagcgtgcagccctgggagagaagaaccttccccctggcccacagcccccaggccgagtgcgaggaccagctggacgcccaggagagagccgccagatgcaccagaagaaccagcggcagcaagaccggcagagagaccgaggccgcccccaccagcccccccatcgtgcccctgaagagcagacacctggtggccgccgccaccgcccagagacccacccacagatag

SEQ ID NO: 85993 - DNA, 1200 bp, synthetic construct
  misc_feature 1..1200: note = Description of Artificial Sequence: Synthetic coding sequence
  source 1..1200: mol_type = other DNA
atgccccccgagatccactacgaggcccccctgctggagagactgagccagctggacagctgcgtgcaccccgtgctggccttccccgacgacgtgcccaccagcctgcacttccagagcatgctgaagagccagtggcagaacaagcccttcgacaagatcaagccccccaagaagctgagcctgaagcacagagcccccatgcccggcagcctgcccgacagcgccagaaaggacagacacaagctggtgagcagcttcctgaccaccgccatgctgaagcaccacaccgacatgagcagcagcagctacctggccgccacccaccaccccccccacagccccctggtgagacagctgagcaccagcagcgacagccccgcccccgccagcagcagcagccaggtgaccgccagcaccagccagcagcccgtgagaagaagaagaggcgagagcagcttcgacatcaacaacatcgtgatccccatgagcgtggccgccaccaccagagtggagaagctgcagtacaaggagatcctgacccccagctggagagaggtggacctgcagagcctgaagggcagccccgacgaggagaacgaggagatcgaggacctgagcgacgccgccttcgccgccctgcacgccaagtgcgaggagatggagagagccagatggctgtggaccaccagcgtgcccccccagagaagaggcagcagaagctacagaagcagcgacggcagaaccaccccccagctgggcagcgccaaccccagcaccccccagcccgccagccccgacgtgagcagcagccacagcctgagcgagtacagccacggccagagccccagaagccccatcagccccgagctgcacagcgcccccctgacccccgtggccagagacacccccagacacctggccagcgaggacaccagatgcagcacccccgagctgggcctggacgagcagagcgtgcagccctgggagagaagaaccttccccctggcccacagcccccaggccgagtgcgaggaccagctggacgcccaggagagagccgccagatgcaccagaagaaccagcggcagcaagaccggcagagagaccgaggccgcccccaccagcccccccatcgtgcccctgaagagcagacacctggtggccgccgccaccgcccagagacccacccacagatag

SEQ ID NO: 85994 - DNA, 3318 bp, synthetic construct; identical to SEQ ID NO: 85992
  misc_feature 1..3318: note = Description of Artificial Sequence: Synthetic coding sequence
  source 1..3318: mol_type = other DNA

SEQ ID NO: 85995 - DNA, 3318 bp, synthetic construct; identical to SEQ ID NO: 85992
  misc_feature 1..3318: note = Description of Artificial Sequence: Synthetic coding sequence
  source 1..3318: mol_type = other DNA

SEQ ID NO: 85996 - DNA, 3318 bp, synthetic construct; identical to SEQ ID NO: 85992
  misc_feature 1..3318: note = Description of Artificial Sequence: Synthetic coding sequence
  source 1..3318: mol_type = other DNA

SEQ ID NO: 85997 - DNA, 936 bp, synthetic construct
  misc_feature 1..936: note = Description of Artificial Sequence: Synthetic coding sequence
  source 1..936: mol_type = other DNA
atgagcctgctgatgatcagcgagaacgtgaagctggccagagagtacgccctgctgggcaactacgacagcgccatggtgtactaccagggcgtgctggaccagatgaacaagtacctgtacagcgtgaaggacacctacctgcagcagaagtggcagcaggtgtggcaggagatcaacgtggaggccaagcacgtgaaggacatcatgaagaccctggagagcttcaagctggacagcacccccctgaaggccgcccagcacgacctgcccgccagcgagggcgaggtgtggagcatgcccgtgcccgtggagagaagacccagccccggccccagaaagagacagagcagccagtacagcgaccccaagagccacggcaacagacccagcaccaccgtgagagtgcacagaagcagcgcccagaacgtgcacaacgacagaggcaaggccgtgagatgcagagagaagaaggagcagaacaagggcagagaggagaagggcgtgctgatggtgggcccccccggcaccggcaagaccctgctggccaaggccgtggccaccgagtgcaagaccaccttcttcaacgtgagcagcagcaccctgaccagcaagtacagaggcgagagcgagaagctggtgagactgctgttcgagatggccagattctacagccccgccaccatcttcatcgacgagatcgacagcatctgcagcagaagaggcaccagcgaggagcacgaggccagcagaagagtgaaggccgagctgctggtgcagatggacggcgtgggcggcaccagcgagaacgacgaccccagcaagatggtgatggtgctggccgccaccaacttcccctgggacatcgacgaggccctgagaagaagactggagaagagaatctacatccccctgcccagcggcatgagaccctag

SEQ ID NO: 85998 - DNA, 1476 bp, synthetic construct
  misc_feature 1..1476: note = Description of Artificial Sequence: Synthetic coding sequence
  source 1..1476: mol_type = other DNA
atgagcctgctgatgatcagcgagaacgtgaagctggccagagagtacgccctgctgggcaactacgacagcgccatggtgtactaccagggcgtgctggaccagatgaacaagtacctgtacagcgtgaaggacacctacctgcagcagaagtggcagcaggtgtggcaggagatcaacgtggaggccaagcacgtgaaggacatcatgaagaccctggagagcttcaagctggacagcacccccctgaaggccgcccagcacgacctgcccgccagcgagggcgaggtgtggagcatgcccgtgcccgtggagagaagacccagccccggccccagaaagagacagagcagccagtacagcgaccccaagagccacggcaacagacccagcaccaccgtgagagtgcacagaagcagcgcccagaacgtgcacaacgacagaggcaaggccgtgagatgcagagagaagaaggagcagaacaagggcagagaggagaagaacaagagccccgccgccgtgaccgagcccgagaccaacaagttcgacagcaccggctacgacaaggacctggtggaggccctggagagagacatcatcagccagaaccccaacgtgagatgggacgacatcgccgacctggtggaggccaagaagctgctgaaggaggccgtggtgctgcccatgtggatgcccgagttcttcaagggcatcagaagaccctggaagggcgtgctgatggtgggcccccccggcaccggcaagaccctgctggccaaggccgtggccaccgagtgcaagaccaccttcttcaacgtgagcagcagcaccctgaccagcaagtacagaggcgagagcgagaagctggtgagactgctgttcgagatggccagattctacagccccgccaccatcttcatcgacgagatcgacagcatctgcagcagaagaggcaccagcgaggagcacgaggccagcagaagagtgaaggccgagctgctggtgcagatggacggcgtgggcggcaccagcgagaacgacgaccccagcaagatggtgatggtgctggccgccaccaacttcccctgggacatcgacgaggccctgagaagaagactggagaagagaatctacatccccctgcccagcgccaagggcagagaggagctgctgagaatcagcctgagagagctggagctggccgacgacgtggacctggccagcatcgccgagaacatggagggctacagcggcgccgacatcaccaacgtgtgcagagacgccagcctgatggccatgagaagaagaatcgagggcctgacccccgaggagatcagaaacctgagcaaggaggagatgcacatgcccaccaccatggaggacttcgagatggccctgaagaaggtgagcaagagcgtgagcgccgccgacatcgagagatacgagaagtggatcttcgagttcggcagctgctag

SEQ ID NO: 85999 - DNA, 1476 bp, synthetic construct; identical to SEQ ID NO: 85998
  misc_feature 1..1476: note = Description of Artificial Sequence: Synthetic coding sequence
  source 1..1476: mol_type = other DNA

SEQ ID NO: 86000 - DNA, 636 bp, synthetic construct
  misc_feature 1..636: note = Description of Artificial Sequence: Synthetic coding sequence
  source 1..636: mol_type = other DNA
atgagcctgctgatgatcagcgagaacgtgaagctggccagagagtacgccctgctgggcaactacgacagcgccatggtgtactaccagggcgtgctggaccagatgaacaagtacctgtacagcgtgaaggacacctacctgcagcagaagtggcagcaggtgtggcaggagatcaacgtggaggccaagcacgtgaaggacatcatgaagaccctggagagcttcaagctggacagcacccccctgaaggccgcccagcacgacctgcccgccagcgagggcgaggtgtggagcatgcccgtgcccgtggagagaagacccagccccggccccagaaagagacagagcagccagtacagcgaccccaagagccacggcaacagacccagcaccaccgtgagagtgcacagaagcagcgcccagaacgtgcacaacgacagaggcaaggccgtgagatgcagagagaagaaggagcagaacaagggcagagaggagaagaacaagagccccgccgccgtgaccgagcccgagaccaacaagttcgacagcaccggctacgacaaggacctggtggaggccctggagagagacatcatcagccagaaccccaacgtgagatgggacgacatctag

SEQ ID NO: 86001 - DNA, 843 bp, synthetic construct
  misc_feature 1..843: note = Description of Artificial Sequence: Synthetic coding sequence
  source 1..843: mol_type = other DNA
atgagcctgctgatgatcagcgagaacgtgaagctggccagagagtacgccctgctgggcaactacgacagcgccatggtgtactaccagggcgtgctggaccagatgaacaagtacctgtacagcgtgaaggacacctacctgcagcagaagtggcagcaggtgtggcaggagatcaacgtggaggccaagcacgtgaaggacatcatgaagaccctggagagcttcaagctggacagcacccccctgaaggccgcccagcacgacctgcccgccagcgagggcgaggtgtggagcatgcccgtgcccgtggagagaagacccagccccggccccagaaagagacagagcagccagtacagcgaccccaagagccacggcaacagacccagcaccaccgtgagagtgcacagaagcagcgcccagaacgtgcacaacgacagaggcaaggccgtgagatgcagagagaagaaggagcagaacaagggcagagaggagaagaacaagagccccgccgccgtgaccgagcccgagaccaacaagttcgacagcaccggctacgacaaggacctggtggaggccctggagagagacatcatcagccagaaccccaacgtgagatgggacgacatcgccgacctggtggaggccaagaagctgctgaaggaggccgtggtgctgcccatgtggatgcccgagttcttcaagggcatcagaagaccctggaagggcgtgctgatggtgggcccccccggcaccggcaagaccctgctggccaaggccgtggccaccgagtgcaagaccaccttcttcaacgtgagcagcagcaccctgaccagctag

SEQ ID NO: 86002 - DNA, 429 bp, synthetic construct
  misc_feature 1..429: note = Description of Artificial Sequence: Synthetic coding sequence
  source 1..429: mol_type = other DNA
atgaactgcagcgagagccagagactgagaaccctgctgagcagactgctgctggagctgcaccacagaggcaacgccagcggcctgggcgccggccccagacccagcatgggcatgggcgtggtgcccgaccccttcgtgggcagagaggtgaccagcgccaagggcgacgacgcctacctgtacatcctgctgatcatgatcttctacgcctgcctggccggcggcctgatcctggcctacaccagaagcagaaagctggtggaggccaaggacgagcccagccaggcctgcgccgagcacgagtgggcccccggcggcgccctgaccgccgacgccgaggccgccgccggcagccaggccgagggcagaagacagctggccagcgagggcctgcccgccctggcccagggcgccgagagagtgtag

SEQ ID NO: 86003 - DNA, 1509 bp, synthetic construct
  misc_feature 1..1509: note = Description of Artificial Sequence: Synthetic coding sequence
  source 1..1509: mol_type = other DNA
atgttcggcaccctgctgctgtactgcttcttcctggccaccgtgcccgccctggccgagaccggcggcgagagacagctgagccccgagaagagcgagatctggggccccggcctgaaggccgacgtggtgctgcccgccagatacttctacatccaggccgtggacaccagcggcaacaagttcaccagcagccccggcgagaaggtgttccaggtgaaggtgagcgcccccgaggagcagttcaccagagtgggcgtgcaggtgctggacagaaaggacggcagcttcatcgtgagatacagaatgtacgccagctacaagaacctgaaggtggagatcaagttccagggccagcacgtggccaagagcccctacatcctgaagggccccgtgtaccacgagaactgcgactgccccctgcaggacagcgccgcctggctgagagagatgaactgccccgagaccatcgcccagatccagagagacctggcccacttccccgccgtggaccccgagaagatcgccgtggagatccccaagagattcggccagagacagagcctgtgccactacaccctgaaggacaacaaggtgtacatcaagacccacggcgagcacgtgggcttcagaatcttcatggacgccatcctgctgagcctgaccagaaaggtgaagatgcccgacgtggagctgttcgtgaacctgggcgactggcccctggagaagaagaagagcaacagcaacatccaccccatcttcagctggtgcggcagcaccgacagcaaggacatcgtgatgcccacctacgacctgaccgacagcgtgctggagaccatgggcagagtgagcctggacatgatgagcgtgcaggccaacaccggccccccctgggagagcaagaacagcaccgccgtgtggagaggcagagacagcagaaaggagagactggagctggtgaagctgagcagaaagcaccccgagctgatcgacgccgccttcaccaacttcttcttcttcaagcacgacgagaacctgtacggccccatcgtgaagcacatcagcttcttcgacttcttcaagcacaagtaccagatcaacatcgacggcaccgtggccgcctacagactgccctacctgctggtgggcgacagcgtggtgctgaagcaggacagcatctactacgagcacttctacaacgagctgcagccctggaagcactacatccccgtgaagagcaacctgagcgacctgctggagaagctgaagtgggccaaggaccacgacgaggaggccaagaagatcgccaaggccggccaggagttcgccagaaacaacctgatgggcgacgacatcttctgctactacttcaagctgttccaggagtacgccaacctgcaggtgagcgagccccagatcagagagggcatgaagagagtggagccccagaccgaggacgacctgttcccctgcacctgccacagaaagaagaccaaggacgagctgtag

SEQ ID NO: 86004 - DNA, 1065 bp, synthetic construct
  misc_feature 1..1065: note = Description of Artificial Sequence: Synthetic coding sequence
  source 1..1065: mol_type = other DNA
atgagcgccggcggcggcagagccttcgcctggcaggtgttcccccccatgcccacctgcagagtgtacggcaccgtggcccaccaggacggccacctgctggtgctgggcggctgcggcagagccggcctgcccctggacaccgccgagaccctggacatggccagccacacctggctggccctggcccccctgcccaccgccagagccggcgccgccgccgtggtgctgggcaagcaggtgctggtggtgggcggcgtggacgaggtgcagagccccgtggccgccgtggaggccttcctgatggacgagggcagatgggagagaagagccaccctgccccaggccgccatgggcgtggccaccgtggagagagacggcatggtgtacgccctgggcggcatgggccccgacaccgccccccaggcccaggtgagagtgtacgagcccagaagagactgctggctgagcctgcccagcatgcccaccccctgctacggcgccagcaccttcctgcacggcaacaagatctacgtgctgggcggcagacagggcaagctgcccgtgaccgccttcgaggccttcgacctggaggccagaacctggaccagacaccccagcctgcccagcagaagagccttcgccggctgcgccatggccgagggcagcgtgttcagcctgggcggcctgcagcagcccggcccccacaacttctacagcagaccccacttcgtgaacaccgtggagatgttcgacctggagcacggcagctggaccaagctgcccagaagcctgagaatgagagacaagagagccgacttcgtggtgggcagcctgggcggccacatcgtggccatcggcggcctgggcaaccagccctgccccctgggcagcgtggagagcttcagcctggccagaagaagatgggaggccctgcccgccatgcccaccgccagatgcagctgcagcagcctgcaggccggccccagactgttcgtgatcggcggcgtggcccagggccccagccaggccgtggaggccctgtgcctgagagacggcgtgtag

SEQ ID NO: 86005 - DNA, 417 bp, synthetic construct
  misc_feature 1..417: note = Description of Artificial Sequence: Synthetic coding sequence
  source 1..417: mol_type = other DNA
atgttcgacctggagcacggcagctggaccaagctgcccagaagcctgagaatgagagacaagagagccgacttcgtggtgggcagcctgggcggccacatcgtggccatcggcggcctgggcaaccagccctgccccctgggcagcgtggagagcttcagcctggccagaagaagatgggaggccctgcccgccatgcccaccgccagatgcagctgcagcagcctgcaggccggccccagactgttcgtgatcggcggcgtggcccagggccccagccaggccgtggaggccctgtgcctgagagacggcgagggcctggtgggcgccgtgcactggagcagcagcctgcccgaggccgccatcagcatggcccccttcgccgccgaggacacccactgcggcagcgtgggctag

SEQ ID NO: 86006 - DNA, 1821 bp, synthetic construct
  misc_feature 1..1821: note = Description of Artificial Sequence: Synthetic coding sequence
  source 1..1821: mol_type = other DNA
atggacagccagagagagctggccgaggagctgagactgtaccagagcaccctgctgcaggacggcctgaaggacctgctggacgagaagaagttcatcgactgcaccctgaaggccggcgacaagagcctgccctgccacagactgatcctgagcgcctgcagcccctacttcagagagtacttcctgagcgagatcgacgaggccaagaagaaggaggtggtgctggacaacgtggaccccgccatcctggacctgatcatcaagtacctgtacagcgccagcatcgacctgaacgacggcaacgtgcaggacatcttcgccctggccagcagattccagatccccagcgtgttcaccgtgtgcgtgagctacctgcagaagagactggcccccggcaactgcctggccatcctgagactgggcctgctgctggactgccccagactggccatcagcgccagagagttcgtgagcgacagattcgtgcagatctgcaaggaggaggacttcatgcagctgagcccccaggagctgatcagcgtgatcagcaacgacagcctgaacgtggagaaggaggaggccgtgttcgaggccgtgatgaagtgggtgagaaccgacaaggagaacagagtgaagaacctgagcgaggtgttcgactgcatcagattcagactgatgaccgagaagtacttcaaggaccacgtggagaaggacgacatcatcaagagcaaccccgacctgcagaagaagatcaaggtgctgaaggacgccttcgccggcaagctgcccgagcccagcaagaacgccgccaagaccggcgccggcgaggtgaacggcgacgtgggcgacgaggacctgctgcccggctacctgaacgacatccccagacacggcatgttcgtgaaggacctgatcctgctggtgaacgacaccgccgccgtggcctacgaccccaccgagaacgagtgctacctgaccgccctggccgagcagatccccagaaaccacagcagcatcgtgacccagcagaaccagatctacgtggtgggcggcctgtacgtggacgaggagaacaaggaccagcccctgcagagctacttcttccagctggacagcatcgccagcgagtgggtgggcctgccccccctgcccagcgccagatgcctgttcggcctgggcgaggtggacgacaagatctacgtggtggccggcaaggacctgcagaccgaggccagcctggacagcgtgctgtgctacgaccccgtggccgccaagtggaacgaggtgaagaagctgcccatcaaggtgtacggccacaacgtgatcagccacaagggcatgatctactgcctgggcggcaagaccgacgacaagaagtgcaccaacagagtgttcatcttcaaccccaagaagggcgactggaaggacctggcccccatgaagatccccagaagcatgttcggcgtggccgtgcacaagggcaagatcgtgatcgccggcggcgtgaccgaggacggcctgagcgccagcgtggaggccttcgacctgaccaccaacaagtgggacgtgatgaccgagttcccccaggagagaagcagcatcagcctggtgagcctggccggcagcctgtacgccatcggcggcttcgccatgatccagctggagagcaaggagttcgcccccaccgaggtgaacgacatctggaagtacgaggacgacaagaaggagtgggccggcatgctgaaggagatcagatacgccagcggcgccagctgcctggccaccagactgaacctgttcaagctgagcaagctgtag

SEQ ID NO: 86007 - DNA, 1377 bp, synthetic construct
  misc_feature 1..1377: note = Description of Artificial Sequence: Synthetic coding sequence
  source 1..1377: mol_type = other DNA
atggccagaggcccccagaccctggtgcaggtgtgggtgggcggccagctgttccaggccgacagagccctgctggtggagcactgcggcttcttcagaggcctgttcagaagcggcatgagagagaccagagccgccgaggtgagactgggcgtgctgagcgccggcggcttcagagccaccctgcaggtgctgagaggcgacagacccgccctggccgccgaggacgagctgctgcaggccgtggagtgcgccgccttcctgcaggcccccgccctggccagattcctggagcacaacctgaccagcgacaactgcgccctgctgtgcgacgccgccgccgccttcggcctgagagacgtgttccacagcgccgccctgttcatctgcgacggcgagagagagctggccgccgagctggccctgcccgaggccagagcctacgtggccgccctgagacccagcagctacgccgccgtgagcacccacacccccgcccccggcttcctggaggacgccagcagaaccctgtgctacctggacgaggaggaggacgcctggagaaccctggccgccctgcccctggaggccagcaccctgctggccggcgtggccaccctgggcaacaagctgtacatcgtgggcggcgtgagaggcgccagcaaggaggtggtggagctgggcttctgctacgaccccgacggcggcacctggcacgagttccccagcccccaccagcccagatacgacaccgccctggccggcttcgacggcagactgtacgccatcggcggcgagttccagagaacccccatcagcagcgtggagagatacgaccccgccgccggctgctggagcttcgtggccgacctgccccagcccgccgccggcgtgccctgcgcccaggcctgcggcagactgttcgtgtgcctgtggagacccgccgacaccaccgccgtggtggagtacgccgtgagaaccgacgcctggctgcccgtggccgagctgagaagaccccagagctacggccactgcatggtggcccacagagacagcctgtacgtggtgagaaacggccccagcgacgacttcctgcactgcgccatcgactgcctgaacctggccaccggccagtggaccgccctgcccggccagttcgtgaacagcaagggcgccctgttcaccgccgtggtgagaggcgacaccgtgtacaccgtgaacagaatgttcaccctgctgtacgccatcgagggcggcacctggagactgctgagagagaaggccggcttccccagacccggcagcctgcagaccttcctgctgagactgccccccggcgcccccggccccgtgaccagcaccaccgccgagctgtag

SEQ ID NO: 86008 - DNA, 2247 bp, synthetic construct
  misc_feature 1..2247: note = Description of Artificial Sequence: Synthetic coding sequence
  source 1..2247: mol_type = other DNA
atgagcggcagcggcagaaaggacttcgacgtgaagcacatcctgagactgagatggaagctgttcagccaccccagccccagcaccggcggccccgccggcggcggctgcctgcagcaggacggcagcggcagcttcgagcactggggccccagccagagcagactgctgaagagccaggagagaagcggcgtgagcaccttctggaagaagcccagcagcagcagcagcagcagcagcagccccagcagcagcagcagcagcttcaaccccctgaacggcaccctgctgcccgtggccaccagactgcagcagggcgcccccggccagggcacccagcagcccgccagaaccctgttctacgtggagagcctggaggaggaggtggtgcccggcatggacttccccggcccccacgagaagggcctggtgctgcaggagctgaaggtggagcccgacaacagcagccaggccaccggcgagggctgcggccacagactgagcagcaccggccacagcatgaccccccagagcgacctggacagcagcagcagcgaggagttctaccaggccgtgcaccacgccgagcagaccttcagaaagatggagagctacctgaagcagcagcagctgtgcgacgtgatcctgatcgtgggcaacagaaagatccccgcccacagactggtgctgagcagcgtgagcgactacttcgccgccatgttcaccagcgacgtgtgcgaggccaagcaggaggagatcaagatggagggcatcgaccccaacgccctgtgggacctggtgcagttcgcctacaccggctgcctggagctgaaggaggacaccatcgagaacctgctggccgccgcctgcctgctgcagctgccccaggtggtggaggtgtgctgccacttcctgatgaagctgctgcaccccagcaactgcctgggcatcagagccttcgccgacgcccagggctgcatcgagctgatgaaggtggcccacagctacaccatggagaacatcatggaggtgatcagaaaccaggagttcctgctgctgcccgccgaggagctgcacaagctgctggccagcgacgacgtgaacgtgcccgacgaggagaccatcttccacgccctgatgatgtgggtgaagtacgacatgcagagcagatgcaacgacctgagcatgctgctggccttcatcagactgcccctgctgcccccccagatcctggccgacctggagaaccacgccctgttcaagaacgacctggagtgccagaagctgatcctggaggccatgaagtaccacctgctgcccgagagaagaaccctgatgcagagccccagaaccaagcccagaaagagcaccgtgggcaccctgtacgccgtgggcggcatggacaacaacaagggcgccaccaccatcgagaagtacgacctgagaaccaacctgtggatccaggccggcatgatgaacggcagaagactgcagttcggcgtggccgtgatcgacgacaagctgttcgtgatcggcggcagagacggcctgaagaccctgaacaccgtggagtgctacaaccccaagaccaagacctggaccgtgctgccccccatgagcacccacagacacggcctgggcgtgaccgtgctggagggccccatctacgccgtgggcggccacgacggctggagctacctgaacaccgtggagagatgggacccccagagccagcagtggaccttcgtggccagcatgagcatcgccagaagcaccgtgggcgtggccgccctgaacggcaagctgtacagcgtgggcggcagagacggcagcagctgcctgagcagcatggagtactacgacccccacaccaacaagtggaacatgtgcgcccccatgtgcaagagaagaggcggcgtgggcgtggccacctgcgacggcttcctgtacgccgtgggcggccacgacgcccccgccagcaaccactgcagcagactgctggactacgtggagagatacgaccccaagaccgacacctggaccatggtggcccccctgagcatgcccagagacgccgtgggcgtgtgcctgctgggcgacagactgtacgccgtgggcggctacgacggccagacctacctgaacaccatggagagctacgacccccagaccaacgagtggacccagatggccagcctgaacatcggcagagccggcgcctgcgtggtggtgatcaagcagccctag

SEQ ID NO: 86009 - DNA, 1668 bp, synthetic construct
  misc_feature 1..1668: note = Description of Artificial Sequence: Synthetic coding sequence
  source 1..1668: mol_type = other DNA
atggacttccccggcccccacgagaagggcctggtgctgcaggagctgaaggtggagcccgacaacagcagccaggccaccggcgagggctgcggccacagactggtgctgagcagcgtgagcgactacttcgccgccatgttcaccagcgacgtgtgcgaggccaagcaggaggagatcaagatggagggcatcgaccccaacgccctgtgggacctggtgcagttcgcctacaccggctgcctggagctgaaggaggacaccatcgagaacctgctggccgccgcctgcctgctgcagctgccccaggtggtggaggtgtgctgccacttcctgatgaagctgctgcaccccagcaactgcctgggcatcagagccttcgccgacgcccagggctgcatcgagctgatgaaggtggcccacagctacaccatggagaacatcatggaggtgatcagaaaccaggagttcctgctgctgcccgccgaggagctgcacaagctgctggccagcgacgacgtgaacgtgcccgacgaggagaccatcttccacgccctgatgatgtgggtgaagtacgacatgcagagcagatgcaacgacctgagcatgctgctggccttcatcagactgcccctgctgcccccccagatcctggccgacctggagaaccacgccctgttcaagaacgacctggagtgccagaagctgatcctggaggccatgaagtaccacctgctgcccgagagaagaaccctgatgcagagccccagaaccaagcccagaaagagcaccgtgggcaccctgtacgccgtgggcggcatggacaacaacaagggcgccaccaccatcgagaagtacgacctgagaaccaacctgtggatccaggccggcatgatgaacggcagaagactgcagttcggcgtggccgtgatcgacgacaagctgttcgtgatcggcggcagagacggcctgaagaccctgaacaccgtggagtgctacaaccccaagaccaagacctggaccgtgctgccccccatgagcacccacagacacggcctgggcgtgaccgtgctggagggccccatctacgccgtgggcggccacgacggctggagctacctgaacaccgtggagagatgggacccccagagccagcagtggaccttcgtggccagcatgagcatcgccagaagcaccgtgggcgtggccgccctgaacggcaagctgtacagcgtgggcggcagagacggcagcagctgcctgagcagcatggagtactacgacccccacaccaacaagtggaacatgtgcgcccccatgtgcaagagaagaggcggcgtgggcgtggccacctgcgacggcttcctgtacgccgtgggcggccacgacgcccccgccagcaaccactgcagcagactgctggactacgtggagagatacgaccccaagaccgacacctggaccatggtggcccccctgagcatgcccagagacgccgtgggcgtgtgcctgctgggcgacagactgtacgccgtgggcggctacgacggccagacctacctgaacaccatggagagctacgacccccagaccaacgagtggacccagatggccagcctgaacatcggcagagccggcgcctgcgtggtggtgatcaagcagccctag

SEQ ID NO: 86010 - DNA, 1167 bp, synthetic construct
  misc_feature 1..1167: note = Description of Artificial Sequence: Synthetic coding sequence
  source 1..1167: mol_type = other DNA
atgagcagaagcggcgacagaaccagcaccttcgaccccagccacagcgacaacctgctgcacggcctgaacctgctgtggagaaagcagctgttctgcgacgtgaccctgaccgcccagggccagcagttccactgccacaaggccgtgctggccagctgcagccagtacttcagaagcctgttcagcagccacccccccctgggcggcggcgtgggcggccaggacggcctgggcgcccccaaggaccagcagcagcccccccagcagcagcccagccagcagcagcagccccccccccaggaggagcccggcacccccagcagcagccccgacgacaagctgctgaccagccccagagccatcaacaacctggtgctgcagggctgcagcagcatcggcctgagactggtgctggagtacctgtacaccgccaacgtgaccctgagcctggacaccgtggaggaggtgctgagcgtgagcaagatcctgcacatcccccaggtgaccaagctgtgcgtgcagttcctgaacgaccagatcagcgtgcagaactacaagcaggtgtgcaagatcgccgccctgcacggcctggaggagaccaagaagctggccaacaagtacctggtggaggacgtgctgctgctgaacttcgaggagatgagagccctgctggacagcctgcccccccccgtggagagcgagctggccctgttccagatgagcgtgctgtggctggagcacgacagagagaccagaatgcagtacgcccccgacctgatgaagagactgagattcgccctgatccccgcccccgagctggtggagagagtgcagagcgtggacttcatgagaaccgaccccgtgtgccagaagctgctgctggacgccatgaactaccacctgatgcccttcagacagcactgcagacagagcctggccagcagaatcagaagcaacaagaagatgctgctgctggtgggcggcctgccccccggccccgacagactgcccagcaacctggtgcagtactacgacgacgagaagaagacctggaagatcctgaccatcaccggcccccaccccatcagcggcaagcaggagagcgccagcagccccgagttcagaagaagaaagaccagagagttcagcaacaacaccatgtag

SEQ ID NO: 86011 - DNA, 1887 bp, synthetic construct
  misc_feature 1..1887: note = Description of Artificial Sequence: Synthetic coding sequence
  source 1..1887: mol_type = other DNA
atgagcagaagcggcgacagaaccagcaccttcgaccccagccacagcgacaacctgctgcacggcctgaacctgctgtggagaaagcagctgttctgcgacgtgaccctgaccgcccagggccagcagttccactgccacaaggccgtgctggccagctgcagccagtacttcagaagcctgttcagcagccacccccccctgggcggcggcgtgggcggccaggacggcctgggcgcccccaaggaccagcagcagcccccccagcagcagcccagccagcagcagcagccccccccccaggaggagcccggcacccccagcagcagccccgacgacaagctgctgaccagccccagagccatcaacaacctggtgctgcagggctgcagcagcatcggcctgagactggtgctggagtacctgtacaccgccaacgtgaccctgagcctggacaccgtggaggaggtgctgagcgtgagcaagatcctgcacatcccccaggtgaccaagctgtgcgtgcagttcctgaacgaccagatcagcgtgcagaactacaagcaggtgtgcaagatcgccgccctgcacggcctggaggagaccaagaagctggccaacaagtacctggtggaggacgtgctgctgctgaacttcgaggagatgagagccctgctggacagcctgcccccccccgtggagagcgagctggccctgttccagatgagcgtgctgtggctggagcacgacagagagaccagaatgcagtacgcccccgacctgatgaagagactgagattcgccctgatccccgcccccgagctggtggagagagtgcagagcgtggacttcatgagaaccgaccccgtgtgccagaagctgctgctggacgccatgaactaccacctgatgcccttcagacagcactgcagacagagcctggccagcagaatcagaagcaacaagaagatgctgctgctggtgggcggcctgccccccggccccgacagactgcccagcaacctggtgcagtactacgacgacgagaagaagacctggaagatcctgaccatcatgccctacaacagcgcccaccactgcgtggtggaggtggagaacttcctgttcgtgctgggcggcgaggaccagtggaaccccaacggcaagcacagcaccaacttcgtgagcagatacgaccccagattcaacagctggatccagctgccccccatgcaggagagaagagccagcttctacgcctgcagactggacaagcacctgtacgtgatcggcggcagaaacgagaccggctacctgagcagcgtggagtgctacaacctggagaccaacgagtggagatacgtgagcagcctgccccagcccctggccgcccacgccggcgccgtgcacaacggcaagatctacatcagcggcggcgtgcacaacggcgagtacgtgccctggctgtactgctacgaccccgtgatggacgtgtgggccagaaagcaggacatgaacaccaagagagccatccacaccctggccgtgatgaacgacagactgtacgccatcggcggcaaccacctgaagggcttcagccacctggacgtgatgctggtggagtgctacgaccccaagggcgaccagtggaacatcctgcagacccccatcctggagggcagaagcggccccggctgcgccgtgctggacgacagcatctacctggtgggcggctacagctggagcatgggcgcctacaagagcagcaccatctgctactgccccgagaagggcacctggaccgagctggagggcgacgtggccgagcccctggccggccccgcctgcgtgaccgtgatcctgcccagctgcgtgccctacaacaagtag

SEQ ID NO: 86012 - DNA, 1794 bp, synthetic construct
  misc_feature 1..1794: note = Description of Artificial Sequence: Synthetic coding sequence
  source 1..1794: mol_type = other DNA
atggtgtggctggaggccagaccccagatcctgttcgtgtgcaccaagcagggccaccagaagcccctggacagcaaggacgacaacaccgagaagcactgccccgtgaccgtgaacccctggcacatgaagaaggccttcaaggtgatgaacgagctgagaagccagaacctgctgtgcgacgtgaccatcgtggccgaggacatggagatcagcgcccacagagtggtgctggccgcctgcagcccctacttccacgccatgttcaccggcgagatgagcgagagcagagccaagagagtgagaatcaaggaggtggacggctggaccctgagaatgctgatcgactacgtgtacaccgccgagatccaggtgaccgaggagaacgtgcaggtgctgctgcccgccgccggcctgctgcagctgcaggacgtgaagaagacctgctgcgagttcctggagagccagctgcaccccgtgaactgcctgggcatcagagccttcgccgacatgcacgcctgcaccgacctgctgaacaaggccaacacctacgccgagcagcacttcgccgacgtggtgctgagcgaggagttcctgaacctgggcatcgagcaggtgtgcagcctgatcagcagcgacaagctgaccatcagcagcgaggagaaggtgttcgaggccgtgatcgcctgggtgaaccacgacaaggacgtgagacaggagttcatggccagactgatggagcacgtgagactgcccctgctgcccagagagtacctggtgcagagagtggaggaggaggccctggtgaagaacagcagcgcctgcaaggactacctgatcgaggccatgaagtaccacctgctgcccaccgagcagagaatcctgatgaagagcgtgagaaccagactgagaacccccatgaacctgcccaagctgatggtggtggtgggcggccaggcccccaaggccatcagaagcgtggagtgctacgacttcaaggaggagagatggcaccaggtggccgagctgcccagcagaagatgcagagccggcatggtgtacatggccggcctggtgttcgccgtgggcggcttcaacggcagcctgagagtgagaaccgtggacagctacgaccccgtgaaggaccagtggaccagcgtggccaacatgagagacagaagaagcaccctgggcgccgccgtgctgaacggcctgctgtacgccgtgggcggcttcgacggcagcaccggcctgagcagcgtggaggcctacaacatcaagagcaacgagtggttccacgtggcccccatgaacaccagaagaagcagcgtgggcgtgggcgtggtgggcggcctgctgtacgccgtgggcggctacgacggcgccagcagacagtgcctgagcaccgtggagtgctacaacgccaccaccaacgagtggacctacatcgccgagatgagcaccagaagaagcggcgccggcgtgggcgtgctgaacaacctgctgtacgccgtgggcggccacgacggccccctggtgagaaagagcgtggaggtgtacgaccccaccaccaacgcctggagacaggtggccgacatgaacatgtgcagaagaaacgccggcgtgtgcgccgtgaacggcctgctgtacgtggtgggcggcgacgacggcagctgcaacctggccagcgtggagtactacaaccccaccaccgacaagtggaccgtggtgagcagctgcatgagcaccggcagaagctacgccggcgtgaccgtgatcgacaagcccctgtag

SEQ ID NO: 86013 - DNA, 2640 bp, synthetic construct
  misc_feature 1..2640: note = Description of Artificial Sequence: Synthetic coding sequence
  source 1..2640: mol_type = other DNA
atgagactgcacctgctgctgctgctggccctgtgcggcgccggcaccaccgccgccgagctgagctacagcctgagaggcaactggagcatctgcaacggcaacggcagcctggagctgcccggcgccgtgcccggctgcgtgcacagcgccctgttccagcagggcctgatccaggacagctactacagattcaacgacctgaactacagatgggtgagcctggacaactggacctacagcaaggagttcaagatccccttcgagatcagcaagtggcagaaggtgaacctgatcctggagggcgtggacaccgtgagcaagatcctgttcaacgaggtgaccatcggcgagaccgacaacatgttcaacagatacagcttcgacatcaccaacgtggtgagagacgtgaacagcatcgagctgagattccagagcgccgtgctgtacgccgcccagcagagcaaggcccacaccagataccaggtgccccccgactgcccccccctggtgcagaagggcgagtgccacgtgaacttcgtgagaaaggagcagtgcagcttcagctgggactggggccccagcttccccacccagggcatctggaaggacgtgagaatcgaggcctacaacatctgccacctgaactacttcaccttcagccccatctacgacaagagcgcccaggagtggaacctggagatcgagagcaccttcgacgtggtgagcagcaagcccgtgggcggccaggtgatcgtggccatccccaagctgcagacccagcagacctacagcatcgagctgcagcccggcaagagaatcgtggagctgttcgtgaacatcagcaagaacatcaccgtggagacctggtggccccacggccacggcaaccagaccggctacaacatgaccgtgctgttcgagctggacggcggcctgaacatcgagaagagcgccaaggtgtacttcagaaccgtggagctgatcgaggagcccatcaagggcagccccggcctgagcttctacttcaagatcaacggcttccccatcttcctgaagggcagcaactggatccccgccgacagcttccaggacagagtgaccagcgagctgctgagactgctgctgcagagcgtggtggacgccaacatgaacaccctgagagtgtggggcggcggcatctacgagcaggacgagttctacgagctgtgcgacgagctgggcatcatggtgtggcaggacttcatgttcgcctgcgccctgtaccccaccgaccagggcttcctggacagcgtgaccgccgaggtggcctaccagatcaagagactgaagagccaccccagcatcatcatctggagcggcaacaacgagaacgaggaggccctgatgatgaactggtaccacatcagcttcaccgacagacccatctacatcaaggactacgtgaccctgtacgtgaagaacatcagagagctggtgctggccggcgacaagagcagacccttcatcaccagcagccccaccaacggcgccgagaccgtggccgaggcctgggtgagccagaaccccaacagcaactacttcggcgacgtgcacttctacgactacatcagcgactgctggaactggaaggtgttccccaaggccagattcgccagcgagtacggctaccagagctggcccagcttcagcaccctggagaaggtgagcagcaccgaggactggagcttcaacagcaagttcagcctgcacagacagcaccacgagggcggcaacaagcagatgctgtaccaggccggcctgcacttcaagctgccccagagcaccgaccccctgagaaccttcaaggacaccatctacctgacccaggtgatgcaggcccagtgcgtgaagaccgagaccgagttctacagaagaagcagaagcgagatcgtggaccagcagggccacaccatgggcgccctgtactggcagctgaacgacatctggcaggcccccagctgggccagcctggagtacggcggcaagtggaagatgctgcactacttcgcccagaacttcttcgcccccctgctgcccgtgggcttcgagaacgagaacaccttctacatctacggcgtgagcgacctgcacagcgactacagcatgaccctgagcgtgagagtgcacacctggagcagcctggagcccgtgtgcagcagagtgaccgagagattcgtgatgaagggcggcgaggccgtgtgcctgtacgaggagcccgtgagcgagctgctgagaagatgcggcaactgcaccagagagagctgcgtggtgagcttctacctgagcgccgaccacgagctgctgagccccaccaactaccacttcctgagcagccccaaggaggccgtgggcctgtgcaaggcccagatcaccgccatcatcagccagcagggcgacatcttcgtgttcgacctggagaccagcgccgtggcccccttcgtgtggctggacgtgggcagcatccccggcagattcagcgacaacggcttcctgatgaccgagaagaccagaaccatcctgttctacccctgggagcccaccagcaagaacgagctggagcagagcttccacgtgaccagcctgaccgacatctactag

SEQ ID NO: 86014 - DNA, 1518 bp, synthetic construct
  misc_feature 1..1518: note = Description of Artificial Sequence: Synthetic coding sequence
  source 1..1518: mol_type = other DNA
atgagcgagagcagagccaagagagtgagaatcaaggaggtggacggctggaccctgagaatgctgatcgactacgtgtacaccgccgagatccaggtgaccgaggagaacgtgcaggtgctgctgcccgccgccggcctgctgcagctgcaggacgtgaagaagacctgctgcgagttcctggagagccagctgcaccccgtgaactgcctgggcatcagagccttcgccgacatgcacgcctgcaccgacctgctgaacaaggccaacacctacgccgagcagcacttcgccgacgtggtgctgagcgaggagttcctgaacctgggcatcgagcaggtgtgcagcctgatcagcagcgacaagctgaccatcagcagcgaggagaaggtgttcgaggccgtgatcgcctgggtgaaccacgacaaggacgtgagacaggagttcatggccagactgatggagcacgtgagactgcccctgctgcccagagagtacctggtgcagagagtggaggaggaggccctggtgaagaacagcagcgcctgcaaggactacctgatcgaggccatgaagtaccacctgctgcccaccgagcagagaatcctgatgaagagcgtgagaaccagactgagaacccccatgaacctgcccaagctgatggtggtggtgggcggccaggcccccaaggccatcagaagcgtggagtgctacgacttcaaggaggagagatggcaccaggtggccgagctgcccagcagaagatgcagagccggcatggtgtacatggccggcctggtgttcgccgtgggcggcttcaacggcagcctgagagtgagaaccgtggacagctacgaccccgtgaaggaccagtggaccagcgtggccaacatgagagacagaagaagcaccctgggcgccgccgtgctgaacggcctgctgtacgccgtgggcggcttcgacggcagcaccggcctgagcagcgtggaggcctacaacatcaagagcaacgagtggttccacgtggcccccatgaacaccagaagaagcagcgtgggcgtgggcgtggtgggcggcctgctgtacgccgtgggcggctacgacggcgccagcagacagtgcctgagcaccgtggagtgctacaacgccaccaccaacgagtggacctacatcgccgagatgagcaccagaagaagcggcgccggcgtgggcgtgctgaacaacctgctgtacgccgtgggcggccacgacggccccctggtgagaaagagcgtggaggtgtacgaccccaccaccaacgcctggagacaggtggccgacatgaacatgtgcagaagaaacgccggcgtgtgcgccgtgaacggcctgctgtacgtggtgggcggcgacgacggcagctgcaacctggccagcgtggagtactacaaccccaccaccgacaagtggaccgtggtgagcagctgcatgagcaccggcagaagctacgccggcgtgaccgtgatcgacaagcccctgtag

SEQ ID NO: 86015 - DNA, 1764 bp, synthetic construct
  misc_feature 1..1764: note = Description of Artificial Sequence: Synthetic coding sequence
  source 1..1764: mol_type = other DNA
atggagggcgagagcgtgaagctgagcagccagaccctgatccaggccggcgacgacgagaagaaccagagaaccatcaccgtgaaccccgcccacatgggcaaggccttcaaggtgatgaacgagctgagaagcaagcagctgctgtgcgacgtgatgatcgtggccgaggacgtggagatcgaggcccacagagtggtgctggccgcctgcagcccctacttctgcgccatgttcaccggcgacatgagcgagagcaaggccaagaagatcgagatcaaggacgtggacggccagaccctgagcaagctgatcgactacatctacaccgccgagatcgaggtgaccgaggagaacgtgcaggtgctgctgcccgccgccagcctgctgcagctgatggacgtgagacagaactgctgcgacttcctgcagagccagctgcaccccaccaactgcctgggcatcagagccttcgccgacgtgcacacctgcaccgacctgctgcagcaggccaacgcctacgccgagcagcacttccccgaggtgatgctgggcgaggagttcctgagcctgagcctggaccaggtgtgcagcctgatcagcagcgacaagctgaccgtgagcagcgaggagaaggtgttcgaggccgtgatcagctggatcaactacgagaaggagaccagactggagcacatggccaagctgatggagcacgtgagactgcccctgctgcccagagactacctggtgcagaccgtggaggaggaggccctgatcaagaacaacaacacctgcaaggacttcctgatcgaggccatgaagtaccacctgctgcccctggaccagagactgctgatcaagaaccccagaaccaagcccagaacccccgtgagcctgcccaaggtgatgatcgtggtgggcggccaggcccccaaggccatcagaagcgtggagtgctacgacttcgaggaggacagatgggaccagatcgccgagctgcccagcagaagatgcagagccggcgtggtgttcatggccggccacgtgtacgccgtgggcggcttcaacggcagcctgagagtgagaaccgtggacgtgtacgacggcgtgaaggaccagtggaccagcatcgccagcatgcaggagagaagaagcaccctgggcgccgccgtgctgaacgacctgctgtacgccgtgggcggcttcgacggcagcaccggcctggccagcgtggaggcctacagctacaagaccaacgagtggttcttcgtggcccccatgaacaccagaagaagcagcgtgggcgtgggcgtggtggagggcaagctgtacgccgtgggcggctacgacggcgccagcagacagtgcctgagcaccgtggagcagtacaaccccgccaccaacgagtggatctacgtggccgacatgagcaccagaagaagcggcgccggcgtgggcgtgctgagcggccagctgtacgccaccggcggccacgacggccccctggtgagaaagagcgtggaggtgtacgaccccggcaccaacacctggaagcaggtggccgacatgaacatgtgcagaagaaacgccggcgtgtgcgccgtgaacggcctgctgtacgtggtgggcggcgacgacggcagctgcaacctggccagcgtggagtactacaaccccgtgaccgacaagtggaccctgctgcccaccaacatgagcaccggcagaagctacgccggcgtggccgtgatccacaagagcctgtag

SEQ ID NO: 86016 - DNA, 906 bp, synthetic construct
  misc_feature 1..906: note = Description of Artificial Sequence: Synthetic coding sequence
  source 1..906: mol_type = other DNA
atggagggcgagagcgtgaagctgagcagccagaccctgatccaggccggcgacgacgagaagaaccagagaaccatcaccgtgaaccccgcccacatgggcaaggccttcaaggtgatgaacgagctgagaagcaagcagctgctgtgcgacgtgatgatcgtggccgaggacgtggagatcgaggcccacagagtggtgctggccgcctgcagcccctacttctgcgccatgttcaccggcgacatgagcgagagcaaggccaagaagatcgagatcaaggacgtggacggccagaccctgagcaagctgatcgactacatctacaccgccgagatcgaggtgaccgaggagaacgtgcaggtgctgctgcccgccgccagcctgctgcagctgatggacgtgagacagaactgctgcgacttcctgcagagccagctgcaccccaccaactgcctgggcatcagagccttcgccgacgtgcacacctgcaccgacctgctgcagcaggccaacgcctacgccgagcagcacttccccgaggtgatgctgggcgaggagttcctgagcctgagcctggaccaggtgtgcagcctgatcagcagcgacaagctgaccgtgagcagcgaggagaaggtgttcgaggccgtgatcagctggatcaactacgagaaggagaccagactggagcacatggccaagctgatggagcacgtgagactgcccctgctgcccagagactacctggtgcagaccgtggaggaggaggccctgatcaagaacaacaacacctgcaaggacttcctgatcgaggccatgaagtaccacctgctgcccctggaccagagactgctgatcaagaaccccagaaccaagcccagaacccccgtgagcctgcccaagtag

SEQ ID NO: 86017 - DNA, 1518 bp, synthetic construct
  misc_feature 1..1518: note = Description of Artificial Sequence: Synthetic coding sequence
  source 1..1518: mol_type = other DNA
atgagcgagagcaaggccaagaagatcgagatcaaggacgtggacggccagaccctgagcaagctgatcgactacatctacaccgccgagatcgaggtgaccgaggagaacgtgcaggtgctgctgcccgccgccagcctgctgcagctgatggacgtgagacagaactgctgcgacttcctgcagagccagctgcaccccaccaactgcctgggcatcagagccttcgccgacgtgcacacctgcaccgacctgctgcagcaggccaacgcctacgccgagcagcacttccccgaggtgatgctgggcgaggagttcctgagcctgagcctggaccaggtgtgcagcctgatcagcagcgacaagctgaccgtgagcagcgaggagaaggtgttcgaggccgtgatcagctggatcaactacgagaaggagaccagactggagcacatggccaagctgatggagcacgtgagactgcccctgctgcccagagactacctggtgcagaccgtggaggaggaggccctgatcaagaacaacaacacctgcaaggacttcctgatcgaggccatgaagtaccacctgctgcccctggaccagagactgctgatcaagaaccccagaaccaagcccagaacccccgtgagcctgcccaaggtgatgatcgtggtgggcggccaggcccccaaggccatcagaagcgtggagtgctacgacttcgaggaggacagatgggaccagatcgccgagctgcccagcagaagatgcagagccggcgtggtgttcatggccggccacgtgtacgccgtgggcggcttcaacggcagcctgagagtgagaaccgtggacgtgtacgacggcgtgaaggaccagtggaccagcatcgccagcatgcaggagagaagaagcaccctgggcgccgccgtgctgaacgacctgctgtacgccgtgggcggcttcgacggcagcaccggcctggccagcgtggaggcctacagctacaagaccaacgagtggttcttcgtggcccccatgaacaccagaagaagcagcgtgggcgtgggcgtggtggagggcaagctgtacgccgtgggcggctacgacggcgccagcagacagtgcctgagcaccgtggagcagtacaaccccgccaccaacgagtggatctacgtggccgacatgagcaccagaagaagcggcgccggcgtgggcgtgctgagcggccagctgtacgccaccggcggccacgacggccccctggtgagaaagagcgtggaggtgtacgaccccggcaccaacacctggaagcaggtggccgacatgaacatgtgcagaagaaacgccggcgtgtgcgccgtgaacggcctgctgtacgtggtgggcggcgacgacggcagctgcaacctggccagcgtggagtactacaaccccgtgaccgacaagtggaccctgctgcccaccaacatgagcaccggcagaagctacgccggcgtggccgtgatccacaagagcctgtag

SEQ ID NO: 86018 - DNA, 603 bp, synthetic construct
  misc_feature 1..603: note = Description of Artificial Sequence: Synthetic coding sequence
  source 1..603: mol_type = other DNA
atgagcagatgctgcagcagacagcccgcctgctgcagcagctggatgttcggcagaaccgccgtgaccagctgcagcctgagctgcatcccccccatcgcctgggccagcgtgcacctgcagatgtacacccccgccctgaccttctgcagcagacccatgcccacccagcacttccccgaggtgatgctgggcgaggagttcctgagcctgagcctggaccaggtgtgcagcctgatcagcagcgacaagctgaccgtgagcagcgaggagaaggtgttcgaggccgtgatcagctggatcaactacgagaaggagaccagactggagcacatggccaagctgatggagcacgtgagactgcccctgctgcccagagactacctggtgcagaccgtggaggaggaggccctgatcaagaacaacaacacctgcaaggacttcctgatcgaggccatgaagtaccacctgctgcccctggaccagagactgctgatcaagaaccccagaaccaagcccagaacccccgtgagcctgcccaagggcctggagtgcctggccgacagctgcaccccccaggtgggcatgatgggcctgtggtag

SEQ ID NO: 86019 - DNA, 1668 bp, synthetic construct
  misc_feature 1..1668: note = Description of Artificial Sequence: Synthetic coding sequence
  source 1..1668: mol_type = other DNA
atgggcaaggccttcaaggtgatgaacgagctgagaagcaagcagctgctgtgcgacgtgatgatcgtggccgaggacgtggagatcgaggcccacagagtggtgctggccgcctgcagcccctacttctgcgccatgttcaccggcgacatgagcgagagcaaggccaagaagatcgagatcaaggacgtggacggccagaccctgagcaagctgatcgactacatctacaccgccgagatcgaggtgaccgaggagaacgtgcaggtgctgctgcccgccgccagcctgctgcagctgatggacgtgagacagaactgctgcgacttcctgcagagccagctgcaccccaccaactgcctgggcatcagagccttcgccgacgtgcacacctgcaccgacctgctgcagcaggccaacgcctacgccgagcagcacttccccgaggtgatgctgggcgaggagttcctgagcctgagcctggaccaggtgtgcagcctgatcagcagcgacaagctgaccgtgagcagcgaggagaaggtgttcgaggccgtgatcagctggatcaactacgagaaggagaccagactggagcacatggccaagctgatggagcacgtgagactgcccctgctgcccagagactacctggtgcagaccgtggaggaggaggccctgatcaagaacaacaacacctgcaaggacttcctgatcgaggccatgaagtaccacctgctgcccctggaccagagactgctgatcaagaaccccagaaccaagcccagaacccccgtgagcctgcccaaggtgatgatcgtggtgggcggccaggcccccaaggccatcagaagcgtggagtgctacgacttcgaggaggacagatgggaccagatcgccgagctgcccagcagaagatgcagagccggcgtggtgttcatggccggccacgtgtacgccgtgggcggcttcaacggcagcctgagagtgagaaccgtggacgtgtacgacggcgtgaaggaccagtggaccagcatcgccagcatgcaggagagaagaagcaccctgggcgccgccgtgctgaacgacctgctgtacgccgtgggcggcttcgacggcagcaccggcctggccagcgtggaggcctacagctacaagaccaacgagtggttcttcgtggcccccatgaacaccagaagaagcagcgtgggcgtgggcgtggtggagggcaagctgtacgccgtgggcggctacgacggcgccagcagacagtgcctgagcaccgtggagcagtacaaccccgccaccaacgagtggatctacgtggccgacatgagcaccagaagaagcggcgccggcgtgggcgtgctgagcggccagctgtacgccaccggcggccacgacggccccctggtgagaaagagcgtggaggtgtacgaccccggcaccaacacctggaagcaggtggccgacatgaacatgtgcagaagaaacgccggcgtgtgcgccgtgaacggcctgctgtacgtggtgggcggcgacgacggcagctgcaacctggccagcgtggagtactacaaccccgtgaccgacaagtggaccctgctgcccaccaacatgagcaccggcagaagctacgccggcgtggccgtgatccacaagagcctgtag

SEQ ID NO: 86020 - DNA, 1905 bp, synthetic construct
  misc_feature 1..1905: note = Description of Artificial Sequence: Synthetic coding sequence
  source 1..1905: mol_type = other DNA
atggcccccaagaagaagatcgtgaagaagaacaagggcgacatcaacgagatgaccatcatcgtggaggacagccccctgaacaagctgaacgccctgaacggcctgctggagggcggcaacggcctgagctgcatcagcagcgagctgaccgacgccagctacggccccaacctgctggagggcctgagcaagatgagacaggagaacttcctgtgcgacctggtgatcggcaccaagaccaagagcttcgacgtgcacaagagcgtgatggccagctgcagcgagtacttctacaacatcctgaagaaggaccccagcatccagagagtggacctgaacgacatcagccccctgggcctggccaccgtgatcgcctacgcctacaccggcaagctgaccctgagcctgtacaccatcggcagcatcatcagcgccgccgtgtacctgcagatccacaccctggtgaagatgtgcagcgacttcctgatcagagagatgagcgtggagaactgcatgtacgtggtgaacatcgccgagacctacagcctgaagaacgccaaggccgccgcccagaagttcatcagagacaacttcctggagttcgccgagagcgaccagttcatgaagctgaccttcgagcagatcaacgagctgctgatcgacgacgacctgcagctgcccagcgagatcgtggccttccagatcgccatgaagtggctggagttcgaccagaagagagtgaagtacgccgccgacctgctgagcaacatcagattcggcaccatcagcgcccaggacctggtgaactacgtgcagagcgtgcccagaatgatgcaggacgccgactgccacagactgctggtggacgccatgaactaccacctgctgccctaccaccagaacaccctgcagagcagaagaaccagaatcagaggcggctgcagagtgctggtgaccgtgggcggcagacccggcctgaccgagaagagcctgagcagagacatcctgtacagagaccccgagaacggctggagcaagctgaccgagatgcccgccaagagcttcaaccagtgcgtggccgtgatggacggcttcctgtacgtggccggcggcgaggaccagaacgacgccagaaaccaggccaagcacgccgtgagcaacttctgcagatacgaccccagattcaacacctggatccacctggccagcatgaaccagaagagaacccacttcagcctgagcgtgttcaacggcctggtgtacgccgccggcggcagaaacgccgagggcagcctggccagcctggagtgctacgtgcccagcaccaaccagtggcagcccaagacccccctggaggtggccagatgctgccacgccagcgccgtggccgacggcagagtgctggtgaccggcggctacatcgccaacgcctacagcagaagcgtgtgcgcctacgaccccgccagcgacagctggcaggagctgcccaacctgagcacccccagaggctggcactgcgccgtgaccctgagcgacagagtgtacgtgatgggcggcagccagctgggccccagaggcgagagagtggacgtgctgaccgtggagtgctacagccccgccaccggccagtggagctacgccgcccccctgcaggtgggcgtgagcaccgccggcgtgagcgccctgcacggcagagcctacctggtgggcggctggaacgagggcgagaagaagtacaagaagtgcatccagtgcttcagccccgagctgaacgagtggaccgaggacgacgagctgcccgaggccaccgtgggcgtgagctgctgcaccctgagcatgcccaacaacgtgaccagagagagcagagccagcagcgtgagcagcgtgcccgtgagcatctag

SEQ ID NO: 86021 - DNA, 1905 bp, synthetic construct; identical to SEQ ID NO: 86020
  misc_feature 1..1905: note = Description of Artificial Sequence: Synthetic coding sequence
  source 1..1905: mol_type = other DNA

SEQ ID NO: 86022 - DNA, 2313 bp, synthetic construct
  misc_feature 1..2313: note = Description of Artificial Sequence: Synthetic coding sequence
  source 1..2313: mol_type = other DNA
atgaacgtgatctacttccccctgcacatcttcgtggtgtacagcagagcctacaccagcctggtgctggtgggctgcaccaacctgtgcgccgtgctgttcgccagatgcctggacgaccacctggtgagcctgagaatgagcggcagcagaaaggagttcgacgtgaagcagatcctgaagatcagatggagatggttcggccaccaggccagcagccccaacagcaccgtggacagccagcagggcgagttctggaacagaggccagaccggcgccaacggcggcagaaagttcctggacccctgcagcctgcagctgcccctggccagcatcggctacagaagaagcagccagctggacttccagaacagccccagctggcccatggccagcaccagcgaggtgcccgccttcgagttcaccgccgaggactgcggcggcgcccactggctggacagacccgaggtggacgacggcaccagcgaggaggagaacgagagcgacagcagcagctgcagaaccagcaacagcagccagaccctgagcagctgccacaccatggagccctgcaccagcgacgagttcttccaggccctgaaccacgccgagcagaccttcaagaagatggagaactacctgagacacaagcagctgtgcgacgtgatcctggtggccggcgacagaagaatccccgcccacagactggtgctgagcagcgtgagcgactacttcgccgccatgttcaccaacgacgtgagagaggccagacaggaggagatcaagatggagggcgtggagcccaacagcctgtggagcctgatccagtacgcctacaccggcagactggagctgaaggaggacaacatcgagtgcctgctgagcaccgcctgcctgctgcagctgagccaggtggtggaggcctgctgcaagttcctgatgaagcagctgcaccccagcaactgcctgggcatcagaagcttcgccgacgcccagggctgcaccgacctgcacaaggtggcccacaactacaccatggagcacttcatggaggtgatcagaaaccaggagttcgtgctgctgcccgccagcgagatcgccaagctgctggccagcgacgacatgaacatccccaacgaggagaccatcctgaacgccctgctgacctgggtgagacacgacctggagcagagaagaaaggacctgagcaagctgctggcctacatcagactgcccctgctggccccccagttcctggccgacatggagaacaacgtgctgttcagagacgacatcgagtgccagaagctgatcatggaggccatgaagtaccacctgctgcccgagagaagacccatgctgcagagccccagaaccaagcccagaaagagcaccgtgggcaccctgttcgccgtgggcggcatggacagcaccaagggcgccaccagcatcgagaagtacgacctgagaaccaacatgtggacccccgtggccaacatgaacggcagaagactgcagttcggcgtggccgtgctggacgacaagctgtacgtggtgggcggcagagacggcctgaagaccctgaacaccgtggagtgctacaaccccaagaccaagacctggagcgtgatgccccccatgagcacccacagacacggcctgggcgtggccgtgctggagggccccatgtacgccgtgggcggccacgacggctggagctacctgaacaccgtggagagatgggacccccaggccagacagtggaacttcgtggccaccatgagcacccccagaagcaccgtgggcgtggccgtgctgagcggcaagctgtacgccgtgggcggcagagacggcagcagctgcctgaagagcgtggagtgcttcgacccccacaccaacaagtggaccctgtgcgcccagatgagcaagagaagaggcggcgtgggcgtgaccacctggaacggcctgctgtacgccatcggcggccacgacgcccccgccagcaacctgaccagcagactgagcgactgcgtggagagatacgaccccaagaccgacatgtggaccgccgtggccagcatgagcatcagcagagacgccgtgggcgtgtgcctgctgggcgacaagctgtacgccgtgggcggctacgacggccaggcctacctgaacaccgtggaggcctacgacccccagaccaacgagtggacccaggtgttcagccacaccttcgaggacagcaaggaccacctggtggccatcaagcagaccatctggagacagaacagcctgagcgaggagttcagaagccactag

SEQ ID NO: 86023 - DNA, 2274 bp, synthetic construct
  misc_feature 1..2274: note = Description of Artificial Sequence: Synthetic coding sequence
  source 1..2274: mol_type = other DNA
atgaacgtgatctacttccccctgcacatcttcgtggtgtacagcagagcctacaccagcctggtgctggtgggctgcaccaacctgtgcgccgtgctgttcgccagatgcctggacgaccacctggtgagcctgagaatgagcggcagcagaaaggagttcgacgtgaagcagatcctgaagatcagatggagatggttcggccaccaggccagcagccccaacagcaccgtggacagccagcagggcgagttctggaacagaggccagaccggcgccaacggcggcagaaagttcctggacccctgcagcctgcagctgcccctggccagcatcggctacagaagaagcagccagctggacttccagaacagccccagctggcccatggccagcaccagcgaggtgcccgccttcgagttcaccgccgaggactgcggcggcgcccactggctggacagacccgaggtggacgacggcaccagcgaggaggagaacgagagcgacagcagcagctgcagaaccagcaacagcagccagaccctgagcagctgccacaccatggagccctgcaccagcgacgagttcttccaggccctgaaccacgccgagcagaccttcaagaagatggagaactacctgagacacaagcagctgtgcgacgtgatcctggtggccggcgacagaagaatccccgcccacagactggtgctgagcagcgtgagcgactacttcgccgccatgttcaccaacgacgtgagagaggccagacaggaggagatcaagatggagggcgtggagcccaacagcctgtggagcctgatccagtacgcctacaccggcagactggagctgaaggaggacaacatcgagtgcctgctgagcaccgcctgcctgctgcagctgagccaggtggtggaggcctgctgcaagttcctgatgaagcagctgcaccccagcaactgcctgggcatcagaagcttcgccgacgcccagggctgcaccgacctgcacaaggtggcccacaactacaccatggagcacttcatggaggtgatcagaaaccaggagttcgtgctgctgcccgccagcgagatcgccaagctgctggccagcgacgacatgaacatccccaacgaggagaccatcctgaacgccctgctgacctgggtgagacacgacctggagcagagaagaaaggacctgagcaagctgctggcctacatcagactgcccctgctggccccccagttcctggccgacatggagaacaacgtgctgttcagagacgacatcgagtgccagaagctgatcatggaggccatgaagtaccacctgctgcccgagagaagacccatgctgcagagccccagaaccaagcccagaaagagcaccgtgggcaccctgttcgccgtgggcggcatggacagcaccaagggcgccaccagcatcgagaagtacgacctgagaaccaacatgtggacccccgtggccaacatgaacggcagaagactgcagttcggcgtggccgtgctggacgacaagctgtacgtggtgggcggcagagacggcctgaagaccctgaacaccgtggagtgctacaaccccaagaccaagacctggagcgtgatgccccccatgagcacccacagacacggcctgggcgtggccgtgctggagggccccatgtacgccgtgggcggccacgacggctggagctacctgaacaccgtggagagatgggacccccaggccagacagtggaacttcgtggccaccatgagcacccccagaagcaccgtgggcgtggccgtgctgagcggcaagctgtacgccgtgggcggcagagacggcagcagctgcctgaagagcgtggagtgcttcgacccccacaccaacaagtggaccctgtgcgcccagatgagcaagagaagaggcggcgtgggcgtgaccacctggaacggcctgctgtacgccatcggcggccacgacgcccccgccagcaacctgaccagcagactgagcgactgcgtggagagatacgaccccaagaccgacatgtggaccgccgtggccagcatgagcatcagcagagacgccgtgggcgtgtgcctgctgggcgacaagctgtacgccgtgggcggctacgacggccaggcctacctgaacaccgtggaggcctacgacccccagaccaacgagtggacccaggtgtggcacagctgcttcatcatcaccctgaccctgttcctgctgaagcagttcctgtggtag

SEQ ID NO: 86024 - DNA, 2268 bp, synthetic construct
  misc_feature 1..2268: note = Description of Artificial Sequence: Synthetic coding sequence
  source 1..2268: mol_type = other DNA
atgaacgtgatctacttccccctgcacatcttcgtggtgtacagcagagcctacaccagcctggtgctggtgggctgcaccaacctgtgcgccgtgctgttcgccagatgcctggacgaccacctggtgagcctgagaatgagcggcagcagaaaggagttcgacgtgaagcagatcctgaagatcagatggagatggttcggccaccaggccagcagccccaacagcaccgtggacagccagcagggcgagttctggaacagaggccagaccggcgccaacggcggcagaaagttcctggacccctgcagcctgcagctgcccctggccagcatcggctacagaagaagcagccagctggacttccagaacagccccagctggcccatggccagcaccagcgaggtgcccgccttcgagttcaccgccgaggactgcggcggcgcccactggctggacagacccgaggtggacgacggcaccagcgaggaggagaacgagagcgacagcagcagctgcagaaccagcaacagcagccagaccctgagcagctgccacaccatggagccctgcaccagcgacgagttcttccaggccctgaaccacgccgagcagaccttcaagaagatggagaactacctgagacacaagcagctgtgcgacgtgatcctggtggccggcgacagaagaatccccgcccacagactggtgctgagcagcgtgagcgactacttcgccgccatgttcaccaacgacgtgagagaggccagacaggaggagatcaagatggagggcgtggagcccaacagcctgtggagcctgatccagtacgcctacaccggcagactggagctgaaggaggacaacatcgagtgcctgctgagcaccgcctgcctgctgcagctgagccaggtggtggaggcctgctgcaagttcctgatgaagcagctgcaccccagcaactgcctgggcatcagaagcttcgccgacgcccagggctgcaccgacctgcacaaggtggcccacaactacaccatggagcacttcatggaggtgatcagaaaccaggagttcgtgctgctgcccgccagcgagatcgccaagctgctggccagcgacgacatgaacatccccaacgaggagaccatcctgaacgccctgctgacctgggtgagacacgacctggagcagagaagaaaggacctgagcaagctgctggcctacatcagactgcccctgctggccccccagttcctggccgacatggagaacaacgtgctgttcagagacgacatcgagtgccagaagctgatcatggaggccatgaagtaccacctgctgcccgagagaagacccatgctgcagagccccagaaccaagcccagaaagagcaccgtgggcaccctgttcgccgtgggcggcatggacagcaccaagggcgccaccagcatcgagaagtacgacctgagaaccaacatgtggacccccgtggccaacatgaacggcagaagactgcagttcggcgtggccgtgctggacgacaagctgtacgtggtgggcggcagagacggcctgaagaccctgaacaccgtggagtgctacaaccccaagaccaagacctggagcgtgatgccccccatgagcacccacagacacggcctgggcgtggccgtgctggagggccccatgtacgccgtgggcggccacgacggctggagctacctgaacaccgtggagagatgggacccccaggccagacagtggaacttcgtggccaccatgagcacccccagaagcaccgtgggcgtggccgtgctgagcggcaagctgtacgccgtgggcggcagagacggcagcagctgcctgaagagcgtggagtgcttcgacccccacaccaacaagtggaccctgtgcgcccagatgagcaagagaagaggcggcgtgggcgtgaccacctggaacggcctgctgtacgccatcggcggccacgacgcccccgccagcaacctgaccagcagactgagcgactgcgtggagagatacgaccccaagaccgacatgtggaccgccgtggccagcatgagcatcagcagagacgccgtgggcgtgtgcctgctgggcgacaagctgtacgccgtgggcggctacgacggccaggcctacctgaacaccgtggaggcctacgacccccagaccaacgagtggacccaggtggcccccctgtgcctgggcagagccggcgcctgcgtggtgaccgtgaagctgtag

SEQ ID NO: 86025 - DNA, 849 bp, synthetic construct
  misc_feature 1..849: note = Description of Artificial Sequence: Synthetic coding sequence
  source 1..849: mol_type = other DNA
tgaagaaccaacatgtggacccccgtggccaacatgaacggcagaagactgcagttcggcgtggccgtgctggacgacaagctgtacgtggtgggcggcagagacggcctgaagaccctgaacaccgtggagtgctacaaccccaagaccaagacctggagcgtgatgccccccatgagcacccacagacacggcctgggcgtggccgtgctggagggccccatgtacgccgtgggcggccacgacggctggagctacctgaacaccgtggagagatgggacccccaggccagacagtggaacttcgtggccaccatgagcacccccagaagcaccgtgggcgtggccgtgctgagcggcaagctgtacgccgtgggcggcagagacggcagcagctgcctgaagagcgtggagtgcttcgacccccacaccaacaagtggaccctgtgcgcccagatgagcaagagaagaggcggcgtgggcgtgaccacctggaacggcctgctgtacgccatcggcggccacgacgcccccgccagcaacctgaccagcagactgagcgactgcgtggagagatacgaccccaagaccgacatgtggaccgccgtggccagcatgagcatcagcagagacgccgtgggcgtgtgcctgctgggcgacaagctgtacgccgtgggcggctacgacggccaggcctacctgaacaccgtggaggcctacgacccccagaccaacgagtggacccaggtgttcagccacaccttcgaggacagcaaggaccacctggtggccatcaagcagaccatctggagacagaacagcctgagcgaggagttcagaagccactag

SEQ ID NO: 86026 - DNA, 2370 bp, synthetic construct
  misc_feature 1..2370: note = Description of Artificial Sequence: Synthetic coding sequence
  source 1..2370: mol_type = other DNA
atgagactgcccggccagggcctgggcgccagagagggccccagcatccccctgagcagccccgcccccgcccccgccagccccgccccccccgcctggccccccagacccgccgtgacccacggcagactgagaagccccaccagaagagcctacaccagcctggtgctggtgggctgcaccaacctgtgcgccgtgctgttcgccagatgcctggacgaccacctggtgagcctgagaatgagcggcagcagaaaggagttcgacgtgaagcagatcctgaagatcagatggagatggttcggccaccaggccagcagccccaacagcaccgtggacagccagcagggcgagttctggaacagaggccagaccggcgccaacggcggcagaaagttcctggacccctgcagcctgcagctgcccctggccagcatcggctacagaagaagcagccagctggacttccagaacagccccagctggcccatggccagcaccagcgaggtgcccgccttcgagttcaccgccgaggactgcggcggcgcccactggctggacagacccgaggtggacgacggcaccagcgaggaggagaacgagagcgacagcagcagctgcagaaccagcaacagcagccagaccctgagcagctgccacaccatggagccctgcaccagcgacgagttcttccaggccctgaaccacgccgagcagaccttcaagaagatggagaactacctgagacacaagcagctgtgcgacgtgatcctggtggccggcgacagaagaatccccgcccacagactggtgctgagcagcgtgagcgactacttcgccgccatgttcaccaacgacgtgagagaggccagacaggaggagatcaagatggagggcgtggagcccaacagcctgtggagcctgatccagtacgcctacaccggcagactggagctgaaggaggacaacatcgagtgcctgctgagcaccgcctgcctgctgcagctgagccaggtggtggaggcctgctgcaagttcctgatgaagcagctgcaccccagcaactgcctgggcatcagaagcttcgccgacgcccagggctgcaccgacctgcacaaggtggcccacaactacaccatggagcacttcatggaggtgatcagaaaccaggagttcgtgctgctgcccgccagcgagatcgccaagctgctggccagcgacgacatgaacatccccaacgaggagaccatcctgaacgccctgctgacctgggtgagacacgacctggagcagagaagaaaggacctgagcaagctgctggcctacatcagactgcccctgctggccccccagttcctggccgacatggagaacaacgtgctgttcagagacgacatcgagtgccagaagctgatcatggaggccatgaagtaccacctgctgcccgagagaagacccatgctgcagagccccagaaccaagcccagaaagagcaccgtgggcaccctgttcgccgtgggcggcatggacagcaccaagggcgccaccagcatcgagaagtacgacctgagaaccaacatgtggacccccgtggccaacatgaacggcagaagactgcagttcggcgtggccgtgctggacgacaagctgtacgtggtgggcggcagagacggcctgaagaccctgaacaccgtggagtgctacaaccccaagaccaagacctggagcgtgatgccccccatgagcacccacagacacggcctgggcgtggccgtgctggagggccccatgtacgccgtgggcggccacgacggctggagctacctgaacaccgtggagagatgggacccccaggccagacagtggaacttcgtggccaccatgagcacccccagaagcaccgtgggcgtggccgtgctgagcggcaagctgtacgccgtgggcggcagagacggcagcagctgcctgaagagcgtggagtgcttcgacccccacaccaacaagtggaccctgtgcgcccagatgagcaagagaagaggcggcgtgggcgtgaccacctggaacggcctgctgtacgccatcggcggccacgacgcccccgccagcaacctgaccagcagactgagcgactgcgtggagagatacgaccccaagaccgacatgtggaccgccgtggccagcatgagcatcagcagagacgccgtgggcgtgtgcctgctgggcgacaagctgtacgccgtgggcggctacgacggccaggcctacctgaacaccgtggaggcctacgacccccagaccaacgagtggacccaggtggcccccctgtgcctgggcagagccggcgcctgcgtggtgaccgtgaagctgtag

SEQ ID NO: 86027 - DNA, 1050 bp, synthetic construct
  misc_feature 1..1050: note = Description of Artificial Sequence: Synthetic coding sequence
  source 1..1050: mol_type = other DNA
aagaagcaccccagcaccgtgatggtgccccagttcctggccgacatggagaacaacgtgctgttcagagacgacatcgagtgccagaagctgatcatggaggccatgaagtaccacctgctgcccgagagaagacccatgctgcagagccccagaaccaagcccagaaagagcaccgtgggcaccctgttcgccgtgggcggcatggacagcaccaagggcgccaccagcatcgagaagtacgacctgagaaccaacatgtggacccccgtggccaacatgaacggcagaagactgcagttcggcgtggccgtgctggacgacaagctgtacgtggtgggcggcagagacggcctgaagaccctgaacaccgtggagtgctacaaccccaagaccaagacctggagcgtgatgccccccatgagcacccacagacacggcctgggcgtggccgtgctggagggccccatgtacgccgtgggcggccacgacggctggagctacctgaacaccgtggagagatgggacccccaggccagacagtggaacttcgtggccaccatgagcacccccagaagcaccgtgggcgtggccgtgctgagcggcaagctgtacgccgtgggcggcagagacggcagcagctgcctgaagagcgtggagtgcttcgacccccacaccaacaagtggaccctgtgcgcccagatgagcaagagaagaggcggcgtgggcgtgaccacctggaacggcctgctgtacgccatcggcggccacgacgcccccgccagcaacctgaccagcagactgagcgactgcgtggagagatacgaccccaagaccgacatgtggaccgccgtggccagcatgagcatcagcagagacgccgtgggcgtgtgcctgctgggcgacaagctgtacgccgtgggcggctacgacggccaggcctacctgaacaccgtggaggcctacgacccccagaccaacgagtggacccaggtggcccccctgtgcctgggcagagccggcgcctgcgtggtgaccgtgaagctgtag

SEQ ID NO: 86028 - DNA, 2130 bp, synthetic construct
  misc_feature 1..2130: note = Description of Artificial Sequence: Synthetic coding sequence
  source 1..2130: mol_type = other DNA
atgagcggcagcagaaaggagttcgacgtgaagcagatcctgaagatcagatggagatggttcggccaccaggccagcagccccaacagcaccgtggacagccagcagggcgagttctggaacagaggccagaccggcgccaacggcggcagaaagttcctggacccctgcagcctgcagctgcccctggccagcatcggctacagaagaagcagccagctggacttccagaacagccccagctggcccatggccagcaccagcgaggtgcccgccttcgagttcaccgccgaggactgcggcggcgcccactggctggacagacccgaggtggacgacggcaccagcgaggaggagaacgagagcgacagcagcagctgcagaaccagcaacagcagccagaccctgagcagctgccacaccatggagccctgcaccagcgacgagttcttccaggccctgaaccacgccgagcagaccttcaagaagatggagaactacctgagacacaagcagctgtgcgacgtgatcctggtggccggcgacagaagaatccccgcccacagactggtgctgagcagcgtgagcgactacttcgccgccatgttcaccaacgacgtgagagaggccagacaggaggagatcaagatggagggcgtggagcccaacagcctgtggagcctgatccagtacgcctacaccggcagactggagctgaaggaggacaacatcgagtgcctgctgagcaccgcctgcctgctgcagctgagccaggtggtggaggcctgctgcaagttcctgatgaagcagctgcaccccagcaactgcctgggcatcagaagcttcgccgacgcccagggctgcaccgacctgcacaaggtggcccacaactacaccatggagcacttcatggaggtgatcagaaaccaggagttcgtgctgctgcccgccagcgagatcgccaagctgctggccagcgacgacatgaacatccccaacgaggagaccatcctgaacgccctgctgacctgggtgagacacgacctggagcagagaagaaaggacctgagcaagctgctggcctacatcagactgcccctgctggccccccagttcctggccgacatggagaacaacgtgctgttcagagacgacatcgagtgccagaagctgatcatggaggccatgaagtaccacctgctgcccgagagaagacccatgctgcagagccccagaaccaagcccagaaagagcaccgtgggcaccctgttcgccgtgggcggcatggacagcaccaagggcgccaccagcatcgagaagtacgacctgagaaccaacatgtggacccccgtggccaacatgaacggcagaagactgcagttcggcgtggccgtgctggacgacaagctgtacgtggtgggcggcagagacggcctgaagaccctgaacaccgtggagtgctacaaccccaagaccaagacctggagcgtgatgccccccatgagcacccacagacacggcctgggcgtggccgtgctggagggccccatgtacgccgtgggcggccacgacggctggagctacctgaacaccgtggagagatgggacccccaggccagacagtggaacttcgtggccaccatgagcacccccagaagcaccgtgggcgtggccgtgctgagcggcaagctgtacgccgtgggcggcagagacggcagcagctgcctgaagagcgtggagtgcttcgacccccacaccaacaagtggaccctgtgcgcccagatgagcaagagaagaggcggcgtgggcgtgaccacctggaacggcctgctgtacgccatcggcggccacgacgcccccgccagcaacctgaccagcagactgagcgactgcgtggagagatacgaccccaagaccgacatgtggaccgccgtggccagcatgagcatcagcagagacgccgtgggcgtgtgcctgctgggcgacaagctgtacgccgtgggcggctacgacggccaggcctacctgaacaccgtggaggcctacgacccccagaccaacgagtggacccaggtggcccccctgtgcctgggcagagccggcgcctgcgtggtgaccgtgaagctgtag

SEQ ID NO: 86029 - DNA, 2085 bp, synthetic construct
  misc_feature 1..2085: note = Description of Artificial Sequence: Synthetic coding sequence
  source 1..2085: mol_type = other DNA
atgaacgtgatctacttccccctgcacatcttcgtggtgtacagcagagcctacaccagcctggtgctggtgggctgcaccaacctgtgcgccgtgctgttcgccagatgcctggacgaccacctggtgagcctgagaatgagcggcagcagaaaggagttcgacgtgaagcagatcctgaagatcagatggagatggttcggccaccaggccagcagccccaacagcaccgtggacagccagcagggcgagttctggaacagaggccagaccggcgccaacggcggcagaaagttcctggacccctgcagcctgcagctgcccctggccagcatcggctacagaagaagcagccagctggacttccagaacagccccagctggcccatggccagcaccagcgaggtgcccgccttcgagttcaccgccgaggactgcggcggcgcccactggctggacagacccgaggtggacgacggcaccagcgaggaggagaacgagagcgacagcagcagctgcagactggtgctgagcagcgtgagcgactacttcgccgccatgttcaccaacgacgtgagagaggccagacaggaggagatcaagatggagggcgtggagcccaacagcctgtggagcctgatccagtacgcctacaccggcagactggagctgaaggaggacaacatcgagtgcctgctgagcaccgcctgcctgctgcagctgagccaggtggtggaggcctgctgcaagttcctgatgaagcagctgcaccccagcaactgcctgggcatcagaagcttcgccgacgcccagggctgcaccgacctgcacaaggtggcccacaactacaccatggagcacttcatggaggtgatcagaaaccaggagttcgtgctgctgcccgccagcgagatcgccaagctgctggccagcgacgacatgaacatccccaacgaggagaccatcctgaacgccctgctgacctgggtgagacacgacctggagcagagaagaaaggacctgagcaagctgctggcctacatcagactgcccctgctggccccccagttcctggccgacatggagaacaacgtgctgttcagagacgacatcgagtgccagaagctgatcatggaggccatgaagtaccacctgctgcccgagagaagacccatgctgcagagccccagaaccaagcccagaaagagcaccgtgggcaccctgttcgccgtgggcggcatggacagcaccaagggcgccaccagcatcgagaagtacgacctgagaaccaacatgtggacccccgtggccaacatgaacggcagaagactgcagttcggcgtggccgtgctggacgacaagctgtacgtggtgggcggcagagacggcctgaagaccctgaacaccgtggagtgctacaaccccaagaccaagacctggagcgtgatgccccccatgagcacccacagacacggcctgggcgtggccgtgctggagggccccatgtacgccgtgggcggccacgacggctggagctacctgaacaccgtggagagatgggacccccaggccagacagtggaacttcgtggccaccatgagcacccccagaagcaccgtgggcgtggccgtgctgagcggcaagctgtacgccgtgggcggcagagacggcagcagctgcctgaagagcgtggagtgcttcgacccccacaccaacaagtggaccctgtgcgcccagatgagcaagagaagaggcggcgtgggcgtgaccacctggaacggcctgctgtacgccatcggcggccacgacgcccccgccagcaacctgaccagcagactgagcgactgcgtggagagatacgaccccaagaccgacatgtggaccgccgtggccagcatgagcatcagcagagacgccgtgggcgtgtgcctgctgggcgacaagctgtacgccgtgggcggctacgacggccaggcctacctgaacaccgtggaggcctacgacccccagaccaacgagtggacccaggtggcccccctgtgcctgggcagagccggcgcctgcgtggtgaccgtgaagctgtag

SEQ ID NO: 86030 - DNA, 1707 bp, synthetic construct
  misc_feature 1..1707: note = Description of Artificial Sequence: Synthetic coding sequence
  source 1..1707: mol_type = other DNA
atggagccctgcaccagcgacgagttcttccaggccctgaaccacgccgagcagaccttcaagaagatggagaactacctgagacacaagcagctgtgcgacgtgatcctggtggccggcgacagaagaatccccgcccacagactggtgctgagcagcgtgagcgactacttcgccgccatgttcaccaacgacgtgagagaggccagacaggaggagatcaagatggagggcgtggagcccaacagcctgtggagcctgatccagtacgcctacaccggcagactggagctgaaggaggacaacatcgagtgcctgctgagcaccgcctgcctgctgcagctgagccaggtggtggaggcctgctgcaagttcctgatgaagcagctgcaccccagcaactgcctgggcatcagaagcttcgccgacgcccagggctgcaccgacctgcacaaggtggcccacaactacaccatggagcacttcatggaggtgatcagaaaccaggagttcgtgctgctgcccgccagcgagatcgccaagctgctggccagcgacgacatgaacatccccaacgaggagaccatcctgaacgccctgctgacctgggtgagacacgacctggagcagagaagaaaggacctgagcaagctgctggcctacatcagactgcccctgctggccccccagttcctggccgacatggagaacaacgtgctgttcagagacgacatcgagtgccagaagctgatcatggaggccatgaagtaccacctgctgcccgagagaagacccatgctgcagagccccagaaccaagcccagaaagagcaccgtgggcaccctgttcgccgtgggcggcatggacagcaccaagggcgccaccagcatcgagaagtacgacctgagaaccaacatgtggacccccgtggccaacatgaacggcagaagactgcagttcggcgtggccgtgctggacgacaagctgtacgtggtgggcggcagagacggcctgaagaccctgaacaccgtggagtgctacaaccccaagaccaagacctggagcgtgatgccccccatgagcacccacagacacggcctgggcgtggccgtgctggagggccccatgtacgccgtgggcggccacgacggctggagctacctgaacaccgtggagagatgggacccccaggccagacagtggaacttcgtggccaccatgagcacccccagaagcaccgtgggcgtggccgtgctgagcggcaagctgtacgccgtgggcggcagagacggcagcagctgcctgaagagcgtggagtgcttcgacccccacaccaacaagtggaccctgtgcgcccagatgagcaagagaagaggcggcgtgggcgtgaccacctggaacggcctgctgtacgccatcggcggccacgacgcccccgccagcaacctgaccagcagactgagcgactgcgtggagagatacgaccccaagaccgacatgtggaccgccgtggccagcatgagcatcagcagagacgccgtgggcgtgtgcctgctgggcgacaagctgtacgccgtgggcggctacgacggccaggcctacctgaacaccgtggaggcctacgacccccagaccaacgagtggacccaggtggcccccctgtgcctgggcagagccggcgcctgcgtggtgaccgtgaagctgtag

SEQ ID NO: 86031 - DNA, 1866 bp, synthetic construct
  misc_feature 1..1866: note = Description of Artificial Sequence: Synthetic coding sequence
  source 1..1866: mol_type = other DNA
atgctgatggccggccagagaggcgcctggaccatgggcgacgtggtggagaagagcctggagggccccctggcccccagcaccgacgagcccagccagaagaccggcgacctggtggagatcctgaacggcgagaaggtgaagttcgacgacgccggcctgagcctgatcctgcagaacggcctggagaccctgagaatggagaacgccctgaccgacgtgatcctgtgcgtggacatccaggagttcagctgccacagagtggtgctggccgccgccagcaactacttcagagccatgttctgcaacgacctgaaggagaagtacgagaagagaatcatcatcaagggcgtggacgccgagaccatgcacaccctgctggactacacctacaccagcaaggccctgatcaccaagcagaacgtgcagagagtgctggaggccgccaacctgttccagttcctgagaatggtggacgcctgcgccagcttcctgaccgaggccctgaaccccgagaactgcgtgggcatcctgagactggccgacacccacagcctggacagcctgaagaagcaggtgcagagctacatcatccagaacttcgtgcagatcctgaacagcgaggagttcctggacctgcccgtggacaccctgcaccacatcctgaagagcgacgacctgtacgtgaccgaggaggcccaggtgttcgagaccgtgatgagctgggtgagacacaagcccagcgagagactgtgcctgctgccctacgtgctggagaacgtgagactgcccctgctggacccctggtacttcgtggagaccgtggaggccgaccccctgatcagacagtgccccgaggtgttccccctgctgcaggaggccagaatgtaccacctgagcggcaacgagatcatcagcgagagaaccaagcccagaatgcacgagttccagagcgaggtgttcatgatcatcggcggctgcaccaaggacgagagattcgtggccgaggtgacctgcctggaccccctgagaagaagcagactggaggtggccaagctgcccctgaccgagcacgagctggagagcgagaacaagaagtgggtggagttcgcctgcgtgaccctgaagaacgaggtgtacatcagcggcggcaaggagacccagcacgacgtgtggaagtacaacagcagcatcaacaagtggatccagatcgagtacctgaacatcggcagatggagacacaagatggtggtgctgggcggcaaggtgtacgtgatcggcggcttcgacggcctgcagagaatcaacaacgtggagacctacgaccccttccacaactgctggagcgaggccgcccccctgctggtgcacgtgagcagcttcgccgccaccagccacaagaagaagctgtacgtgatcggcggcggccccaacggcaagctggccaccgacaagacccagtgctacgaccccagcaccaacaagtggagcctgaaggccgccatgcccgtggaggccaagtgcatcaacgccgtgagcttcagagacagaatctacgtggtgggcggcgccatgagagccctgtacgcctacagccccctggaggacagctggtgcctggtgacccagctgagccacgagagagccagctgcggcatcgccccctgcaacaacagactgtacatcaccggcggcagagacgagaagaacgaggtgatcgccaccgtgctgtgctgggaccccgaggcccagaagctgaccgaggagtgcgtgctgcccagaggcgtgagccaccacggcagcgtgaccatcagaaagagctacacccacatcagaagaatcgtgcccggcgccgtgagcgtgtag

SEQ ID NO: 86032 - DNA, 1695 bp, synthetic construct
  misc_feature 1..1695: note = Description of Artificial Sequence: Synthetic coding sequence
  source 1..1695: mol_type = other DNA
atgctgggcggcaccgactgcagaaccttcctgaccagccacatcaacctgaagaagaccctgtgcgacgtgatcctgatggtgcaggagagaaagatccccgcccacagagtggtgctggccgccgccagccacttcttcaacctgatgttcaccaccaacatgctggagagcaagagcttcgaggtggagctgaaggacgccgagcccgacatcatcgagcagctggtggagttcgcctacaccgccagaatcagcgtgaacagcaacaacgtgcagagcctgctggacgccgccaaccagtaccagatcgagcccgtgaagaagatgtgcgtggacttcctgaaggagcaggtggacgccagcaactgcctgggcatcagcgtgctggccgagtgcctggactgccccgagctgaaggccaccgccgacgacttcatccaccagcacttcaccgaggtgtacaagaccgacgagttcctgcagctggacgtgaagagagtgacccacctgctgaaccaggacaccctgaccgtgagagccgaggaccaggtgtacgacgccgccgtgagatggctgaagtacgacgagcccaacagacagcccttcatggtggacatcctggccaaggtgagattccccctgatcagcaagaacttcctgagcaagaccgtgcaggccgagcccctgatccaggacaaccccgagtgcctgaagatggtgatcagcggcatgagataccacctgctgagccccgaggacagagaggagctggtggacggcaccagacccagaagaaagaagcacgactacagaatcgccctgttcggcggcagccagccccagagctgcagatacttcaaccccaaggactacagctggaccgacatcagatgccccttcgagaagagaagagacgccgcctgcgtgttctgggacaacgtggtgtacatcctgggcggcagccagctgttccccatcaagagaatggactgctacaacgtggtgaaggacagctggtacagcaagctgggcccccccacccccagagacagcctggccgcctgcgccgccgagggcaagatctacaccagcggcggcagcgaggtgggcaacagcgccctgtacctgttcgagtgctacgacaccagaaccgagagctggcacaccaagcccagcatgctgacccagagatgcagccacggcatggtggaggccaacggcctgatctacgtgtgcggcggcagcctgggcaacaacgtgagcggcagagtgctgaacagctgcgaggtgtacgaccccgccaccgagacctggaccgagctgtgccccatgatcgaggccagaaagaaccacggcctggtgttcgtgaaggacaagatcttcgccgtgggcggccagaacggcctgggcggcctggacaacgtggagtactacgacatcaagctgaacgagtggaagatggtgagccccatgccctggaagggcgtgaccgtgaagtgcgccgccgtgggcagcatcgtgtacgtgctggccggcttccagggcgtgggcagactgggccacatcctggagtacaacaccgagaccgacaagtgggtggccaacagcaaggtgagagccttccccgtgaccagctgcctgatctgcgtggtggacacctgcggcgccaacgaggagaccctggagacctag

SEQ ID NO: 86033 - DNA, 1761 bp, synthetic construct
  misc_feature 1..1761: note = Description of Artificial Sequence: Synthetic coding sequence
  source 1..1761: mol_type = other DNA
atggccgccagcggcgtggagaagagcagcaagaagaagaccgagaagaagctggccgccagagaggaggccaagctgctggccggcttcatgggcgtgatgaacaacatgagaaagcagaagaccctgtgcgacgtgatcctgatggtgcaggagagaaagatccccgcccacagagtggtgctggccgccgccagccacttcttcaacctgatgttcaccaccaacatgctggagagcaagagcttcgaggtggagctgaaggacgccgagcccgacatcatcgagcagctggtggagttcgcctacaccgccagaatcagcgtgaacagcaacaacgtgcagagcctgctggacgccgccaaccagtaccagatcgagcccgtgaagaagatgtgcgtggacttcctgaaggagcaggtggacgccagcaactgcctgggcatcagcgtgctggccgagtgcctggactgccccgagctgaaggccaccgccgacgacttcatccaccagcacttcaccgaggtgtacaagaccgacgagttcctgcagctggacgtgaagagagtgacccacctgctgaaccaggacaccctgaccgtgagagccgaggaccaggtgtacgacgccgccgtgagatggctgaagtacgacgagcccaacagacagcccttcatggtggacatcctggccaaggtgagattccccctgatcagcaagaacttcctgagcaagaccgtgcaggccgagcccctgatccaggacaaccccgagtgcctgaagatggtgatcagcggcatgagataccacctgctgagccccgaggacagagaggagctggtggacggcaccagacccagaagaaagaagcacgactacagaatcgccctgttcggcggcagccagccccagagctgcagatacttcaaccccaaggactacagctggaccgacatcagatgccccttcgagaagagaagagacgccgcctgcgtgttctgggacaacgtggtgtacatcctgggcggcagccagctgttccccatcaagagaatggactgctacaacgtggtgaaggacagctggtacagcaagctgggcccccccacccccagagacagcctggccgcctgcgccgccgagggcaagatctacaccagcggcggcagcgaggtgggcaacagcgccctgtacctgttcgagtgctacgacaccagaaccgagagctggcacaccaagcccagcatgctgacccagagatgcagccacggcatggtggaggccaacggcctgatctacgtgtgcggcggcagcctgggcaacaacgtgagcggcagagtgctgaacagctgcgaggtgtacgaccccgccaccgagacctggaccgagctgtgccccatgatcgaggccagaaagaaccacggcctggtgttcgtgaaggacaagatcttcgccgtgggcggccagaacggcctgggcggcctggacaacgtggagtactacgacatcaagctgaacgagtggaagatggtgagccccatgccctggaagggcgtgaccgtgaagtgcgccgccgtgggcagcatcgtgtacgtgctggccggcttccagggcgtgggcagactgggccacatcctggagtacaacaccgagaccgacaagtgggtggccaacagcaaggtgagagccttccccgtgaccagctgcctgatctgcgtggtggacacctgcggcgccaacgaggagaccctggagacctag

SEQ ID NO: 86034 - DNA, 1617 bp, synthetic construct
  misc_feature 1..1617: note = Description of Artificial Sequence: Synthetic coding sequence
  source 1..1617: mol_type = other DNA
atggtgcaggagagaaagatccccgcccacagagtggtgctggccgccgccagccacttcttcaacctgatgttcaccaccaacatgctggagagcaagagcttcgaggtggagctgaaggacgccgagcccgacatcatcgagcagctggtggagttcgcctacaccgccagaatcagcgtgaacagcaacaacgtgcagagcctgctggacgccgccaaccagtaccagatcgagcccgtgaagaagatgtgcgtggacttcctgaaggagcaggtggacgccagcaactgcctgggcatcagcgtgctggccgagtgcctggactgccccgagctgaaggccaccgccgacgacttcatccaccagcacttcaccgaggtgtacaagaccgacgagttcctgcagctggacgtgaagagagtgacccacctgctgaaccaggacaccctgaccgtgagagccgaggaccaggtgtacgacgccgccgtgagatggctgaagtacgacgagcccaacagacagcccttcatggtggacatcctggccaaggtgagattccccctgatcagcaagaacttcctgagcaagaccgtgcaggccgagcccctgatccaggacaaccccgagtgcctgaagatggtgatcagcggcatgagataccacctgctgagccccgaggacagagaggagctggtggacggcaccagacccagaagaaagaagcacgactacagaatcgccctgttcggcggcagccagccccagagctgcagatacttcaaccccaaggactacagctggaccgacatcagatgccccttcgagaagagaagagacgccgcctgcgtgttctgggacaacgtggtgtacatcctgggcggcagccagctgttccccatcaagagaatggactgctacaacgtggtgaaggacagctggtacagcaagctgggcccccccacccccagagacagcctggccgcctgcgccgccgagggcaagatctacaccagcggcggcagcgaggtgggcaacagcgccctgtacctgttcgagtgctacgacaccagaaccgagagctggcacaccaagcccagcatgctgacccagagatgcagccacggcatggtggaggccaacggcctgatctacgtgtgcggcggcagcctgggcaacaacgtgagcggcagagtgctgaacagctgcgaggtgtacgaccccgccaccgagacctggaccgagctgtgccccatgatcgaggccagaaagaaccacggcctggtgttcgtgaaggacaagatcttcgccgtgggcggccagaacggcctgggcggcctggacaacgtggagtactacgacatcaagctgaacgagtggaagatggtgagccccatgccctggaagggcgtgaccgtgaagtgcgccgccgtgggcagcatcgtgtacgtgctggccggcttccagggcgtgggcagactgggccacatcctggagtacaacaccgagaccgacaagtgggtggccaacagcaaggtgagagccttccccgtgaccagctgcctgatctgcgtggtggacacctgcggcgccaacgaggagaccctggagacctag

SEQ ID NO: 86035 - DNA, 1161 bp, synthetic construct
  misc_feature 1..1161: note = Description of Artificial Sequence: Synthetic coding sequence
  source 1..1161: mol_type = other DNA
atggccgccagcggcgtggagaagagcagcaagaagaagaccgagaagaagctggccgccagagaggaggccaagctgctggccggcttcatgggcgtgatgaacaacatgagaaagcagaagaccctgtgcgacgtgatcctgatggtgcaggagagaaagatccccgcccacagagtggtgctggccgccgccagccacttcttcaacctgatgttcaccaccaacatgctggagagcaagagcttcgaggtggagctgaaggacgccgagcccgacatcatcgagcagctgctgcactacaagttcttcaagatgaagaacagaaaggacggcagagtgagcgtgagctacgccatcctgatccagggcctgaagatctacgagatctacagcaccaacttccccgagcacttcaccgaggtgtacaagaccgacgagttcctgcagctggacgtgaagagagtgacccacctgctgaaccaggacaccctgaccgtgagagccgaggaccaggtgtacgacgccgccgtgagatggctgaagtacgacgagcccaacagacagcccttcatggtggacatcctggccaaggtgagattccccctgatcagcaagaacttcctgagcaagaccgtgcaggccgagcccctgatccaggacaaccccgagtgcctgaagatggtgatcagcggcatgagataccacctgctgagccccgaggacagagaggagctggtggacggcaccagacccagaagaaagaagcacgactacagaatcgccctgttcggcggcagccagccccagagctgcagatacttcaaccccaaggactacagctggaccgacatcagatgccccttcgagaagagaagagacgccgcctgcgtgttctgggacaacgtggtgtacatcctgggcggcagccagctgttccccatcaagagaatggactgctacaacgtggtgaaggacagctggtacagcaagctgggcccccccacccccagagacagcctggccgcctgcgccgccgagggcaagatctacaccagcggcggcagcgaggtgggcaacagcgccctgtacctgttctgcctgatccccgtgaagttcatgatcctgccccagaagcacggcctgagctgcgtgcagtag

SEQ ID NO: 86036 - DNA, 1284 bp, synthetic construct
  misc_feature 1..1284: note = Description of Artificial Sequence: Synthetic coding sequence
  source 1..1284: mol_type = other DNA
atggccgccagcggcgtggagaagagcagcaagaagaagaccgagaagaagctggccgccagagaggaggccaagctgctggccggcttcatgggcgtgatgaacaacatgagaaagcagaagaccctgtgcgacgtgatcctgatggtgcaggagagaaagatccccgcccacagagtggtgctggccgccgccagccacttcttcaacctgatgttcaccaccaacatgctggagagcaagaacttcctgagcaagaccgtgcaggccgagcccctgatccaggacaaccccgagtgcctgaagatggtgatcagcggcatgagataccacctgctgagccccgaggacagagaggagctggtggacggcaccagacccagaagaaagaagcacgactacagaatcgccctgttcggcggcagccagccccagagctgcagatacttcaaccccaaggactacagctggaccgacatcagatgccccttcgagaagagaagagacgccgcctgcgtgttctgggacaacgtggtgtacatcctgggcggcagccagctgttccccatcaagagaatggactgctacaacgtggtgaaggacagctggtacagcaagctgggcccccccacccccagagacagcctggccgcctgcgccgccgagggcaagatctacaccagcggcggcagcgaggtgggcaacagcgccctgtacctgttcgagtgctacgacaccagaaccgagagctggcacaccaagcccagcatgctgacccagagatgcagccacggcatggtggaggccaacggcctgatctacgtgtgcggcggcagcctgggcaacaacgtgagcggcagagtgctgaacagctgcgaggtgtacgaccccgccaccgagacctggaccgagctgtgccccatgatcgaggccagaaagaaccacggcctggtgttcgtgaaggacaagatcttcgccgtgggcggccagaacggcctgggcggcctggacaacgtggagtactacgacatcaagctgaacgagtggaagatggtgagccccatgccctggaagggcgtgaccgtgaagtgcgccgccgtgggcagcatcgtgtacgtgctggccggcttccagggcgtgggcagactgggccacatcctggagtacaacaccgagaccgacaagtgggtggccaacagcaaggtgagagccttccccgtgaccagctgcctgatctgcgtggtggacacctgcggcgccaacgaggagaccctggagacctag

SEQ ID NO: 86037 - DNA, 1533 bp, synthetic construct
  misc_feature 1..1533: note = Description of Artificial Sequence: Synthetic coding sequence
  source 1..1533: mol_type = other DNA
atgctggagagcaagagcttcgaggtggagctgaaggacgccgagcccgacatcatcgagcagctggtggagttcgcctacaccgccagaatcagcgtgaacagcaacaacgtgcagagcctgctggacgccgccaaccagtaccagatcgagcccgtgaagaagatgtgcgtggacttcctgaaggagcaggtggacgccagcaactgcctgggcatcagcgtgctggccgagtgcctggactgccccgagctgaaggccaccgccgacgacttcatccaccagcacttcaccgaggtgtacaagaccgacgagttcctgcagctggacgtgaagagagtgacccacctgctgaaccaggacaccctgaccgtgagagccgaggaccaggtgtacgacgccgccgtgagatggctgaagtacgacgagcccaacagacagcccttcatggtggacatcctggccaaggtgagattccccctgatcagcaagaacttcctgagcaagaccgtgcaggccgagcccctgatccaggacaaccccgagtgcctgaagatggtgatcagcggcatgagataccacctgctgagccccgaggacagagaggagctggtggacggcaccagacccagaagaaagaagcacgactacagaatcgccctgttcggcggcagccagccccagagctgcagatacttcaaccccaaggactacagctggaccgacatcagatgccccttcgagaagagaagagacgccgcctgcgtgttctgggacaacgtggtgtacatcctgggcggcagccagctgttccccatcaagagaatggactgctacaacgtggtgaaggacagctggtacagcaagctgggcccccccacccccagagacagcctggccgcctgcgccgccgagggcaagatctacaccagcggcggcagcgaggtgggcaacagcgccctgtacctgttcgagtgctacgacaccagaaccgagagctggcacaccaagcccagcatgctgacccagagatgcagccacggcatggtggaggccaacggcctgatctacgtgtgcggcggcagcctgggcaacaacgtgagcggcagagtgctgaacagctgcgaggtgtacgaccccgccaccgagacctggaccgagctgtgccccatgatcgaggccagaaagaaccacggcctggtgttcgtgaaggacaagatcttcgccgtgggcggccagaacggcctgggcggcctggacaacgtggagtactacgacatcaagctgaacgagtggaagatggtgagccccatgccctggaagggcgtgaccgtgaagtgcgccgccgtgggcagcatcgtgtacgtgctggccggcttccagggcgtgggcagactgggccacatcctggagtacaacaccgagaccgacaagtgggtggccaacagcaaggtgagagccttccccgtgaccagctgcctgatctgcgtggtggacacctgcggcgccaacgaggagaccctggagacctag

SEQ ID NO: 86038 - DNA, 1086 bp, synthetic construct
  misc_feature 1..1086: note = Description of Artificial Sequence: Synthetic coding sequence
  source 1..1086: mol_type = other DNA
atggtggacatcctggccaaggtgagattccccctgatcagcaagaacttcctgagcaagaccgtgcaggccgagcccctgatccaggacaaccccgagtgcctgaagatggtgatcagcggcatgagataccacctgctgagccccgaggacagagaggagctggtggacggcaccagacccagaagaaagaagcacgactacagaatcgccctgttcggcggcagccagccccagagctgcagatacttcaaccccaaggactacagctggaccgacatcagatgccccttcgagaagagaagagacgccgcctgcgtgttctgggacaacgtggtgtacatcctgggcggcagccagctgttccccatcaagagaatggactgctacaacgtggtgaaggacagctggtacagcaagctgggcccccccacccccagagacagcctggccgcctgcgccgccgagggcaagatctacaccagcggcggcagcgaggtgggcaacagcgccctgtacctgttcgagtgctacgacaccagaaccgagagctggcacaccaagcccagcatgctgacccagagatgcagccacggcatggtggaggccaacggcctgatctacgtgtgcggcggcagcctgggcaacaacgtgagcggcagagtgctgaacagctgcgaggtgtacgaccccgccaccgagacctggaccgagctgtgccccatgatcgaggccagaaagaaccacggcctggtgttcgtgaaggacaagatcttcgccgtgggcggccagaacggcctgggcggcctggacaacgtggagtactacgacatcaagctgaacgagtggaagatggtgagccccatgccctggaagggcgtgaccgtgaagtgcgccgccgtgggcagcatcgtgtacgtgctggccggcttccagggcgtgggcagactgggccacatcctggagtacaacaccgagaccgacaagtgggtggccaacagcaaggtgagagccttccccgtgaccagctgcctgatctgcgtggtggacacctgcggcgccaacgaggagaccctggagacctag

SEQ ID NO: 86039 - DNA, 1695 bp, synthetic construct; identical to SEQ ID NO: 86032
  misc_feature 1..1695: note = Description of Artificial Sequence: Synthetic coding sequence
  source 1..1695: mol_type = other DNA

SEQ ID NO: 86040 - DNA, 432 bp, synthetic construct
  misc_feature 1..432: note = Description of Artificial Sequence: Synthetic coding sequence
  source 1..432: mol_type = other DNA
atgctgggcggcaccgactgcagaaccttcctgaccagccacatcaacctgaagaagaccctgtgcgacgtgatcctgatggtgcaggagagaaagatccccgcccacagagtggtgctggccgccgccagccacttcttcaacctgatgttcaccaccaacatgctggagagcaagagcttcgaggtggagctgaaggacgccgagcccgacatcatcgagcagctggtggagttcgcctacaccgccagaatcagcgtgaacagcaacaacgtgcagagcctgctggacgccgccaaccagtaccagatcgagcccgtgaagaagatgtgcgtggacttcctgaaggagcaggtggacgccagcaactgcctgggcaagaagtaccagatccccgtggtgtgcctgttctgcttcatcctgtacttctag

SEQ ID NO: 86041 - DNA, 501 bp, synthetic construct
  misc_feature 1..501: note = Description of Artificial Sequence: Synthetic coding sequence
  source 1..501: mol_type = other DNA
atggccgccagcggcgtggagaagagcagcaagaagaagaccgagaagaagctggccgccagagaggaggccaagctgctggccggcttcatgggcgtgatgaacaacatgagaaagcagaagaccctgtgcgacgtgatcctgatggtgcaggagagaaagatccccgcccacagagtggtgctggccgccgccagccacttcttcaacctgatgttcaccaccaacatgctggagagcaagagcttcgaggtggagctgaaggacgccgagcccgacatcatcgagcagctggtggagttcgcctacaccgccagaatcagcgtgaacagcaacaacgtgcagagcctgctggacgccgccaaccagtaccagatcgagcccgtgaagaagatgtgcgtggacttcctgaaggagcaggtggacgccagcaactgcctgggcgaggccgagaaggtggaccagagcctgcccgagtgcggcatgctgttcaccgtgtag

SEQ ID NO: 86042 - DNA, 1863 bp, synthetic construct
  misc_feature 1..1863: note = Description of Artificial Sequence: Synthetic coding sequence
  source 1..1863: mol_type = other DNA
atggccagcgacagcatgagcagcaagcaggccagaaaccacatcaccaagggcaagagacagcagcagcaccagcagatcaagaacagaagcagcatcagcgacggcgacggcgaggacagcttcatcttcgaggccaacgaggcctggaaggacttccacggcagcctgctgagattctacgagaacggcgagctgtgcgacgtgaccctgaaggtgggcagcaagctgatcagctgccacaagctggtgctggcctgcgtgatcccctacttcagagccatgttcctgagcgagatggccgaggccaagcagaccctgatcgagatcagagacttcgacggcgacgccatcgaggacctggtgaagttcgtgtacagcagcagactgaccctgaccgtggacaacgtgcagcccctgctgtacgccgcctgcatcctgcaggtggagctggtggccagagcctgctgcgagtacatgaagctgcacttccaccccagcaactgcctggccgtgagagccttcgccgagagccacaacagaatcgacctgatggacatggccgaccagtacgcctgcgaccacttcaccgaggtggtggagtgcgaggacttcgtgagcgtgagcccccagcacctgcacaagctgctgagcagcagcgacctgaacatcgagaacgagaagcaggtgtacaacgccgccatcaagtggctgctggccaacccccagcaccacagcaagtggctggacgagaccctggcccaggtgagactgcccctgctgcccgtggacttcctgatgggcgtggtggccaaggagcagatcgtgaagcagaacctgaagtgcagagacctgctggacgaggccagaaactaccacctgcacctgagcagcagagccgtgcccgacttcgagtacagcatcagaaccacccccagaaagcacaccgccggcgtgctgttctgcgtgggcggcagaggcggcagcggcgaccccttcagaagcatcgagtgctacagcatcaacaagaacagctggttcttcggccccgagatgaacagcagaagaagacacgtgggcgtgatcagcgtggagggcaaggtgtacgccgtgggcggccacgacggcaacgagcacctgggcagcatggagatgttcgaccccctgaccaacaagtggatgatgaaggccagcatgaacaccaagagaagaggcatcgccctggccagcctgggcggccccatctacgccatcggcggcctggacgacaacacctgcttcaacgacgtggagagatacgacatcgagagcgaccagtggagcaccgtggcccccatgaacacccccagaggcggcgtgggcagcgtggccctggtgaaccacgtgtacgccgtgggcggcaacgacggcatggccagcctgagcagcgtggagagatacgacccccacctggacaagtggatcgaggtgaaggagatgggccagagaagagccggcaacggcgtgagcaagctgcacggctgcctgtacgtggtgggcggcttcgacgacaacagccccctgagcagcgtggagagatacgaccccagaagcaacaagtgggactacgtggccgccctgaccacccccagaggcggcgtgggcatcgccaccgtgatgggcaagatcttcgccgtgggcggccacaacggcaacgcctacctgaacaccgtggaggccttcgaccccgtgctgaacagatgggagctggtgggcagcgtgagccactgcagagccggcgccggcgtggccgtgtgcagctgcctgaccagccagatcagagacgtgggccacggcagcaacaacgtggtggactgcatgtag

SEQ ID NO: 86043 - DNA, 1863 bp, synthetic construct; identical to SEQ ID NO: 86042
  misc_feature 1..1863: note = Description of Artificial Sequence: Synthetic coding sequence
  source 1..1863: mol_type = other DNA

SEQ ID NO: 86044 - DNA, 810 bp, synthetic construct
  misc_feature 1..810: note = Description of Artificial Sequence: Synthetic coding sequence
  source 1..810: mol_type = other DNA
atgaacagcagaagaagacacgtgggcgtgatcagcgtggagggcaaggtgtacgccgtgggcggccacgacggcaacgagcacctgggcagcatggagatgttcgaccccctgaccaacaagtggatgatgaaggccagcatgaacaccaagagaagaggcatcgccctggccagcctgggcggccccatctacgccatcggcggcctggacgacaacacctgcttcaacgacgtggagagatacgacatcgagagcgaccagtggagcaccgtggcccccatgaacacccccagaggcggcgtgggcagcgtggccctggtgaaccacgtgtacgccgtgggcggcaacgacggcatggccagcctgagcagcgtggagagatacgacccccacctggacaagtggatcgaggtgaaggagatgggccagagaagagccggcaacggcgtgagcaagctgcacggctgcctgtacgtggtgggcggcttcgacgacaacagccccctgagcagcgtggagagatacgaccccagaagcaacaagtgggactacgtggccgccctgaccacccccagaggcggcgtgggcatcgccaccgtgatgggcaagatcttcgccgtgggcggccacaacggcaacgcctacctgaacaccgtggaggccttcgaccccgtgctgaacagatgggagctggtgggcagcgtgagccactgcagagccggcgccggcgtggccgtgtgcagctgcctgaccagccagatcagagacgtgggccacggcagcaacaacgtggtggactgcatgtag

SEQ ID NO: 86045 - DNA, 1875 bp, synthetic construct
  misc_feature 1..1875: note = Description of Artificial Sequence: Synthetic coding sequence
  source 1..1875: mol_type = other DNA
atgcagcccgaccccagacccagcggcgccggcgcctgctgcagattcctgcccctgcagagccagtgccccgagggcgccggcgacgccgtgatgtacgccagcaccgagtgcaaggccgaggtgacccccagccagcacggcaacagaaccttcagctacaccctggaggaccacaccaagcaggccttcggcatcatgaacgagctgagactgagccagcagctgtgcgacgtgaccctgcaggtgaagtaccaggacgcccccgccgcccagttcatggcccacaaggtggtgctggccagcagcagccccgtgttcaaggccatgttcaccaacggcctgagagagcagggcatggaggtggtgagcatcgagggcatccaccccaaggtgatggagagactgatcgagttcgcctacaccgccagcatcagcatgggcgagaagtgcgtgctgcacgtgatgaacggcgccgtgatgtaccagatcgacagcgtggtgagagcctgcagcgacttcctggtgcagcagctggaccccagcaacgccatcggcatcgccaacttcgccgagcagatcggctgcgtggagctgcaccagagagccagagagtacatctacatgcacttcggcgaggtggccaagcaggaggagttcttcaacctgagccactgccagctggtgaccctgatcagcagagacgacctgaacgtgagatgcgagagcgaggtgttccacgcctgcatcaactgggtgaagtacgactgcgagcagagaagattctacgtgcaggccctgctgagagccgtgagatgccacagcctgacccccaacttcctgcagatgcagctgcagaagtgcgagatcctgcagagcgacagcagatgcaaggactacctggtgaagatcttcgaggagctgaccctgcacaagcccacccaggtgatgccctgcagagcccccaaggtgggcagactgatctacaccgccggcggctacttcagacagagcctgagctacctggaggcctacaaccccagcgacggcacctggctgagactggccgacctgcaggtgcccagaagcggcctggccggctgcgtggtgggcggcctgctgtacgccgtgggcggcagaaacaacagccccgacggcaacaccgacagcagcgccctggactgctacaaccccatgaccaaccagtggagcccctgcgcccccatgagcgtgcccagaaacagaatcggcgtgggcgtgatcgacggccacatctacgccgtgggcggcagccacggctgcatccaccacaacagcgtggagagatacgagcccgagagagacgagtggcacctggtggcccccatgctgaccagaagaatcggcgtgggcgtggccgtgctgaacagactgctgtacgccgtgggcggcttcgacggcaccaacagactgaacagcgccgagtgctactaccccgagagaaacgagtggagaatgatcaccgccatgaacaccatcagaagcggcgccggcgtgtgcgtgctgcacaactgcatctacgccgccggcggctacgacggccaggaccagctgaacagcgtggagagatacgacgtggagaccgagacctggaccttcgtggcccccatgaagcacagaagaagcgccctgggcatcaccgtgcaccagggcagaatctacgtgctgggcggctacgacggccacaccttcctggacagcgtggagtgctacgaccccgacaccgacacctggagcgaggtgaccagaatgaccagcggcagaagcggcgtgggcgtggccgtgaccatggagccctgcagaaagcagatcgaccagcagaactgcacctgctag

SEQ ID NO: 86046 - DNA, 1875 bp, synthetic construct; identical to SEQ ID NO: 86045
  misc_feature 1..1875: note = Description of Artificial Sequence: Synthetic coding sequence
  source 1..1875: mol_type = other DNA

SEQ ID NO: 86047 - DNA, 2199 bp, synthetic construct
  misc_feature 1..2199: note = Description of Artificial Sequence: Synthetic coding sequence
  source 1..2199: mol_type = other DNA
atggagggcggcgaccagagcgaggaggagcccagagagagaagccaggccggcggcatgggcaccctgtggagccaggagagcacccccgaggagagactgcccgtggagggcagcagaccctgggccgtggccagaagagtgctgaccgccatcctgatcctgggcctgctgctgtgcttcagcgtgctgctgttctacaacttccagaactgcggccccagaccctgcgagaccagcgtgtgcctggacctgagagaccactacctggccagcggcaacaccagcgtggccccctgcaccgacttcttcagcttcgcctgcggcagagccaaggagaccaacaacagcttccaggagctggccaccaagaacaagaacagactgagaagaatcctggaggtgcagaacagctggcaccccggcagcggcgaggagaaggccttccagttctacaacagctgcatggacaccctggccatcgaggccgccggcaccggccccctgagacaggtgatcgaggagctgggcggctggagaatcagcggcaagtggaccagcctgaacttcaacagaaccctgagactgctgatgagccagtacggccacttccccttcttcagagcctacctgggcccccaccccgccagcccccacacccccgtgatccagatcgaccagcccgagttcgacgtgcccctgaagcaggaccaggagcagaagatctacgcccagatcttcagagagtacctgacctacctgaaccagctgggcaccctgctgggcggcgaccccagcaaggtgcaggagcacagcagcctgagcatcagcatcaccagcagactgttccagttcctgagacccctggagcagagaagagcccagggcaagctgttccagatggtgaccatcgaccagctgaaggagatggcccccgccatcgactggctgagctgcctgcaggccaccttcacccccatgagcctgagccccagccagagcctggtggtgcacgacgtggagtacctgaagaacatgagccagctggtggaggagatgctgctgaagcagagagacttcctgcagagccacatgatcctgggcctggtggtgaccctgagccccgccctggacagccagttccaggaggccagaagaaagctgagccagaagctgagagagctgaccgagcagccccccatgcccgccagacccagatggatgaagtgcgtggaggagaccggcaccttcttcgagcccaccctggccgccctgttcgtgagagaggccttcggccccagcaccagaagcgccgccatgaagctgttcaccgccatcagagacgccctgatcaccagactgagaaacctgccctggatgaacgaggagacccagaacatggcccaggacaaggtggcccagctgcaggtggagatgggcgccagcgagtgggccctgaagcccgagctggccagacaggagtacaacgacatccagctgggcagcagcttcctgcagagcgtgctgagctgcgtgagaagcctgagagccagaatcgtgcagagcttcctgcagccccacccccagcacagatggaaggtgagcccctgggacgtgaacgcctactacagcgtgagcgaccacgtggtggtgttccccgccggcctgctgcagccccccttcttccaccccggctaccccagagccgtgaacttcggcgccgccggcagcatcatggcccacgagctgctgcacatcttctaccagctgctgctgcccggcggctgcctggcctgcgacaaccacgccctgcaggaggcccacctgtgcctgaagagacactacgccgccttccccctgcccagcagaaccagcttcaacgacagcctgaccttcctggagaacgccgccgacgtgggcggcctggccatcgccctgcaggcctacagcaagagactgctgagacaccacggcgagaccgtgctgcccagcctggacctgagcccccagcagatcttcttcagaagctacgcccaggtgatgtgcagaaagcccagcccccaggacagccacgacacccacagccccccccacctgagagtgcacggccccctgagcagcacccccgccttcgccagatacttcagatgcgccagaggcgccctgctgaaccccagcagcagatgccagctgtggtag

SEQ ID NO: 86048 - DNA, 1935 bp, synthetic construct
  misc_feature 1..1935: note = Description of Artificial Sequence: Synthetic coding sequence
  source 1..1935: mol_type = other DNA
atgagcagacagttcagcagcagaagcggctacagaagcggcggcggcttcagcagcggcagcgccggcatcatcaactaccagagaagaaccaccagcagcagcaccagaagaagcggcggcggcggcggcagattcagcagctgcggcggcggcggcggcagcttcggcgccggcggcggcttcggcagcagaagcctggtgaacctgggcggcagcaagagcatcagcatcagcgtggccagaggcggcggcagaggcagcggcttcggcggcggctacggcggcggcggcttcggcggcggcggcttcggcggcggcggcttcggcggcggcggcatcggcggcggcggcttcggcggcttcggcagcggcggcggcggcttcggcggcggcggcttcggcggcggcggctacggcggcggctacggccccgtgtgcccccccggcggcatccaggaggtgaccatcaaccagagcctgctgcagcccctgaacgtggagatcgaccccgagatccagaaggtgaagagcagagagagagagcagatcaagagcctgaacaaccagttcgccagcttcatcgacaaggtgagattcctggagcagcagaaccaggtgctgcagaccaagtgggagctgctgcagcaggtggacaccagcaccagaacccacaacctggagccctacttcgagagcttcatcaacaacctgagaagaagagtggaccagctgaagagcgaccagagcagactggacagcgagctgaagaacatgcaggacatggtggaggactacagaaacaagtacgaggacgagatcaacaagagaaccaacgccgagaacgagttcgtgaccatcaagaaggacgtggacggcgcctacatgaccaaggtggacctgcaggccaagctggacaacctgcagcaggagatcgacttcctgaccgccctgtaccaggccgagctgagccagatgcagacccagatcagcgagaccaacgtgatcctgagcatggacaacaacagaagcctggacctggacagcatcatcgccgaggtgaaggcccagtacgaggacatcgcccagaagagcaaggccgaggccgagagcctgtaccagagcaagtacgaggagctgcagatcaccgccggcagacacggcgacagcgtgagaaacagcaagatcgagatcagcgagctgaacagagtgatccagagactgagaagcgagatcgacaacgtgaagaagcagatcagcaacctgcagcagagcatcagcgacgccgagcagagaggcgagaacgccctgaaggacgccaagaacaagctgaacgacctggaggacgccctgcagcaggccaaggaggacctggccagactgctgagagactaccaggagctgatgaacaccaagctggccctggacctggagatcgccacctacagaaccctgctggagggcgaggagagcagaatgagcggcgagtgcgcccccaacgtgagcgtgagcgtgagcaccagccacaccaccatcagcggcggcggcagcagaggcggcggcggcggcggctacggcagcggcggcagcagctacggcagcggcggcggcagctacggcagcggcggcggcggcggcggcggcagaggcagctacggcagcggcggcagcagctacggcagcggcggcggcagctacggcagcggcggcggcggcggcggccacggcagctacggcagcggcagcagcagcggcggctacagaggcggcagcggcggcggcggcggcggcagcagcggcggcagaggcagcggcggcggcagcagcggcggcagcatcggcggcagaggcagcagcagcggcggcgtgaagagcagcggcggcagcagcagcgtgaagttcgtgagcaccacctacagcggcgtgaccagatag

SEQ ID NO: 86049 - DNA, 1755 bp, synthetic construct
  misc_feature 1..1755: note = Description of Artificial Sequence: Synthetic coding sequence
  source 1..1755: mol_type = other DNA
atgagcgtgagatacagcagcagcaagcactacagcagcagcagaagcggcggcggcggcggcggcggcggctgcggcggcggcggcggcgtgagcagcctgagaatcagcagcagcaagggcagcctgggcggcggcttcagcagcggcggcttcagcggcggcagcttcagcagaggcagcagcggcggcggctgcttcggcggcagcagcggcggctacggcggcctgggcggcttcggcggcggcagcttcagaggcagctacggcagcagcagcttcggcggcagctacggcggcatcttcggcggcggcagcttcggcggcggcagcttcggcggcggcagcttcggcggcggcggcttcggcggcggcggcttcggcggcggcttcggcggcggcttcggcggcgacggcggcctgctgagcggcaacgagaaggtgaccatgcagaacctgaacgacagactggccagctacctggacaaggtgagagccctggaggagagcaactacgagctggagggcaagatcaaggagtggtacgagaagcacggcaacagccaccagggcgagcccagagactacagcaagtactacaagaccatcgacgacctgaagaaccagatcctgaacctgaccaccgacaacgccaacatcctgctgcagatcgacaacgccagactggccgccgacgacttcagactgaagtacgagaacgaggtggccctgagacagagcgtggaggccgacatcaacggcctgagaagagtgctggacgagctgaccctgaccaaggccgacctggagatgcagatcgagagcctgaccgaggagctggcctacctgaagaagaaccacgaggaggagatgaaggacctgagaaacgtgagcaccggcgacgtgaacgtggagatgaacgccgcccccggcgtggacctgacccagctgctgaacaacatgagaagccagtacgagcagctggccgagcagaacagaaaggacgccgaggcctggttcaacgagaagagcaaggagctgaccaccgagatcgacaacaacatcgagcagatcagcagctacaagagcgagatcaccgagctgagaagaaacgtgcaggccctggagatcgagctgcagagccagctggccctgaagcagagcctggaggccagcctggccgagaccgagggcagatactgcgtgcagctgagccagatccaggcccagatcagcgccctggaggagcagctgcagcagatcagagccgagaccgagtgccagaacaccgagtaccagcagctgctggacatcaagatcagactggagaacgagatccagacctacagaagcctgctggagggcgagggcagcagcggcggcggcggcagaggcggcggcagcttcggcggcggctacggcggcggcagcagcggcggcggcagcagcggcggcggccacggcggcggccacggcggcagcagcggcggcggctacggcggcggcagcagcggcggcggcagcagcggcggcggctacggcggcggcagcagcagcggcggccacggcggcagcagcagcggcggctacggcggcggcagcagcggcggcggcggcggcggctacggcggcggcagcagcggcggcggcagcagcagcggcggcggctacggcggcggcagcagcagcggcggccacaagagcagcagcagcggcagcgtgggcgagagcagcagcaagggccccagatactag

SEQ ID NO: 86050 - DNA, 1485 bp, synthetic construct
  misc_feature 1..1485: note = Description of Artificial Sequence: Synthetic coding sequence
  source 1..1485: mol_type = other DNA
atggacctgagcaacaacaccatgagcctgagcgtgagaacccccggcctgagcagaagactgagcagccagagcgtgatcggcagacccagaggcatgagcgccagcagcgtgggcagcggctacggcggcagcgccttcggcttcggcgccagctgcggcggcggcttcagcgccgccagcatgttcggcagcagcagcggcttcggcggcggcagcggcagcagcatggccggcggcctgggcgccggctacggcagagccctgggcggcggcagcttcggcggcctgggcatgggcttcggcggcagccccggcggcggcagcctgggcatcctgagcggcaacgacggcggcctgctgagcggcagcgagaaggagaccatgcagaacctgaacgacagactggccagctacctggacaaggtgagagccctggaggaggccaacaccgagctggagaacaagatcagagagtggtacgagaccagaggcaccggcaccgccgacgccagccagagcgactacagcaagtactaccccctgatcgaggacctgagaaacaagatcatcagcgccagcatcggcaacgcccagctgctgctgcagatcgacaacgccagactggccgccgaggacttcagaatgaagtacgagaacgagctggccctgagacagggcgtggaggccgacatcaacggcctgagaagagtgctggacgagctgaccctgaccagaaccgacctggagatgcagatcgagagcctgaacgaggagctggcctacatgaagaagaaccacgaggacgagctgcagagcttcagagtgggcggccccggcgaggtgagcgtggagatggacgccgcccccggcgtggacctgaccagactgctgaacgacatgagagcccagtacgagaccatcgccgagcagaacagaaaggacgccgaggcctggttcatcgagaagagcggcgagctgagaaaggagatcagcaccaacaccgagcagctgcagagcagcaagagcgaggtgaccgacctgagaagagccttccagaacctggagatcgagctgcagagccagctggccatgaagaagagcctggaggacagcctggccgaggccgagggcgactactgcgcccagctgagccaggtgcagcagctgatcagcaacctggaggcccagctgctgcaggtgagagccgacgccgagagacagaacgtggaccaccagagactgctgaacgtgaaggccagactggagctggagatcgagacctacagaagactgctggacggcgaggcccagggcgacggcctggaggagagcctgttcgtgaccgacagcaagagccaggcccagagcaccgacagcagcaaggaccccaccaagaccagaaagatcaagaccgtggtgcaggagatggtgaacggcgaggtggtgagcagccaggtgcaggagatcgaggagctgatgtag

SEQ ID NO: 86051 - DNA, 1068 bp, synthetic construct
  misc_feature 1..1068: note = Description of Artificial Sequence: Synthetic coding sequence
  source 1..1068: mol_type = other DNA
atgagcctgagactgcagagcagcagcgccagctacggcggcggcttcggcggcggcagctgccagctgggcggcggcagaggcgtgagcacctgcagcaccagattcgtgagcggcggcagcgccggcggctacggcggcggcgtgagctgcggcttcggcggcggcgccggcagcggcttcggcggcggcctgggcggcggcttcggcggcggcttcgccggcggcttcgtggacttcggcgcctgcgacggcggcctgctgaccggcaacgagaagatcaccatgcagaacctgaacgacagactggccagctacctggagaaggtgagagccctggaggaggccaacgccgacctggaggtgaagatcagagactggcacctgaagcagagccccgccagccccgagagagactacagcccctactacaagaccatcgaggagctgagagacaagatcctgaccgccaccatcgagaacaacagagtgatcctggagatcgacaacgccagactggccgccgacgacttcagactgaagtacgagaacgagctggccctgagacagagcgtggaggccgacatcaacggcctgagaagagtgctggacgagctgaccctgagcaagaccgacctggagatgcagatcgagagcctgaacgaggagctggcctacatgaagaagaaccacgaggaggagatgaaggagttcagcaaccaggtggtgggccaggtgaacgtggagatggacgccacccccggcatcgacctgaccagagtgctggccgagatgagagagcagtacgaggccatggccgagagaaacagaagagacgccgaggagtggttccacaccaagagcgccgagctgaacaaggaggtgagcaccaacaccgccatgatccagaccagcaagaccgagatcaccgagctgagaagaaccctgcagggcctggagatcgagctgcagagccagctgagcatgaaggccggcctggagaacaccgccgccgaccccggcacccaccagcagcacagaggccccgccgagagagccccccagtag

SEQ ID NO: 86052 - DNA, 1377 bp, synthetic construct
  misc_feature 1..1377: note = Description of Artificial Sequence: Synthetic coding sequence
  source 1..1377: mol_type = other DNA
atgagcctgagactgcagagcagcagcgccagctacggcggcggcttcggcggcggcagctgccagctgggcggcggcagaggcgtgagcacctgcagcaccagattcgtgagcggcggcagcgccggcggctacggcggcggcgtgagctgcggcttcggcggcggcgccggcagcggcttcggcggcggctacggcggcggcctgggcggcggctacggcggcggcctgggcggcggcttcggcggcggcttcgccggcggcttcgtggacttcggcgcctgcgacggcggcctgctgaccggcaacgagaagatcaccatgcagaacctgaacgacagactggccagctacctggagaaggtgagagccctggaggaggccaacgccgacctggaggtgaagatcagagactggcacctgaagcagagccccgccagccccgagagagactacagcccctactacaagaccatcgaggagctgagagacaagatcctgaccgccaccatcgagaacaacagagtgatcctggagatcgacaacgccagactggccgccgacgacttcagactgaagtacgagaacgagctggccctgagacagagcgtggaggccgacatcaacggcctgagaagagtgctggacgagctgaccctgagcaagaccgacctggagatgcagatcgagagcctgaacgaggagctggcctacatgaagaagaaccacgaggaggagatgaaggagttcagcaaccaggtggtgggccaggtgaacgtggagatggacgccacccccggcatcgacctgaccagagtgctggccgagatgagagagcagtacgaggccatggccgagagaaacagaagagacgccgaggagtggttccacaccaagagcgccgagctgaacaaggaggtgagcaccaacaccgccatgatccagaccagcaagaccgagatcaccgagctgagaagaaccctgcagggcctggagatcgagctgcagagccagctgagcatgaaggccggcctggagaacaccgtggccgagaccgagtgcagatacgccctgcagctgcagcagatccagggcctgatcagcagcatcgaggcccagctgagcgagctgagaagcgagatggagtgccagaaccaggagtacaagatgctgctggacatcaagaccagactggagcaggagatcgccacctacagaagcctgctggagggccaggacgccaagatgatcggcttccccagcagcgccggcagcgtgagccccagaagcaccagcgtgaccaccaccagcagcgccagcgtgaccaccaccagcaacgccagcggcagaagaaccagcgacgtgagaagaccctag

SEQ ID NO: 86053 - DNA, 1263 bp, synthetic construct
  misc_feature 1..1263: note = Description of Artificial Sequence: Synthetic coding sequence
  source 1..1263: mol_type = other DNA
atgagcctgagactgcagagcagcagcgccagctacggcggcggcttcggcggcggcagctgccagctgggcggcggcagaggcgtgagcacctgcagcaccagattcgtgagcggcggcagcgccggcggctacggcggcggcgtgagctgcggcttcggcggcggcgccggcagcggcttcggcggcggctacggcggcggcctgggcggcggctacggcggcggcctgggcggcggcttcggcggcggcttcgccggcggcttcgtggacttcggcgcctgcgacggcggcctgctgaccggcaacgagaagatcaccatgcagaacctgaacgacagactggccagctacctggagaaggtgagagccctggaggaggccaacgccgacctggaggtgaagatcagagactggcacctgaagcagagccccgccagccccgagagagactacagcccctactacaagaccatcgaggagctgagagacaagatcctgaccgccaccatcgagaacaacagagtgatcctggagatcgacaacgccagactggccgccgacgacttcagactgaagtacgagaacgagctggccctgagacagagcgtggaggccgacatcaacggcctgagaagagtgctggacgagctgaccctgagcaagaccgacctggagatgcagatcgagagcctgaacgaggagctggcctacatgaagaagaaccacgaggaggagatgaaggagttcagcaaccaggtggtgggccaggtgaacgtggagatggacgccacccccggcatcgacctgaccagagtgctggccgagatgagagagcagtacgaggccatggccgagagaaacagaagagacgccgaggagtggttccacaccaagagcgccgagctgaacaaggaggtgagcaccaacaccgccatgatccagaccagcaagaccgagatcaccgagctgagaagaaccctgcagggcctggagatcgagctgcagagccagctgagcatgaaggccggcctggagaacaccgtggccgagaccgagtgcagatacgccctgcagctgcagcagatccagggcctgatcagcagcatcgaggcccagctgagcgagctgagaagcgagatggagtgccagaaccaggagtacaagatgctgctggacatcaagaccagactggagcaggagatcgccacctacagaagcctgctggagggccaggacgccaagaagagacagcccccctag

SEQ ID NO: 86054 - DNA, 1371 bp, synthetic construct
  misc_feature 1..1371: note = Description of Artificial Sequence: Synthetic coding sequence
  source 1..1371: mol_type = other DNA
atgaccaccaccttcctgcagaccagcagcagcaccttcggcggcggcagcaccagaggcggcagcctgctggccggcggcggcggcttcggcggcggcagcctgagcggcggcggcggcagcagaagcatcagcgccagcagcgccagattcgtgagcagcggcagcggcggcggctacggcggcggcatgagagtgtgcggcttcggcggcggcgccggcagcgtgttcggcggcggcttcggcggcggcgtgggcggcggcttcggcggcggcttcggcggcggcgacggcggcctgctgagcggcaacgagaagatcaccatgcagaacctgaacgacagactggccagctacctggacaaggtgagagccctggaggaggccaacgccgacctggaggtgaagatccacgactggtaccagaagcagacccccaccagccccgagtgcgactacagccagtacttcaagaccatcgaggagctgagagacaagatcatggccaccaccatcgacaacagcagagtgatcctggagatcgacaacgccagactggccgccgacgacttcagactgaagtacgagaacgagctggccctgagacagggcgtggaggccgacatcaacggcctgagaagagtgctggacgagctgaccctggccagaaccgacctggagatgcagatcgagggcctgaacgaggagctggcctacctgaagaagaaccacgaggaggagatgaaggagttcagcagccagctggccggccaggtgaacgtggagatggacgccgcccccggcgtggacctgaccagagtgctggccgagatgagagagcagtacgaggccatggccgagaagaacagaagagacgtggaggcctggttcttcagcaagaccgaggagctgaacaaggaggtggccagcaacaccgagatgatccagaccagcaagaccgagatcaccgacctgagaagaaccatgcaggagctggagatcgagctgcagagccagctgagcatgaaggccggcctggagaacagcctggccgagaccgagtgcagatacgccacccagctgcagcagatccagggcctgatcggcggcctggaggcccagctgagcgagctgagatgcgagatggaggcccagaaccaggagtacaagatgctgctggacatcaagaccagactggagcaggagatcgccacctacagaagcctgctggagggccaggacgccaagatggccggcatcgccatcagagaggccagcagcggcggcggcggcagcagcagcaacttccacatcaacgtggaggagagcgtggacggccaggtggtgagcagccacaagagagagatctag

SEQ ID NO: 86055 - DNA, 876 bp, synthetic construct
  misc_feature 1..876: note = Description of Artificial Sequence: Synthetic coding sequence
  source 1..876: mol_type = other DNA
atgaccggcaccagaagcagaccccagcccgcccagaacgccaccaccgccaacaccagcagacccctgaagagcagcggcaccagatacgagaacgagctggccctgagacagggcgtggaggccgacatcaacggcctgagaagagtgctggacgagctgaccctggccagaaccgacctggagatgcagatcgagggcctgaacgaggagctggcctacctgaagaagaaccacgaggaggagatgaaggagttcagcagccagctggccggccaggtgaacgtggagatggacgccgcccccggcgtggacctgaccagagtgctggccgagatgagagagcagtacgaggccatggccgagaagaacagaagagacgtggaggcctggttcttcagcaagaccgaggagctgaacaaggaggtggccagcaacaccgagatgatccagaccagcaagaccgagatcaccgacctgagaagaaccatgcaggagctggagatcgagctgcagagccagctgagcatgaaggccggcctggagaacagcctggccgagaccgagtgcagatacgccacccagctgcagcagatccagggcctgatcggcggcctggaggcccagctgagcgagctgagatgcgagatggaggcccagaaccaggagtacaagatgctgctggacatcaagaccagactggagcaggagatcgccacctacagaagcctgctggagggccaggacgccaagatggccggcatcgccatcagagaggccagcagcggcggcggcggcagcagcagcaacttccacatcaacgtggaggagagcgtggacggccaggtggtgagcagccacaagagagagatctag

SEQ ID NO: 86056 - DNA, 1371 bp, synthetic construct; identical to SEQ ID NO: 86054
  misc_feature 1..1371: note = Description of Artificial Sequence: Synthetic coding sequence
  source 1..1371: mol_type = other DNA

SEQ ID NO: 86057 - DNA, 756 bp, synthetic construct
  misc_feature 1..756: note = Description of Artificial Sequence: Synthetic coding sequence
  source 1..756: mol_type = other DNA
atgaccggcaccagaagcagaccccagcccgcccagaacgccaccaccgccaacaccagcagacccctgaagagcagcggcaccagatacgagaacgagctggccctgagacagggcgtggaggccgacatcaacggcctgagaagagtgctggacgagctgaccctggccagaaccgacctggagatgcagatcgagggcctgaacgaggagctggcctacctgaagaagaaccacgaggaggagatgaaggagttcagcagccagctggccggccaggtgaacgtggagatggacgccgcccccggcgtggacctgaccagagtgctggccgagatgagagagcagtacgaggccatggccgagaagaacagaagagacgtggaggcctggttcttcagcaagaccgaggagctgaacaaggaggtggccagcaacaccgagatgatccagaccagcaagaccgagatcaccgacctgagaagaaccatgcaggagctggagatcgagctgcagagccagctgagcatgaaggccggcctggagaacagcctggccgagaccgagtgcagatacgccacccagctgcagcagatccagggcctgatcggcggcctggaggcccagctgagcgagctgagatgcgagatggaggcccagaaccaggagtacaagatgctgctggacatcaagaccagactggagcaggagatcgccacctacagaagcctgctggagggccaggacgccaagtag

SEQ ID NO: 86058 - DNA, 663 bp, synthetic construct
  misc_feature 1..663: note = Description of Artificial Sequence: Synthetic coding sequence
  source 1..663: mol_type = other DNA
atgaccggcaccagaagcagaccccagcccgcccagaacgccaccaccgccaacaccagcagacccctgaagagcagcggcaccagatacgagaacgagctggccctgagacagggcgtggaggccgacatcaacggcctgagaagagtgctggacgagctgaccctggccagaaccgacctggagatgcagatcgagggcctgaacgaggagctggcctacctgaagaagaaccacgaggaggagatgaaggagttcagcagccagctggccggccaggtgaacgtggagatggacgccgcccccggcgtggacctgaccagagtgctggccgagatgagagagcagtacgaggccatggccgagaagaacagaagagacgtggaggcctggttcttcagcaagaccgaggagctgaacaaggaggtggccagcaacaccgagatgatccagaccagcaagaccgagatcaccgacctgagaagaaccatgcaggagctggagatcgagctgcagagccagctgagcatgaaggccggcctggagaacagcctggccgagaccgagtgcagatacgccacccagctgcagcagatccagggcctgatcggcggcctggaggcccagctgagcgagctgagatgcgagatggaggcccagtag

SEQ ID NO: 86059 - DNA, 1422 bp, synthetic construct
  misc_feature 1..1422: note = Description of Artificial Sequence: Synthetic coding sequence
  source 1..1422: mol_type = other DNA
atgaccacctgcagcagacagttcaccagcagcagcagcatgaagggcagctgcggcatcggcggcggcatcggcggcggcagcagcagaatcagcagcgtgctggccggcggcagctgcagagcccccagcacctacggcggcggcctgagcgtgagcagcagattcagcagcggcggcgcctgcggcctgggcggcggctacggcggcggcttcagcagcagcagcagcttcggcagcggcttcggcggcggctacggcggcggcctgggcgccggcttcggcggcggcctgggcgccggcttcggcggcggcttcgccggcggcgacggcctgctggtgggcagcgagaaggtgaccatgcagaacctgaacgacagactggccagctacctggacaaggtgagagccctggaggaggccaacgccgacctggaggtgaagatcagagactggtaccagagacagagacccagcgagatcaaggactacagcccctacttcaagaccatcgaggacctgagaaacaagatcatcgccgccaccatcgagaacgcccagcccatcctgcagatcgacaacgccagactggccgccgacgacttcagaaccaagtacgagcacgagctggccctgagacagaccgtggaggccgacgtgaacggcctgagaagagtgctggacgagctgaccctggccagaaccgacctggagatgcagatcgagggcctgaaggaggagctggcctacctgagaaagaaccacgaggaggagatgctggccctgagaggccagaccggcggcgacgtgaacgtggagatggacgccgcccccggcgtggacctgagcagaatcctgaacgagatgagagaccagtacgagcagatggccgagaagaacagaagagacgccgagacctggttcctgagcaagaccgaggagctgaacaaggaggtggccagcaacagcgagctggtgcagagcagcagaagcgaggtgaccgagctgagaagagtgctgcagggcctggagatcgagctgcagagccagctgagcatgaaggccagcctggagaacagcctggaggagaccaagggcagatactgcatgcagctgagccagatccagggcctgatcggcagcgtggaggagcagctggcccagctgagatgcgagatggagcagcagagccaggagtaccagatcctgctggacgtgaagaccagactggagcaggagatcgccacctacagaagactgctggagggcgaggacgcccacctgagcagccagcaggccagcggccagagctacagcagcagagaggtgttcaccagcagcagcagcagcagcagcagacagaccagacccatcctgaaggagcagagcagcagcagcttcagccagggccagagcagctag

SEQ ID NO: 86060 - DNA, 1299 bp, synthetic construct
  misc_feature 1..1299: note = Description of Artificial Sequence: Synthetic coding sequence
  source 1..1299: mol_type = other DNA
atgaccaccagcatcagacagttcaccagcagcagcagcatcaagggcagcagcggcctgggcggcggcagcagcagaaccagctgcagactgagcggcggcctgggcgccggcagctgcagactgggcagcgccggcggcctgggcagcaccctgggcggcagcagctacagcagctgctacagcttcggcagcggcggcggctacggcagcagcttcggcggcgtggacggcctgctggccggcggcgagaaggccaccatgcagaacctgaacgacagactggccagctacctggacaaggtgagagccctggaggaggccaacaccgagctggaggtgaagatcagagactggtaccagagacaggcccccggccccgccagagactacagccagtactacagaaccatcgaggagctgcagaacaagatcctgaccgccaccgtggacaacgccaacatcctgctgcagatcgacaacgccagactggccgccgacgacttcagaaccaagttcgagaccgagcaggccctgagactgagcgtggaggccgacatcaacggcctgagaagagtgctggacgagctgaccctggccagagccgacctggagatgcagatcgagaacctgaaggaggagctggcctacctgaagaagaaccacgaggaggagatgaacgccctgagaggccaggtgggcggcgagatcaacgtggagatggacgccgcccccggcgtggacctgagcagaatcctgaacgagatgagagaccagtacgagaagatggccgagaagaacagaaaggacgccgaggactggttcttcagcaagaccgaggagctgaacagagaggtggccaccaacagcgagctggtgcagagcggcaagagcgagatcagcgagctgagaagaaccatgcaggccctggagatcgagctgcagagccagctgagcatgaaggccagcctggagggcaacctggccgagaccgagaacagatactgcgtgcagctgagccagatccagggcctgatcggcagcgtggaggagcagctggcccagctgagatgcgagatggagcagcagaaccaggagtacaagatcctgctggacgtgaagaccagactggagcaggagatcgccacctacagaagactgctggagggcgaggacgcccacctgacccagtacaagaaggagcccgtgaccaccagacaggtgagaaccatcgtggaggaggtgcaggacggcaaggtgatcagcagcagagagcaggtgcaccagaccaccagatag

SEQ ID NO: 86061 - DNA, 1920 bp, synthetic construct
  misc_feature 1..1920: note = Description of Artificial Sequence: Synthetic coding sequence
  source 1..1920: mol_type = other DNA
atgagctgccagatcagctgcaagagcagaggcagaggcggcggcggcggcggcttcagaggcttcagcagcggcagcgccgtggtgagcggcggcagcagaagaagcaccagcagcttcagctgcctgagcagacacggcggcggcggcggcggcttcggcggcggcggcttcggcagcagaagcctggtgggcctgggcggcaccaagagcatcagcatcagcgtggccggcggcggcggcggcttcggcgccgccggcggcttcggcggcagaggcggcggcttcggcggcggcagcagcttcggcggcggcagcggcttcagcggcggcggcttcggcggcggcggcttcggcggcggcagattcggcggcttcggcggccccggcggcgtgggcggcctgggcggccccggcggcttcggccccggcggctaccccggcggcatccacgaggtgagcgtgaaccagagcctgctgcagcccctgaacgtgaaggtggaccccgagatccagaacgtgaaggcccaggagagagagcagatcaagaccctgaacaacaagttcgccagcttcatcgacaaggtgagattcctggagcagcagaaccaggtgctgcagaccaagtgggagctgctgcagcagatgaacgtgggcaccagacccatcaacctggagcccatcttccagggctacatcgacagcctgaagagatacctggacggcctgaccgccgagagaaccagccagaacagcgagctgaacaacatgcaggacctggtggaggactacaagaagaagtacgaggacgagatcaacaagagaaccgccgccgagaacgacttcgtgaccctgaagaaggacgtggacaacgcctacatgatcaaggtggagctgcagagcaaggtggacctgctgaaccaggagatcgagttcctgaaggtgctgtacgacgccgagatcagccagatccaccagagcgtgaccgacaccaacgtgatcctgagcatggacaacagcagaaacctggacctggacagcatcatcgccgaggtgaaggcccagtacgaggagatcgcccagagaagcaaggaggaggccgaggccctgtaccacagcaagtacgaggagctgcaggtgaccgtgggcagacacggcgacagcctgaaggagatcaagatcgagatcagcgagctgaacagagtgatccagagactgcagggcgagatcgcccacgtgaagaagcagtgcaagaacgtgcaggacgccatcgccgacgccgagcagagaggcgagcacgccctgaaggacgccagaaacaagctgaacgacctggaggaggccctgcagcaggccaaggaggacctggccagactgctgagagactaccaggagctgatgaacgtgaagctggccctggacgtggagatcgccacctacagaaagctgctggagggcgaggagtgcagaatgagcggcgacctgagcagcaacgtgaccgtgagcgtgaccagcagcaccatcagcagcaacgtggccagcaaggccgccttcggcggcagcggcggcagaggcagcagcagcggcggcggctacagcagcggcagcagcagctacggcagcggcggcagacagagcggcagcagaggcggcagcggcggcggcggcagcatcagcggcggcggctacggcagcggcggcggcagcggcggcagatacggcagcggcggcggcagcaagggcggcagcatcagcggcggcggctacggcagcggcggcggcaagcacagcagcggcggcggcagcagaggcggcagcagcagcggcggcggctacggcagcggcggcggcggcagcagcagcgtgaagggcagcagcggcgaggccttcggcagcagcgtgaccttcagcttcagatag

SEQ ID NO: 86062 - DNA, 1275 bp, synthetic construct
  misc_feature 1..1275: note = Description of Artificial Sequence: Synthetic coding sequence
  source 1..1275: mol_type = other DNA
atggacttcagcagaagaagcttccacagaagcctgagcagcagcctgcaggcccccgtggtgagcaccgtgggcatgcagagactgggcaccacccccagcgtgtacggcggcgccggcggcagaggcatcagaatcagcaacagcagacacaccgtgaactacggcagcgacctgaccggcggcggcgacctgttcgtgggcaacgagaagatggccatgcagaacctgaacgacagactggccagctacctggagaaggtgagaaccctggagcagagcaacagcaagctggaggtgcagatcaagcagtggtacgagaccaacgcccccagagccggcagagactacagcgcctactacagacagatcgaggagctgagaagccagatcaaggacgcccagctgcagaacgccagatgcgtgctgcagatcgacaacgccaagctggccgccgaggacttcagactgaagtacgagaccgagagaggcatcagactgaccgtggaggccgacctgcagggcctgaacaaggtgttcgacgacctgaccctgcacaagaccgacctggagatccagatcgaggagctgaacaaggacctggccctgctgaagaaggagcaccaggaggaggtggacggcctgcacaagcacctgggcaacaccgtgaacgtggaggtggacgccgcccccggcctgaacctgggcgtgatcatgaacgagatgagacagaagtacgaggtgatggcccagaagaacctgcaggaggccaaggagcagttcgagagacagaccgccgtgctgcagcagcaggtgaccgtgaacaccgaggagctgaagggcaccgaggtgcagctgaccgagctgagaagaaccagccagagcctggagatcgagctgcagagccacctgagcatgaaggagagcctggagcacaccctggaggagaccaaggccagatacagcagccagctggccaacctgcagagcctgctgagcagcctggaggcccagctgatgcagatcagaagcaacatggagagacagaacaacgagtaccacatcctgctggacatcaagaccagactggagcaggagatcgccacctacagaagactgctggagggcgaggacgtgaagaccaccgagtaccagctgagcaccctggaggagagagacatcaagaagaccagaaagatcaagaccgtggtgcaggaggtggtggacggcaaggtggtgagcagcgaggtgaaggaggtggaggagaacatctag

SEQ ID NO: 86063 - DNA, 1578 bp, synthetic construct
  misc_feature 1..1578: note = Description of Artificial Sequence: Synthetic coding sequence
  source 1..1578: mol_type = other DNA
atgagctgcagcagcagagccagcagcagcagagccggcggcagcagcagcgccagagtgagcgccggcggcagcagcttcagcagcggcagcagatgcggcctgggcggcagcagcgcccagggcttcagaggcggcgccagcagctgcagcctgagcggcggcagcagcggcgccttcggcggcagcttcggcggcggcttcggcagctgcagcgtgggcggcggcttcggcggcgccagcggcagcggcaccggcttcggcggcggcagcagcttcggcggcgtgagcggcttcggcagaggcagcggcttctgcggcagcagcagattcagcagcggcgccaccggcggcttctacagctacggcggcggcatgggcggcggcgtgggcgacggcggcctgttcagcggcggcgagaagcagaccatgcagaacctgaacgacagactggccaactacctggacaaggtgagagccctggaggaggccaacaccgacctggagaacaagatcaaggagtggtacgacaagtacggccccggcagcggcgacggcggcagcggcagagactacagcaagtactacagcatcatcgaggacctgagaaaccagatcatcgccgccaccgtggagaacgccggcatcatcctgcacatcgacaacgccagactggccgccgacgacttcagactgaagtacgagaacgagctgtgcctgagacagagcgtggaggccgacatcaacggcctgagaaaggtgctggacgacctgaccatgaccagaagcgacctggagatgcagatcgagagcttcaccgaggagctggcctacctgagaaagaaccacgaggaggagatgaagaacatgcagggcagcagcggcggcgaggtgaccgtggagatgaacgccgcccccggcaccgacctgaccaagctgctgaacgacatgagagcccagtacgaggagctggccgagcagaacagaagagaggccgaggagagattcaacaagcagagcgccagcctgcaggcccagatcagcaccgacgccggcgccgccaccagcgccaagaacgagatcaccgagctgaagagaaccctgcaggccctggagatcgagctgcagagccagctggccatgaagagcagcctggagggcaccctggccgacaccgaggccggctacgtggcccagctgagcgagatccagacccagatcagcgccctggaggaggagatctgccagatctggggcgagaccaagtgccagaacgccgagtacaagcagctgctggacatcaagaccagactggaggtggagatcgagacctacagaagactgctggacggcgagggcggcggcagcagcttcgccgagttcggcggcagaaacagcggcagcgtgaacatgggcagcagagacctggtgagcggcgacagcagaagcggcagctgcagcggccagggcagagacagcagcaagaccagagtgaccaagaccatcgtggaggagctggtggacggcaaggtggtgagcagccaggtgagcagcatcagcgaggtgaaggtgaagtag

SEQ ID NO: 86064 - DNA, 1890 bp, synthetic construct
  misc_feature 1..1890: note = Description of Artificial Sequence: Synthetic coding sequence
  source 1..1890: mol_type = other DNA
atgagcagacaggccagcaagaccagcggcggcggcagccagggcttcagcggcagaagcgccgtggtgagcggcagcagcagaatgagctgcgtggcccacagcggcggcgccggcggcggcgcctacggcttcagaagcggcgccggcggcttcggcagcagaagcctgtacaacctgggcggcaacaagagcatcagcatcagcgtggccgccggcggcagcagagccggcggcttcggcggcggcagaagcagctgcgccttcgccggcggctacggcggcggcttcggcagcggctacggcggcggcttcggcggcggcttcggcggcggcagaggcatgggcggcggcttcggcggcgccggcggcttcggcggcgccggcggcttcggcggcgccggcggcttcggcggccccggcggcttcggcggcagcggcggcttcggcggccccggcagcctgggcagccccggcggcttcggccccggcggcttccccggcggcatccaggaggtgaccatcaaccagagcctgctgcagcccctgaacgtggagatcgacccccagatcggccaggtgaaggcccaggagagagagcagatcaagaccctgaacaacaagttcgccagcttcatcgacaaggtgagattcctggagcagcagaacaaggtgctggagaccaagtggaacctgctgcagcagcagggcaccagcagcatcagcggcaccaacaacctggagcccctgttcgagaaccacatcaactacctgagaagctacctggacaacatcctgggcgagagaggcagactggacagcgagctgaagaacatggaggacctggtggaggacttcaagaagaagtacgaggacgagatcaacaagagaaccgccgccgagaacgagttcgtgaccctgaagaaggacgtggacagcgcctacatgaacaaggtggagctgcaggccaaggtggacgccctgatcgacgagatcgacttcctgagaaccctgtacgacgccgagctgagccagatgcagagccacatcagcgacaccagcgtggtgctgagcatggacaacaacagaagcctggacctggacagcatcatcgccgaggtgagagcccagtacgaggacatcgcccagagaagcaaggccgaggccgaggccctgtaccagaccaagctgggcgagctgcagaccaccgccggcagacacggcgacgacctgagaaacaccaagagcgagatcatcgagctgaacagaatgatccagagactgagagccgagatcgagggcgtgaagaagcagaacgccaacctgcagaccgccatcgccgaggccgagcagcacggcgagatggccctgaaggacgccaacgccaagctgcaggagctgcaggccgccctgcagcaggccaaggacgacctggccagactgctgagagactaccaggagctgatgaacgtgaagctggccctggacgtggagatcgccacctacagaaagctgctggagggcgaggagtacagcagaatgagcggcgagtgccccagcgccgtgagcatcagcgtggtgagcagcagcaccaccagcgccagcgccggcggctacggcggcggctacggcggcggcatgggcggcggcctgggcggcggcttcagcgccggcggcggcagcggcagcggcttcggcagaggcggcggcggcggcatcggcggcggcttcggcggcggcagcagcggcttcagcggcggcagcggcttcggcagcatcagcggcgccagatacggcgtgagcggcggcggcttcagcagcgccagcaacagaggcggcagcatcaagttcagccagagcagccagagcagccagagatacagcagatag

SEQ ID NO: 86065 - DNA, 1887 bp, synthetic construct
  misc_feature 1..1887: note = Description of Artificial Sequence: Synthetic coding sequence
  source 1..1887: mol_type = other DNA
atgagcagacaggccagcaagaccagcggcggcggcagccagggcttcagcggcagaagcgccgtggtgagcggcagcagcagaatgagctgcgtggcccacagcggcggcgccggcggcggcgcctacggcttcagaagcggcgccggcggcttcggcagcagaagcctgtacaacctgggcggcaacaagagcatcagcatcagcgtggccgccggcggcagcagagccggcggcttcggcggcggcagaagcagctgcgccttcgccggcggctacggcggcggcttcggcagcggctacggcggcggcttcggcggcggcttcggcggcggcagaggcatgggcggcggcttcggcggcgccggcggcttcggcggcgccggcggcttcggcggcgccggcggcttcggcggccccggcggcttcggcggcagcggcggcttcggcggccccggcagcctgggcagccccggcggcttcggccccggcggcttccccggcggcatccaggaggtgaccatcaaccagagcctgctgcagcccctgaacgtggagatcgacccccagatcggccaggtgaaggcccaggagagagagcagatcaagaccctgaacaacaagttcgccagcttcatcgacaaggtgagattcctggagcagcagaacaaggtgctggagaccaagtggaacctgctgcagcagcagggcaccagcagcatcagcggcaccaacaacctggagcccctgttcgagaaccacatcaactacctgagaagctacctggacaacatcctgggcgagagaggcagactggacagcgagctgaagaacatggaggacctggtggaggacttcaagaagaagtacgaggacgagatcaacaagagaaccgccgccgagaacgagttcgtgaccctgaagaaggacgtggacagcgcctacatgaacaaggtggagctgcaggccaaggtggacgccctgatcgacgagatcgacttcctgagaaccctgtacgacgccgagctgagccagatgcagagccacatcagcgacaccagcgtggtgctgagcatggacaacaacagaagcctggacctggacagcatcatcgccgaggtgagagcccagtacgaggacatcgcccagagaagcaaggccgaggccgaggccctgtaccagaccaagctgggcgagctgcagaccaccgccggcagacacggcgacgacctgagaaacaccaagagcgagatcatcgagctgaacagaatgatccagagactgagagccgagatcgagggcgtgaagaagcagaacgccaacctgcagaccgccatcgccgaggccgagcagcacggcgagatggccctgaaggacgccaacgccaagctgcaggagctgcaggccgccctgcagcaggccaaggacgacctggccagactgctgagagactaccaggagctgatgaacgtgaagctggccctggacgtggagatcgccacctacagaaagctgctggagggcgaggagtacagaatgagcggcgagtgccccagcgccgtgagcatcagcgtggtgagcagcagcaccaccagcgccagcgccggcggctacggcggcggctacggcggcggcatgggcggcggcctgggcggcggcttcagcgccggcggcggcagcggcagcggcttcggcagaggcggcggcggcggcatcggcggcggcttcggcggcggcagcagcggcttcagcggcggcagcggcttcggcagcatcagcggcgccagatacggcgtgagcggcggcggcttcagcagcgccagcaacagaggcggcagcatcaagttcagccagagcagccagagcagccagagatacagcagatag

SEQ ID NO: 86066 - DNA, 1251 bp, synthetic construct
  misc_feature 1..1251: note = Description of Artificial Sequence: Synthetic coding sequence
  source 1..1251: mol_type = other DNA
atgccctacaacttctgcctgcccagcctgagctgcagaaccagctgcagcagcagaccctgcgtgccccccagctgccacagctgcaccctgcccggcgcctgcaacatccccgccaacgtgagcaactgcaactggttctgcgagggcagcttcaacggcagcgagaaggagaccatgcagttcctgaacgacagactggccagctacctggagaaggtgagacagctggagagagacaacgccgagctggagaacctgatcagagagagaagccagcagcaggagcccctgctgtgccccagctaccagagctacttcaagaccatcgaggagctgcagcagaagatcctgtgcaccaagagcgagaacgccagactggtggtgcagatcgacaacgccaagctggccgccgacgacttcagaaccaagtaccagaccgagctgagcctgagacagctggtggagagcgacatcaacggcctgagaagaatcctggacgagctgaccctgtgcaagagcgacctggaggcccaggtggagagcctgaaggaggagctgctgtgcctgaagagcaaccacgagcaggaggtgaacaccctgagatgccagctgggcgacagactgaacgtggaggtggacgccgcccccaccgtggacctgaacagagtgctgaacgagaccagaagccagtacgaggccctggtggagaccaacagaagagaggtggagcagtggttcaccacccagaccgaggagctgaacaagcaggtggtgagcagcagcgagcagctgcagagctaccaggccgagatcatcgagctgagaagaaccgtgaacgccctggagatcgagctgcaggcccagcacaacctgagagacagcctggagaacaccctgaccgagagcgaggccagatacagcagccagctgagccaggtgcagagcctgatcaccaacgtggagagccagctggccgagatcagaagcgacctggagagacagaaccaggagtaccaggtgctgctggacgtgagagccagactggagtgcgagatcaacacctacagaagcctgctggagagcgaggactgcaacctgcccagcaacccctgcgccaccaccaacgcctgcagcaagcccatcggcccctgcctgagcaacccctgcaccagctgcgtgccccccgccccctgcaccccctgcgcccccagacccagatgcggcccctgcaacagcttcgtgagatag

SEQ ID NO: 86067 - DNA, 1674 bp, synthetic construct
  misc_feature 1..1674: note = Description of Artificial Sequence: Synthetic coding sequence
  source 1..1674: mol_type = other DNA
atggtgagcaagctgaccagcctgcagcaggagctgctgagcgccctgctgagcagcggcgtgaccaaggaggtgctggtgcaggccctggaggagctgctgcccagccccaacttcggcgtgaagctggagaccctgcccctgagccccggcagcggcgccgagcccgacaccaagcccgtgttccacaccctgaccaacggccacgccaagggcagactgagcggcgacgagggcagcgaggacggcgacgactacgacaccccccccatcctgaaggagctgcaggccctgaacaccgaggaggccgccgagcagagagccgaggtggacagaatgctgagcgaggacccctggagagccgccaagatgatcaagggctacatgcagcagcacaacatcccccagagagaggtggtggacgtgaccggcctgaaccagagccacctgagccagcacctgaacaagggcacccccatgaagacccagaagagagccgccctgtacacctggtacgtgagaaagcagagagagatcctgagacagttcaaccagaccgtgcagagcagcggcaacatgaccgacaagagcagccaggaccagctgctgttcctgttccccgagttcagccagcagagccacggccccggccagagcgacgacgcctgcagcgagcccaccaacaagaagatgagaagaaacagattcaagtggggccccgccagccagcagatcctgtaccaggcctacgacagacagaagaaccccagcaaggaggagagagaggccctggtggaggagtgcaacagagccgagtgcctgcagagaggcgtgagccccagcaaggcccacggcctgggcagcaacctggtgaccgaggtgagagtgtacaactggttcgccaacagaagaaaggaggaggccttcagacagaagctggccatggacgcctacagcagcaaccagacccacagcctgaaccccctgctgagccacggcagcccccaccaccagcccagcagcagcccccccaacaagctgagcggcgtgagatacagccagcagggcaacaacgagatcaccagcagcagcaccatcagccaccacggcaacagcgccatggtgaccagccagagcgtgctgcagcaggtgagccccgccagcctggaccccggccacaacctgctgagccccgacggcaagatgatcagcgtgagcggcggcggcctgccccccgtgagcaccctgaccaacatccacagcctgagccaccacaacccccagcagagccagaacctgatcatgacccccctgagcggcgtgatggccatcgcccagagcctgaacaccagccaggcccagagcgtgcccgtgatcaacagcgtggccggcagcctggccgccctgcagcccgtgcagttcagccagcagctgcacagcccccaccagcagcccctgatgcagcagagccccggcagccacatggcccagcagcccttcatggccgccgtgacccagctgcagaacagccacatgtacgcccacaagcaggagcccccccagtacagccacaccagcagattccccagcgccatggtggtgaccgacaccagcagcatcagcaccctgaccaacatgagcagcagcaagcagtgccccctgcaggcctggtag

SEQ ID NO: 86068 - DNA, 1215 bp, synthetic construct
  misc_feature 1..1215: note = Description of Artificial Sequence: Synthetic coding sequence
  source 1..1215: mol_type = other DNA
atgagctacagctgcggcctgcccagcctgagctgcagaaccagctgcagcagcagaccctgcgtgccccccagctgccacggctgcaccctgcccggcgcctgcaacatccccgccaacgtgagcaactgcaactggttctgcgagggcagcttcaacggcagcgagaaggagaccatgcagttcctgaacgacagactggccagctacctggagaaggtgagacagctggagagagacaacgccgagctggagaacctgatcagagagagaagccagcagcaggagcccctggtgtgcgccagctaccagagctacttcaagaccatcgaggagctgcagcagaagatcctgtgcagcaagagcgagaacgccagactggtggtgcagatcgacaacgccaagctggccagcgacgacttcagaaccaagtacgagaccgagctgagcctgagacagctggtggagagcgacatcaacggcctgagaagaatcctggacgagctgaccctgtgcagaagcgacctggaggcccaggtggagagcctgaaggaggagctgctgtgcctgaagcagaaccacgagcaggaggtgaacaccctgagatgccagctgggcgacagactgaacgtggaggtggacgccgcccccaccgtggacctgaaccaggtgctgaacgagaccagaagccagtacgaggccctggtggagaccaacagaagagaggtggagcagtggttcgccacccagaccgaggagctgaacaagcaggtggtgagcagcagcgagcagctgcagagctaccaggccgagatcatcgagctgagaagaaccgtgaacgccctggagatcgagctgcaggcccagcacaacctgagagacagcctggagaacaccctgaccgagagcgaggccagatacagcagccagctgagccaggtgcagagactgatcaccaacgtggagagccagctggccgagatcagaagcgacctggagagacagaaccaggagtaccaggtgctgctggacgtgagagccagactggagtgcgagatcaacacctacagaagcctgctggagagcgaggactgcaagctgcccagcaacccctgcgccaccaccaacgcctgcgacaagagcaccggcccctgcatcagcaacccctgcggcctgagagccagatgcggcccctgcaacaccttcggctactag

SEQ ID NO: 86069 - DNA, 1215 bp, synthetic construct
  misc_feature 1..1215: note = Description of Artificial Sequence: Synthetic coding sequence
  source 1..1215: mol_type = other DNA
atgccctacaacttctgcctgcccagcctgagctgcagaaccagctgcagcagcagaccctgcgtgccccccagctgccacggctacaccctgcccggcgcctgcaacatccccgccaacgtgagcaactgcaactggttctgcgagggcagcttcaacggcagcgagaaggagaccatgcagttcctgaacgacagactggccagctacctggagaaggtgagacagctggagagagacaacgccgagctggagaacctgatcagagagagaagccagcagcaggagcccctgctgtgccccagctaccagagctacttcaagaccatcgaggagctgcagcagaagatcctgtgcagcaagagcgagaacgccagactggtggtgcagatcgacaacgccaagctggccgccgacgacttcagaaccaagtaccagaccgagcagagcctgagacagctggtggagagcgacatcaacagcctgagaagaatcctggacgagctgaccctgtgcagaagcgacctggaggcccagatggagagcctgaaggaggagctgctgagcctgaagcagaaccacgagcaggaggtgaacaccctgagatgccagctgggcgacagactgaacgtggaggtggacgccgcccccgccgtggacctgaaccaggtgctgaacgagaccagaaaccagtacgaggccctggtggagaccaacagaagagaggtggagcagtggttcgccacccagaccgaggagctgaacaagcaggtggtgagcagcagcgagcagctgcagagctaccaggccgagatcatcgagctgagaagaaccgtgaacgccctggagatcgagctgcaggcccagcacaacctgagatacagcctggagaacaccctgaccgagagcgaggccagatacagcagccagctgagccaggtgcagagcctgatcaccaacgtggagagccagctggccgagatcagaagcgacctggagagacagaaccaggagtaccaggtgctgctggacgtgagagccagactggagtgcgagatcaacacctacagaagcctgctggagagcgaggactgcaagctgcccagcaacccctgcgccaccaccaacgcctgcgagaagcccatcggcagctgcgtgaccaacccctgcggccccagaagcagatgcggcccctgcaacaccttcggctactag

SEQ ID NO: 86070 - DNA, 1311 bp, synthetic construct
  misc_feature 1..1311: note = Description of Artificial Sequence: Synthetic coding sequence
  source 1..1311: mol_type = other DNA
atgctgtacgccaagcccccccccaccatcaacggcatcaagggcctgcagagaaaggagagactgaagcccgcccacatccacctgcagcagctgacctgcttcagcatcacctgcagcagcaccatgagctacagctgctgcctgcccagcctgggctgcagaaccagctgcagcagcagaccctgcgtgccccccagctgccacggctacaccctgcccggcgcctgcaacatccccgccaacgtgagcaactgcaactggttctgcgagggcagcttcaacggcagcgagaaggagaccatgcagttcctgaacgacagactggccagctacctggagaaggtgagacagctggagagagacaacgccgagctggagaagctgatccaggagagaagccagcagcaggagcccctgctgtgccccagctaccagagctacttcaagaccatcgaggagctgcagcagaagatcctgtgcgccaaggccgagaacgccagactggtggtgaacatcgacaacgccaagctggccagcgacgacttcagaagcaagtaccagaccgagcagagcctgagactgctggtggagagcgacatcaacagcatcagaagaatcctggacgagctgaccctgtgcaagagcgacctggagagccaggtggagagcctgagagaggagctgatctgcctgaagaagaaccacgaggaggaggtgaacaccctgagaagccagctgggcgacagactgaacgtggaggtggacaccgcccccaccgtggacctgaaccaggtgctgaacgagaccagaagccagtacgaggccctggtggagatcaacagaagagaggtggagcagtggttcgccacccagaccgaggagctgaacaagcaggtggtgagcagcagcgagcagctgcagagctgccaggccgagatcatcgagctgagaagaaccgtgaacgccctggagatcgagctgcaggcccagcacaacctgagagacagcctggagaacaccctgaccgagagcgaggcccactacagcagccagctgagccaggtgcagagcctgatcaccaacgtggagagccagctggccgagatcagatgcgacctggagagacagaaccaggagtaccaggtgctgctggacgtgagagccagactggagtgcgagatcaacacctacagaagcctgctggagagcgaggactgcaagctgccctgcaacccctgcgccaccaccaacgccagcggcaacagctgcggcccctgcggcaccagccagaagggctgctgcaactag

SEQ ID NO: 86071 - DNA, 1185 bp, synthetic construct
  misc_feature 1..1185: note = Description of Artificial Sequence: Synthetic coding sequence
  source 1..1185: mol_type = other DNA
atgagctacagctgctgcctgcccagcctgggctgcagaaccagctgcagcagcagaccctgcgtgccccccagctgccacggctacaccctgcccggcgcctgcaacatccccgccaacgtgagcaactgcaactggttctgcgagggcagcttcaacggcagcgagaaggagaccatgcagttcctgaacgacagactggccagctacctggagaaggtgagacagctggagagagacaacgccgagctggagaagctgatccaggagagaagccagcagcaggagcccctgctgtgccccagctaccagagctacttcaagaccatcgaggagctgcagcagaagatcctgtgcgccaaggccgagaacgccagactggtggtgaacatcgacaacgccaagctggccagcgacgacttcagaagcaagtaccagaccgagcagagcctgagactgctggtggagagcgacatcaacagcatcagaagaatcctggacgagctgaccctgtgcaagagcgacctggagagccaggtggagagcctgagagaggagctgatctgcctgaagaagaaccacgaggaggaggtgaacaccctgagaagccagctgggcgacagactgaacgtggaggtggacaccgcccccaccgtggacctgaaccaggtgctgaacgagaccagaagccagtacgaggccctggtggagatcaacagaagagaggtggagcagtggttcgccacccagaccgaggagctgaacaagcaggtggtgagcagcagcgagcagctgcagagctgccaggccgagatcatcgagctgagaagaaccgtgaacgccctggagatcgagctgcaggcccagcacaacctgagagacagcctggagaacaccctgaccgagagcgaggcccactacagcagccagctgagccaggtgcagagcctgatcaccaacgtggagagccagctggccgagatcagatgcgacctggagagacagaaccaggagtaccaggtgctgctggacgtgagagccagactggagtgcgagatcaacacctacagaagcctgctggagagcgaggactgcaagctgccctgcaacccctgcgccaccaccaacgccagcggcaacagctgcggcccctgcggcaccagccagaagggctgctgcaactag

SEQ ID NO: 86072 - DNA, 1278 bp, synthetic construct
  misc_feature 1..1278: note = Description of Artificial Sequence: Synthetic coding sequence
  source 1..1278: mol_type = other DNA
atgtacagcagcagcagctgcaagctgcccagcctgagccccgtggccagaagcttcagcgcctgcagcgtgggcctgggcagaagcagctacagagccaccagctgcctgcccgccctgtgcctgcccgccggcggcttcgccaccagctacagcggcggcggcggctggttcggcgagggcatcctgaccggcaacgagaaggagaccatgcagagcctgaacgacagactggccggctacctggagaaggtgagacagctggagcaggagaacgccagcctggagagcagaatcagagagtggtgcgagcagcaggtgccctacatgtgccccgactaccagagctacttcagaaccatcgaggagctgcagaagaagaccctgtgcagcaaggccgagaacgccagactggtggtggagatcgacaacgccaagctggccgccgacgacttcagaaccaagtacgagaccgaggtgagcctgagacagctggtggagagcgacatcaacggcctgagaagaatcctggacgacctgaccctgtgcaagagcgacctggaggcccaggtggagagcctgaaggaggagctgctgtgcctgaagaagaaccacgaggaggaggtgaacagcctgagatgccagctgggcgacagactgaacgtggaggtggacgccgccccccccgtggacctgaacagagtgctggaggagatgagatgccagtacgagaccctggtggagaacaacagaagagacgccgaggactggctggacacccagagcgaggagctgaaccagcaggtggtgagcagcagcgagcagctgcagagctgccaggccgagatcatcgagctgagaagaaccgtgaacgccctggagatcgagctgcaggcccagcacagcatgagagacgccctggagagcaccctggccgagaccgaggccagatacagcagccagctggcccagatgcagtgcatgatcaccaacgtggaggcccagctggccgagatcagagccgacctggagagacagaaccaggagtaccaggtgctgctggacgtgagagccagactggagtgcgagatcaacacctacagaggcctgctggagagcgaggacagcaagctgccctgcaacccctgcgcccccgactacagccccagcaagagctgcctgccctgcctgcccgccgccagctgcggccccagcgccgccagaaccaactgcagccccagacccatctgcgtgccctgccccggcggcagattctag

SEQ ID NO: 86073 - DNA, 1368 bp, synthetic construct
  misc_feature 1..1368: note = Description of Artificial Sequence: Synthetic coding sequence
  source 1..1368: mol_type = other DNA
atggccagcaagtgcctgaaggccggcttcagcagcggcagcctgaagagccccggcggcgccagcggcggcagcaccagagtgagcgccatgtacagcagcagcagctgcaagctgcccagcctgagccccgtggccagaagcttcagcgcctgcagcgtgggcctgggcagaagcagctacagagccaccagctgcctgcccgccctgtgcctgcccgccggcggcttcgccaccagctacagcggcggcggcggctggttcggcgagggcatcctgaccggcaacgagaaggagaccatgcagagcctgaacgacagactggccggctacctggagaaggtgagacagctggagcaggagaacgccagcctggagagcagaatcagagagtggtgcgagcagcaggtgccctacatgtgccccgactaccagagctacttcagaaccatcgaggagctgcagaagaagaccctgtgcagcaaggccgagaacgccagactggtggtggagatcgacaacgccaagctggccgccgacgacttcagaaccaagtacgagaccgaggtgagcctgagacagctggtggagagcgacatcaacggcctgagaagaatcctggacgacctgaccctgtgcaagagcgacctggaggcccaggtggagagcctgaaggaggagctgctgtgcctgaagaagaaccacgaggaggaggtgaacagcctgagatgccagctgggcgacagactgaacgtggaggtggacgccgccccccccgtggacctgaacagagtgctggaggagatgagatgccagtacgagaccctggtggagaacaacagaagagacgccgaggactggctggacacccagagcgaggagctgaaccagcaggtggtgagcagcagcgagcagctgcagagctgccaggccgagatcatcgagctgagaagaaccgtgaacgccctggagatcgagctgcaggcccagcacagcatgagagacgccctggagagcaccctggccgagaccgaggccagatacagcagccagctggcccagatgcagtgcatgatcaccaacgtggaggcccagctggccgagatcagagccgacctggagagacagaaccaggagtaccaggtgctgctggacgtgagagccagactggagtgcgagatcaacacctacagaggcctgctggagagcgaggacagcaagctgccctgcaacccctgcgcccccgactacagccccagcaagagctgcctgccctgcctgcccgccgccagctgcggccccagcgccgccagaaccaactgcagccccagacccatctgcgtgccctgccccggcggcagattctag

SEQ ID NO: 86074 - DNA, 1404 bp, synthetic construct
  misc_feature 1..1404: note = Description of Artificial Sequence: Synthetic coding sequence
  source 1..1404: mol_type = other DNA
atggccacccagacctgcacccccaccttcagcaccggcagcatcaagggcctgtgcggcaccgccggcggcatcagcagagtgagcagcatcagaagcgtgggcagctgcagagtgcccagcctggccggcgccgccggctacatcagcagcgccagaagcggcctgagcggcctgggcagctgcctgcccggcagctacctgagcagcgagtgccacaccagcggcttcgtgggcagcggcggctggttctgcgagggcagcttcaacggcagcgagaaggagaccatgcagttcctgaacgacagactggccaactacctggagaaggtgagacagctggagagagagaacgccgagctggagagcagaatccaggagtggtacgagttccagatcccctacatctgccccgactaccagagctacttcaagaccatcgaggacttccagcagaagatcctgctgaccaagagcgagaacgccagactggtgctgcagatcgacaacgccaagctggccgccgacgacttcagaaccaagtacgagaccgagctgagcctgagacagctggtggaggccgacatcaacggcctgagaagaatcctggacgagctgaccctgtgcaaggccgacctggaggcccaggtggagagcctgaaggaggagctgatgtgcctgaagaagaaccacgaggaggaggtgagcgtgctgagatgccagctgggcgacagactgaacgtggaggtggacgccgccccccccgtggacctgaacaagatcctggaggacatgagatgccagtacgaggccctggtggagaacaacagaagagacgtggaggcctggttcaacacccagaccgaggagctgaaccagcaggtggtgagcagcagcgagcagctgcagtgctgccagaccgagatcatcgagctgagaagaaccgtgaacgccctggagatcgagctgcaggcccagcacagcatgagaaacagcctggagagcaccctggccgagaccgaggccagatacagcagccagctggcccagatgcagtgcctgatcagcaacgtggaggcccagctgagcgagatcagatgcgacctggagagacagaaccaggagtaccaggtgctgctggacgtgaaggccagactggagggcgagatcgccacctacagacacctgctggagggcgaggactgcaagctgcccccccagccctgcgccaccgcctgcaagcccgtgatcagagtgcccagcgtgccccccgtgccctgcgtgcccagcgtgccctgcacccccgccccccaggtgggcacccagatcagaaccatcaccgaggagatcagagacggcaaggtgatcagcagcagagagcacgtgcagagcagacccctgtag

SEQ ID NO: 86075 - DNA, 1254 bp, synthetic construct
  misc_feature 1..1254: note = Description of Artificial Sequence: Synthetic coding sequence
  source 1..1254: mol_type = other DNA
atgctgagaagcggcctgagcggcctgggcagctgcctgcccggcagctacctgagcagcgagtgccacaccagcggcttcgtgggcagcggcggctggttctgcgagggcagcttcaacggcagcgagaaggagaccatgcagttcctgaacgacagactggccaactacctggagaaggtgagacagctggagagagagaacgccgagctggagagcagaatccaggagtggtacgagttccagatcccctacatctgccccgactaccagagctacttcaagaccatcgaggacttccagcagaagatcctgctgaccaagagcgagaacgccagactggtgctgcagatcgacaacgccaagctggccgccgacgacttcagaaccaagtacgagaccgagctgagcctgagacagctggtggaggccgacatcaacggcctgagaagaatcctggacgagctgaccctgtgcaaggccgacctggaggcccaggtggagagcctgaaggaggagctgatgtgcctgaagaagaaccacgaggaggaggtgagcgtgctgagatgccagctgggcgacagactgaacgtggaggtggacgccgccccccccgtggacctgaacaagatcctggaggacatgagatgccagtacgaggccctggtggagaacaacagaagagacgtggaggcctggttcaacacccagaccgaggagctgaaccagcaggtggtgagcagcagcgagcagctgcagtgctgccagaccgagatcatcgagctgagaagaaccgtgaacgccctggagatcgagctgcaggcccagcacagcatgagaaacagcctggagagcaccctggccgagaccgaggccagatacagcagccagctggcccagatgcagtgcctgatcagcaacgtggaggcccagctgagcgagatcagatgcgacctggagagacagaaccaggagtaccaggtgctgctggacgtgaaggccagactggagggcgagatcgccacctacagacacctgctggagggcgaggactgcaagctgcccccccagccctgcgccaccgcctgcaagcccgtgatcagagtgcccagcgtgccccccgtgccctgcgtgcccagcgtgccctgcacccccgccccccaggtgggcacccagatcagaaccatcaccgaggagatcagagacggcaaggtgatcagcagcagagagcacgtgcagagcagacccctgtag

SEQ ID NO: 86076 - DNA, 1200 bp, synthetic construct
  misc_feature 1..1200: note = Description of Artificial Sequence: Synthetic coding sequence
  source 1..1200: mol_type = other DNA
atggccagaagattccaggaggagctggccgccttcctgttcgagtacgacacccccagaatggtgctggtgagaaacaagaaggtgggcgtgatcttcagactgatccagctggtggtgctggtgtacgtgatcggctgggtgttcctgtacgagaagggctaccagaccagcagcggcctgatcagcagcgtgagcgtgaagctgaagggcctggccgtgacccagctgcccggcctgggcccccaggtgtgggacgtggccgactacgtgttccccgcccagggcgacaacagcttcgtggtgatgaccaacttcatcgtgacccccaagcagacccagggctactgcgccgagcaccccgagggcggcatctgcaaggaggacagcggctgcacccccggcaaggccaagagaaaggcccagggcatcagaaccggcaagtgcgtggccttcaacgacaccgtgaagacctgcgagatcttcggctggtgccccgtggaggtggacgacgacatccccagacccgccctgctgagagaggccgagaacttcaccctgttcatcaagaacagcatcagcttccccagattcaaggtgaacagaagaaacctggtggaggaggtgaacgccgcccacatgaagacctgcctgttccacaagaccctgcaccccctgtgccccgtgttccagctgggctacgtggtgcaggagagcggccagaacttcagcaccctggccgagaagggcggcgtggtgggcatcaccatcgactggcactgcgacctggactggcacgtgagacactgcagacccatctacgagttccacggcctgtacgaggagaagaacctgagccccggcttcaacttcagattcgccagacacttcgtggagaacggcaccaactacagacacctgttcaaggtgttcggcatcagattcgacatcctggtggacggcaaggccggcaagttcgacatcatccccaccatgaccaccatcggcagcggcatcggcatcttcggcgtggccaccgtgctgtgcgacctgctgctgctgcacatcctgcccaagagacactactacaagcagaagaagttcaagtacgccgaggacatgggccccggcgccgccgagagagacctggccgccaccagcagcaccctgggcctgcaggagaacatgagaaccagctag

SEQ ID NO: 86077 - DNA, 1371 bp, synthetic construct
  misc_feature 1..1371: note = Description of Artificial Sequence: Synthetic coding sequence
  source 1..1371: mol_type = other DNA
atgaccagcagctacagcagcagcagctgccccctgggctgcaccatggcccccggcgccagaaacgtgagcgtgagccccatcgacatcggctgccagcccggcgccgaggccaacatcgcccccatgtgcctgctggccaacgtggcccacgccaacagagtgagagtgggcagcacccccctgggcagacccagcctgtgcctgccccccacctgccacaccgcctgccccctgcccggcacctgccacatccccggcaacatcggcatctgcggcgcctacggcgagaacaccctgaacggccacgagaaggagaccatgcagttcctgaacgacagactggccaactacctggagaaggtgagacagctggagcaggagaacgccgagctggaggccaccctgctggagagaagcaagtgccacgagagcaccgtgtgccccgactaccagagctacttccacaccatcgaggagctgcagcagaagatcctgtgcagcaaggccgagaacgccagactgatcgtgcagatcgacaacgccaagctggccgccgacgacttcagaatcaagctggagagcgagagaagcctgagacagctggtggaggccgacaagtgcggcacccagaagctgctggacgacgccaccctggccaaggccgacctggaggcccagcaggagagcctgaaggaggagcagctgagcctgaagagcaaccacgagcaggaggtgaagatcctgagaagccagctgggcgagaagctgagaatcgagctggacatcgagcccaccatcgacctgaacagagtgctgggcgagatgagagcccagtacgaggccatgctggagaccaacagacaggacgtggagcagtggttccaggcccagagcgagggcatcagcctgcaggacatgagctgcagcgaggagctgcagtgctgccagagcgagatcctggagctgagatgcaccgtgaacgccctggaggtggagagacaggcccagcacaccctgaaggactgcctgcagaacagcctgtgcgaggccgaggacagattcggcaccgagctggcccagatgcagagcctgatcagcaacgtggaggagcagctgagcgagatcagagccgacctggagagacagaaccaggagtaccaggtgctgctggacgtgaagaccagactggagaacgagatcgccacctacagaaacctgctggagagcgaggactgcaagctgccctgcaacccctgcagcaccagccccagctgcgtgaccgccccctgcgcccccagacccagctgcggcccctgcaccacctgcggccccacctgcggcgccagcaccaccggcagcagattctag

SEQ ID NO: 86078 - DNA, 1785 bp, synthetic construct
  misc_feature 1..1785: note = Description of Artificial Sequence: Synthetic coding sequence
  source 1..1785: mol_type = other DNA
atgaccagcgtgggcgtgttcagcgacatgctgaacggctgcggcaaggacggcctggtgcccagagccaagcccagagacgtgagcgacttcagcctgtacgcccccgccaccaagccctgctgcagcagaacctacaagagaagaagactgagagcccccgccctgaccggcctgggccccgtgaccagcctgatcgcccccagcagcctgagcgccgccatgatcgccagacagcagtgcgtgagaggcggccccagaggcttcagctgcggcagcgccatcgtgggcggcggcaagagaggcgccttcagcagcgtgagcatgagcggcggcgccggcagatgcagcagcggcggcttcggcagcagaagcctgtacaacctgagaggcaacaagagcatcagcatgagcgtggccggcagcagacagggcgcctgcttcggcggcgccggcggcttcggcaccggcggcttcggcggcggcttcggcggcagcttcagcggcaagggcggccccggcttccccgtgtgccccgccggcggcatccaggaggtgaccatcaaccagagcctgctgacccccctgcacgtggagatcgaccccgagatccagaaggtgagaaccgaggagagagagcagatcaagctgctgaacaacaagttcgccagcttcatcgacaaggtgcagttcctggagcagcagaacaaggtgctggagaccaagtggaacctgctgcagcagcagaccaccaccaccagcagcaagaacctggagcccctgttcgagacctacctgagcgtgctgagaaagcagctggacaccctgggcaacgacaagggcagactgcagagcgagctgaagaccatgcaggacagcgtggaggacttcaagaccaagtacgaggaggagatcaacaagagaaccgccgccgagaacgacttcgtggtgctgaagaaggacgtggacgccgcctacctgaacaaggtggagctggaggccaaggtggacagcctgaacgacgagatcaacttcctgaaggtgctgtacgacgccgagctgagccagatgcagacccacgtgagcgacaccagcgtggtgctgagcatggacaacaacagaaacctggacctggacagcatcatcgccgaggtgagagcccagtacgaggagatcgcccagagaagcaaggccgaggccgaggccctgtaccagaccaaggtgcagcagctgcagatcagcgtggaccagcacggcgacaacctgaagaacaccaagagcgagatcgccgagctgaacagaatgatccagagactgagagccgagatcgagaacatcaagaagcagtgccagaccctgcaggtgagcgtggccgacgccgagcagagaggcgagaacgccctgaaggacgcccacagcaagagagtggagctggaggccgccctgcagcaggccaaggaggagctggccagaatgctgagagagtaccaggagctgatgagcgtgaagctggccctggacatcgagatcgccacctacagaaagctgctggagggcgaggagtacagaatgagcggcgagtgccagagcgccgtgagcatcagcgtggtgagcggcagcaccagcaccggcggcatcagcggcggcctgggcagcggcagcggcttcggcctgagcagcggcttcggcagcggcagcggcagcggcttcggcttcggcggcagcgtgagcggcagcagcagcagcaagatcatcagcaccaccaccctgaacaagagaagatag

SEQ ID NO: 86079 - DNA, 1503 bp, synthetic construct
  misc_feature 1..1503: note = Description of Artificial Sequence: Synthetic coding sequence
  source 1..1503: mol_type = other DNA
atgatcgccagacagcagtgcgtgagaggcggccccagaggcttcagctgcggcagcgccatcgtgggcggcggcaagagaggcgccttcagcagcgtgagcatgagcggcggcgccggcagatgcagcagcggcggcttcggcagcaagggcgcctgcttcggcggcgccggcggcttcggcaccggcggcttcggcggcggcttcggcggcagcttcagcggcaagggcggccccggcttccccgtgtgccccgccggcggcatccaggaggtgaccatcaaccagagcctgctgacccccctgcacgtggagatcgaccccgagatccagaaggtgagaaccgaggagagagagcagatcaagctgctgaacaacaagttcgccagcttcatcgacaaggtgcagttcctggagcagcagaacaaggtgctggagaccaagtggaacctgctgcagcagcagaccaccaccaccagcagcaagaacctggagcccctgttcgagacctacctgagcgtgctgagaaagcagctggacaccctgggcaacgacaagggcagactgcagagcgagctgaagaccatgcaggacagcgtggaggacttcaagaccaagtacgaggaggagatcaacaagagaaccgccgccgagaacgacttcgtggtgctgaagaaggacgtggacgccgcctacctgaacaaggtggagctggaggccaaggtggacagcctgaacgacgagatcaacttcctgaaggtgctgtacgacgccgagctgagccagatgcagacccacgtgagcgacaccagcgtggtgctgagcatggacaacaacagaaacctggacctggacagcatcatcgccgaggtgagagcccagtacgaggagatcgcccagagaagcaaggccgaggccgaggccctgtaccagaccaaggtgcagcagctgcagatcagcgtggaccagcacggcgacaacctgaagaacaccaagagcgagatcgccgagctgaacagaatgatccagagactgagagccgagatcgagaacatcaagaagcagtgccagaccctgcaggtgagcgtggccgacgccgagcagagaggcgagaacgccctgaaggacgcccacagcaagagagtggagctggaggccgccctgcagcaggccaaggaggagctggccagaatgctgagagagtaccaggagctgatgagcgtgaagctggccctggacatcgagatcgccacctacagaaagctgctggagggcgaggagtacagaatgagcggcgagtgccagagcgccgtgagcatcagcgtggtgagcggcagcaccagcaccggcggcatcagcggcggcctgggcagcggcagcggcttcggcctgagcagcggcttcggcagcggcagcggcagcggcttcggcttcggcggcagcgtgagcggcagcagcagcagcaagatcatcagcaccaccaccctgaacaagagaagatag

SEQ ID NO: 86080 - DNA, 1563 bp, synthetic construct
  misc_feature 1..1563: note = Description of Artificial Sequence: Synthetic coding sequence
  source 1..1563: mol_type = other DNA
atgatcgccagacagcagtgcgtgagaggcggccccagaggcttcagctgcggcagcgccatcgtgggcggcggcaagagaggcgccttcagcagcgtgagcatgagcggcggcgccggcagatgcagcagcggcggcttcggcagcagaagcctgtacaacctgagaggcaacaagagcatcagcatgagcgtggccggcagcagacagggcgcctgcttcggcggcgccggcggcttcggcaccggcggcttcggcggcggcttcggcggcagcttcagcggcaagggcggccccggcttccccgtgtgccccgccggcggcatccaggaggtgaccatcaaccagagcctgctgacccccctgcacgtggagatcgaccccgagatccagaaggtgagaaccgaggagagagagcagatcaagctgctgaacaacaagttcgccagcttcatcgacaaggtgcagttcctggagcagcagaacaaggtgctggagaccaagtggaacctgctgcagcagcagaccaccaccaccagcagcaagaacctggagcccctgttcgagacctacctgagcgtgctgagaaagcagctggacaccctgggcaacgacaagggcagactgcagagcgagctgaagaccatgcaggacagcgtggaggacttcaagaccaagtacgaggaggagatcaacaagagaaccgccgccgagaacgacttcgtggtgctgaagaaggacgtggacgccgcctacctgaacaaggtggagctggaggccaaggtggacagcctgaacgacgagatcaacttcctgaaggtgctgtacgacgccgagctgagccagatgcagacccacgtgagcgacaccagcgtggtgctgagcatggacaacaacagaaacctggacctggacagcatcatcgccgaggtgagagcccagtacgaggagatcgcccagagaagcaaggccgaggccgaggccctgtaccagaccaaggtgcagcagctgcagatcagcgtggaccagcacggcgacaacctgaagaacaccaagagcgagatcgccgagctgaacagaatgatccagagactgagagccgagatcgagaacatcaagaagcagtgccagaccctgcaggtgagcgtggccgacgccgagcagagaggcgagaacgccctgaaggacgcccacagcaagagagtggagctggaggccgccctgcagcaggccaaggaggagctggccagaatgctgagagagtaccaggagctgatgagcgtgaagctggccctggacatcgagatcgccacctacagaaagctgctggagggcgaggagtacagaatgagcggcgagtgccagagcgccgtgagcatcagcgtggtgagcggcagcaccagcaccggcggcatcagcggcggcctgggcagcggcagcggcttcggcctgagcagcggcttcggcagcggcagcggcagcggcttcggcttcggcggcagcgtgagcggcagcagcagcagcaagatcatcagcaccaccaccctgaacaagagaagatag

SEQ ID NO: 86081 - DNA, 1695 bp, synthetic construct
  misc_feature 1..1695: note = Description of Artificial Sequence: Synthetic coding sequence
  source 1..1695: mol_type = other DNA
atggccagcaccagcaccaccatcagaagccacagcagcagcagaagaggcttcagcgccaacagcgccagactgcccggcgtgagcagaagcggcttcagcagcgtgagcgtgagcagaagcagaggcagcggcggcctgggcggcgcctgcggcggcgccggcttcggcagcagaagcctgtacggcctgggcggcagcaagagaatcagcatcggcggcggcagctgcgccatcagcggcggctacggcagcagagccggcggcagctacggcttcggcggcgccggcagcggcttcggcttcggcggcggcgccggcatcggcttcggcctgggcggcggcgccggcctggccggcggcttcggcggccccggcttccccgtgtgcccccccggcggcatccaggaggtgaccgtgaaccagagcctgctgacccccctgaacctgcagatcgaccccaccatccagagagtgagagccgaggagagagagcagatcaagaccctgaacaacaagttcgccagcttcatcgacaaggtgagattcctggagcagcagaacaaggtgctggagaccaagtggaccctgctgcaggagcagggcaccaagaccgtgagacagaacctggagcccctgttcgagcagtacatcaacaacctgagaagacagctggacagcatcgtgggcgagagaggcagactggacagcgagctgagaggcatgcaggacctggtggaggacttcaagaacaagtacgaggacgagatcaacaagagaaccgccgccgagaacgagttcgtgaccctgaagaaggacgtggacgccgcctacatgaacaaggtggagctgcaggccaaggccgacaccctgaccgacgagatcaacttcctgagagccctgtacgacgccgagctgagccagatgcagacccacatcagcgacaccagcgtggtgctgagcatggacaacaacagaaacctggacctggacagcatcatcgccgaggtgaaggcccagtacgaggagatcgcccagagaagcagagccgaggccgagagctggtaccagaccaagtacgaggagctgcaggtgaccgccggcagacacggcgacgacctgagaaacaccaagcaggagatcgccgagatcaacagaatgatccagagactgagaagcgagatcgaccacgtgaagaagcagtgcgccaacctgcaggccgccatcgccgacgccgagcagagaggcgagatggccctgaaggacgccaagaacaagctggagggcctggaggacgccctgcagaaggccaagcaggacctggccagactgctgaaggagtaccaggagctgatgaacgtgaagctggccctggacgtggagatcgccacctacagaaagctgctggagggcgaggagtgcagactgaacggcgagggcgtgggccaggtgaacatcagcgtggtgcagagcaccgtgagcagcggctacggcggcgccagcggcgtgggcagcggcctgggcctgggcggcggcagcagctacagctacggcagcggcctgggcgtgggcggcggcttcagcagcagcagcggcagagccatcggcggcggcctgagcagcgtgggcggcggcagcagcaccatcaagtacaccaccaccagcagcagcagcagaaagagctacaagcactag

SEQ ID NO: 86082 - DNA, 1563 bp, synthetic construct
  misc_feature 1..1563: note = Description of Artificial Sequence: Synthetic coding sequence
  source 1..1563: mol_type = other DNA
atggccagcaccagcaccaccatcagaagccacagcggcagcagaagcctgtacggcctgggcggcagcaagagaatcagcatcggcggcggcagctgcgccatcagcggcggctacggcagcagagccggcggcagctacggcttcggcggcgccggcagcggcttcggcttcggcggcggcgccggcatcggcttcggcctgggcggcggcgccggcctggccggcggcttcggcggccccggcttccccgtgtgcccccccggcggcatccaggaggtgaccgtgaaccagagcctgctgacccccctgaacctgcagatcgaccccaccatccagagagtgagagccgaggagagagagcagatcaagaccctgaacaacaagttcgccagcttcatcgacaaggtgagattcctggagcagcagaacaaggtgctggagaccaagtggaccctgctgcaggagcagggcaccaagaccgtgagacagaacctggagcccctgttcgagcagtacatcaacaacctgagaagacagctggacagcatcgtgggcgagagaggcagactggacagcgagctgagaggcatgcaggacctggtggaggacttcaagaacaagtacgaggacgagatcaacaagagaaccgccgccgagaacgagttcgtgaccctgaagaaggacgtggacgccgcctacatgaacaaggtggagctgcaggccaaggccgacaccctgaccgacgagatcaacttcctgagagccctgtacgacgccgagctgagccagatgcagacccacatcagcgacaccagcgtggtgctgagcatggacaacaacagaaacctggacctggacagcatcatcgccgaggtgaaggcccagtacgaggagatcgcccagagaagcagagccgaggccgagagctggtaccagaccaagtacgaggagctgcaggtgaccgccggcagacacggcgacgacctgagaaacaccaagcaggagatcgccgagatcaacagaatgatccagagactgagaagcgagatcgaccacgtgaagaagcagtgcgccaacctgcaggccgccatcgccgacgccgagcagagaggcgagatggccctgaaggacgccaagaacaagctggagggcctggaggacgccctgcagaaggccaagcaggacctggccagactgctgaaggagtaccaggagctgatgaacgtgaagctggccctggacgtggagatcgccacctacagaaagctgctggagggcgaggagtgcagactgaacggcgagggcgtgggccaggtgaacatcagcgtggtgcagagcaccgtgagcagcggctacggcggcgccagcggcgtgggcagcggcctgggcctgggcggcggcagcagctacagctacggcagcggcctgggcgtgggcggcggcttcagcagcagcagcggcagagccatcggcggcggcctgagcagcgtgggcggcggcagcagcaccatcaagtacaccaccaccagcagcagcagcagaaagagctacaagcactag

SEQ ID NO: 86083 - DNA, 1695 bp, synthetic construct
  misc_feature 1..1695: note = Description of Artificial Sequence: Synthetic coding sequence
  source 1..1695: mol_type = other DNA
atggccagcaccagcaccaccatcagaagccacagcagcagcagaagaggcttcagcgccaacagcgccagactgcccggcgtgagcagaagcggcttcagcagcatcagcgtgagcagaagcagaggcagcggcggcctgggcggcgcctgcggcggcgccggcttcggcagcagaagcctgtacggcctgggcggcagcaagagaatcagcatcggcggcggcagctgcgccatcagcggcggctacggcagcagagccggcggcagctacggcttcggcggcgccggcagcggcttcggcttcggcggcggcgccggcatcggcttcggcctgggcggcggcgccggcctggccggcggcttcggcggccccggcttccccgtgtgcccccccggcggcatccaggaggtgaccgtgaaccagagcctgctgacccccctgaacctgcagatcgaccccgccatccagagagtgagagccgaggagagagagcagatcaagaccctgaacaacaagttcgccagcttcatcgacaaggtgagattcctggagcagcagaacaaggtgctggacaccaagtggaccctgctgcaggagcagggcaccaagaccgtgagacagaacctggagcccctgttcgagcagtacatcaacaacctgagaagacagctggacaacatcgtgggcgagagaggcagactggacagcgagctgagaaacatgcaggacctggtggaggacctgaagaacaagtacgaggacgagatcaacaagagaaccgccgccgagaacgagttcgtgaccctgaagaaggacgtggacgccgcctacatgaacaaggtggagctgcaggccaaggccgacaccctgaccgacgagatcaacttcctgagagccctgtacgacgccgagctgagccagatgcagacccacatcagcgacaccagcgtggtgctgagcatggacaacaacagaaacctggacctggacagcatcatcgccgaggtgaaggcccagtacgaggagatcgcccagagaagcagagccgaggccgagagctggtaccagaccaagtacgaggagctgcagatcaccgccggcagacacggcgacgacctgagaaacaccaagcaggagatcgccgagatcaacagaatgatccagagactgagaagcgagatcgaccacgtgaagaagcagtgcgccaacctgcaggccgccatcgccgacgccgagcagagaggcgagatggccctgaaggacgccaagaacaagctggagggcctggaggacgccctgcagaaggccaagcaggacctggccagactgctgaaggagtaccaggagctgatgaacgtgaagctggccctggacgtggagatcgccacctacagaaagctgctggagggcgaggagtgcagactgaacggcgagggcgtgggccaggtgaacatcagcgtggtgcagagcaccgtgagcagcggctacggcggcgccagcggcgtgggcagcggcctgggcctgggcggcggcagcagctacagctacggcagcggcctgggcgtgggcggcggcttcagcagcagcagcggcagagccaccggcggcggcctgagcagcgtgggcggcggcagcagcaccatcaagtacaccaccaccagcagcagcagcagaaagagctacaagcactag

SEQ ID NO: 86084 - DNA, 1575 bp, synthetic construct
  misc_feature 1..1575: note = Description of Artificial Sequence: Synthetic coding sequence
  source 1..1575: mol_type = other DNA
atggccagcaccagcaccaccatcagaagccacagcagcagcagaagaggcttcagcgccaacagcgccagactgcccggcgtgagcagaagcggcttcagcagcatcagcgtgagcagaagcagaggcagcggcggcctgggcggcgcctgcggcggcgccggcttcggcagcagaagcctgtacggcctgggcggcagcaagagaatcagcatcggcggcggcagctgcgccatcagcggcggctacggcagcagagccggcggcagctacggcttcggcggcgccggcagcggcttcggcttcggcggcggcgccggcatcggcttcggcctgggcggcggcgccggcctggccggcggcttcggcggccccggcttccccgtgtgcccccccggcggcatccaggaggtgaccgtgaaccagagcctgctgacccccctgaacctgcagatcgaccccgccatccagagagtgagagccgaggagagagagcagatcaagaccctgaacaacaagttcgccagcttcatcgacaaggtgagattcctggagcagcagaacaaggtgctggacaccaagtggaccctgctgcaggagcagggcaccaagaccgtgagacagaacctggagcccctgttcgagcagtacatcaacaacctgagaagacagctggacaacatcgtgggcgagagaggcagactggacagcgagctgagaaacatgcaggacctggtggaggacctgaagaacaaggacgagatcaacttcctgagagccctgtacgacgccgagctgagccagatgcagacccacatcagcgacaccagcgtggtgctgagcatggacaacaacagaaacctggacctggacagcatcatcgccgaggtgaaggcccagtacgaggagatcgcccagagaagcagagccgaggccgagagctggtaccagaccaagtacgaggagctgcagatcaccgccggcagacacggcgacgacctgagaaacaccaagcaggagatcgccgagatcaacagaatgatccagagactgagaagcgagatcgaccacgtgaagaagcagtgcgccaacctgcaggccgccatcgccgacgccgagcagagaggcgagatggccctgaaggacgccaagaacaagctggagggcctggaggacgccctgcagaaggccaagcaggacctggccagactgctgaaggagtaccaggagctgatgaacgtgaagctggccctggacgtggagatcgccacctacagaaagctgctggagggcgaggagtgcagactgaacggcgagggcgtgggccaggtgaacatcagcgtggtgcagagcaccgtgagcagcggctacggcggcgccagcggcgtgggcagcggcctgggcctgggcggcggcagcagctacagctacggcagcggcctgggcgtgggcggcggcttcagcagcagcagcggcagagccaccggcggcggcctgagcagcgtgggcggcggcagcagcaccatcaagtacaccaccaccagcagcagcagcagaaagagctacaagcactag

SEQ ID NO: 86085 - DNA, 1695 bp, synthetic construct
  misc_feature 1..1695: note = Description of Artificial Sequence: Synthetic coding sequence
  source 1..1695: mol_type = other DNA
atggccagcaccagcaccaccatcagaagccacagcagcagcagaagaggcttcagcgccaacagcgccagactgcccggcgtgagcagaagcggcttcagcagcatcagcgtgagcagaagcagaggcagcggcggcctgggcggcgcctgcggcggcgccggcttcggcagcagaagcctgtacggcctgggcggcagcaagagaatcagcatcggcggcggcagctgcgccatcagcggcggctacggcagcagagccggcggcagctacggcttcggcggcgccggcagcggcttcggcttcggcggcggcgccggcatcggcttcggcctgggcggcggcgccggcctggccggcggcttcggcggccccggcttccccgtgtgcccccccggcggcatccaggaggtgaccgtgaaccagagcctgctgacccccctgaacctgcagatcgaccccgccatccagagagtgagagccgaggagagagagcagatcaagaccctgaacaacaagttcgccagcttcatcgacaaggtgagattcctggagcagcagaacaaggtgctggacaccaagtggaccctgctgcaggagcagggcaccaagaccgtgagacagaacctggagcccctgttcgagcagtacatcaacaacctgagaagacagctggacagcatcgtgggcgagagaggcagactggacagcgagctgagaaacatgcaggacctggtggaggacctgaagaacaagtacgaggacgagatcaacaagagaaccgccgccgagaacgagttcgtgaccctgaagaaggacgtggacgccgcctacatgaacaaggtggagctgcaggccaaggccgacaccctgaccgacgagatcaacttcctgagagccctgtacgacgccgagctgagccagatgcagacccacatcagcgacaccagcgtggtgctgagcatggacaacaacagaaacctggacctggacagcatcatcgccgaggtgaaggcccagtacgaggagatcgcccagagaagcagagccgaggccgagagctggtaccagaccaagtacgaggagctgcaggtgaccgccggcagacacggcgacgacctgagaaacaccaagcaggagatcgccgagatcaacagaatgatccagagactgagaagcgagatcgaccacgtgaagaagcagtgcgccagcctgcaggccgccatcgccgacgccgagcagagaggcgagatggccctgaaggacgccaagaacaagctggagggcctggaggacgccctgcagaaggccaagcaggacctggccagactgctgaaggagtaccaggagctgatgaacgtgaagctggccctggacgtggagatcgccacctacagaaagctgctggagggcgaggagtgcagactgaacggcgagggcgtgggccaggtgaacgtgagcgtggtgcagagcaccatcagcagcggctacggcggcgccagcggcgtgggcagcggcctgggcctgggcggcggcagcagctacagctacggcagcggcctgggcatcggcggcggcttcagcagcagcagcggcagagccatcggcggcggcctgagcagcgtgggcggcggcagcagcaccatcaagtacaccaccaccagcagcagcagcagaaagagctacaagcactag

SEQ ID NO: 86086 - DNA, 1650 bp, synthetic construct
  misc_feature 1..1650: note = Description of Artificial Sequence: Synthetic coding sequence
  source 1..1650: mol_type = other DNA
atggccagcaccagcaccaccatcagaagccacagcagcagcagaagcggcttcagcagcatcagcgtgagcagaagcagaggcagcggcggcctgggcggcgcctgcggcggcgccggcttcggcagcagaagcctgtacggcctgggcggcagcaagagaatcagcatcggcggcggcagctgcgccatcagcggcggctacggcagcagagccggcggcagctacggcttcggcggcgccggcagcggcttcggcttcggcggcggcgccggcatcggcttcggcctgggcggcggcgccggcctggccggcggcttcggcggccccggcttccccgtgtgcccccccggcggcatccaggaggtgaccgtgaaccagagcctgctgacccccctgaacctgcagatcgaccccgccatccagagagtgagagccgaggagagagagcagatcaagaccctgaacaacaagttcgccagcttcatcgacaaggtgagattcctggagcagcagaacaaggtgctggacaccaagtggaccctgctgcaggagcagggcaccaagaccgtgagacagaacctggagcccctgttcgagcagtacatcaacaacctgagaagacagctggacagcatcgtgggcgagagaggcagactggacagcgagctgagaaacatgcaggacctggtggaggacctgaagaacaagtacgaggacgagatcaacaagagaaccgccgccgagaacgagttcgtgaccctgaagaaggacgtggacgccgcctacatgaacaaggtggagctgcaggccaaggccgacaccctgaccgacgagatcaacttcctgagagccctgtacgacgccgagctgagccagatgcagacccacatcagcgacaccagcgtggtgctgagcatggacaacaacagaaacctggacctggacagcatcatcgccgaggtgaaggcccagtacgaggagatcgcccagagaagcagagccgaggccgagagctggtaccagaccaagtacgaggagctgcaggtgaccgccggcagacacggcgacgacctgagaaacaccaagcaggagatcgccgagatcaacagaatgatccagagactgagaagcgagatcgaccacgtgaagaagcagtgcgccagcctgcaggccgccatcgccgacgccgagcagagaggcgagatggccctgaaggacgccaagaacaagctggagggcctggaggacgccctgcagaaggccaagcaggacctggccagactgctgaaggagtaccaggagctgatgaacgtgaagctggccctggacgtggagatcgccacctacagaaagctgctggagggcgaggagtgcagactgaacggcgagggcgtgggccaggtgaacgtgagcgtggtgcagagcaccatcagcagcggctacggcggcgccagcggcgtgggcagcggcctgggcctgggcggcggcagcagctacagctacggcagcggcctgggcatcggcggcggcttcagcagcagcagcggcagagccatcggcggcggcctgagcagcgtgggcggcggcagcagcaccatcaagtacaccaccaccagcagcagcagcagaaagagctacaagcactag

SEQ ID NO: 86087 - DNA, 1572 bp, synthetic construct
  misc_feature 1..1572: note = Description of Artificial Sequence: Synthetic coding sequence
  source 1..1572: mol_type = other DNA
atgagcagacagttcacctgcaagagcggcgccgccgccaagggcggcttcagcggctgcagcgccgtgctgagcggcggcagcagcagcagcttcagagccggcagcaagggcctgagcggcggcttcggcagcagaagcctgtacagcctgggcggcgtgagaagcctgaacgtggccagcggcagcggcaagagcggcggctacggcttcggcagaggcagagccagcggcttcgccggcagcatgttcggcagcgtggccctgggccccgtgtgccccaccgtgtgcccccccggcggcatccaccaggtgaccgtgaacgagagcctgctggcccccctgaacgtggagctggaccccgagatccagaaggtgagagcccaggagagagagcagatcaaggccctgaacaacaagttcgccagcttcatcgacaaggtgagattcctggagcagcagaaccaggtgctggagaccaagtgggagctgctgcagcagctggacctgaacaactgcaagaacaacctggagcccatcctggagggctacatcagcaacctgagaaagcagctggagaccctgagcggcgacagagtgagactggacagcgagctgagaaacgtgagagacgtggtggaggactacaagaagagatacgaggaggagatcaacaagagaaccgccgccgagaacgagttcgtgctgctgaagaaggacgtggacgccgcctacgccaacaaggtggagctgcaggccaaggtggagagcatggaccaggagatcaagttcttcagatgcctgttcgaggccgagatcacccagatccagagccacatcagcgacatgagcgtgatcctgagcatggacaacaacagaaacctggacctggacagcatcatcgacgaggtgagaacccagtacgaggagatcgccctgaagagcaaggccgaggccgaggccctgtaccagaccaagttccaggagctgcagctggccgccggcagacacggcgacgacctgaagaacaccaagaacgagatcagcgagctgaccagactgatccagagaatcagaagcgagatcgagaacgtgaagaagcaggccagcaacctggagaccgccatcgccgacgccgagcagagaggcgacaacgccctgaaggacgccagagccaagctggacgagctggagggcgccctgcaccaggccaaggaggagctggccagaatgctgagagagtaccaggagctgatgagcctgaagctggccctggacatggagatcgccacctacagaaagctgctggagagcgaggagtgcagaatgagcggcgagttccccagccccgtgagcatcagcatcatcagcagcaccagcggcggcagcgtgtacggcttcagacccagcatggtgagcggcggctacgtggccaacagcagcaactgcatcagcggcgtgtgcagcgtgagaggcggcgagggcagaagcagaggcagcgccaacgactacaaggacaccctgggcaagggcagcagcctgagcgcccccagcaagaagaccagcagatag

SEQ ID NO: 86088 - DNA, 1536 bp, synthetic construct
  misc_feature 1..1536: note = Description of Artificial Sequence: Synthetic coding sequence
  source 1..1536: mol_type = other DNA
atgagcagacagctgacccacttccccagaggcgagagactgggcttcagcggctgcagcgccgtgctgagcggcggcatcggcagcagcagcgccagcttcagagccagagtgaagggcagcgccagcttcggcagcaagagcctgagctgcctgggcggcagcagaagcctggccctgagcgccgccgccagaagaggcggcggcagactgggcggcttcgtgggcaccgccttcggcagcgccggcctgggccccaagtgccccagcgtgtgcccccccggcggcatcccccaggtgaccgtgaacaagagcctgctggcccccctgaacgtggagatggaccccgagatccagagagtgagagcccaggagagagagcagatcaaggccctgaacaacaagttcgccagcttcatcgacaaggtgagattcctggagcagcagaaccaggtgctggagaccaagtggaacctgctgcagcagctggacctgaacaactgcagaaagaacctggagcccatctacgagggctacatcagcaacctgcagaagcagctggagatgctgagcggcgacggcgtgagactggacagcgagctgagaaacatgcaggacctggtggaggactacaagaagagatacgaggtggagatcaacagaagaaccgccgccgagaacgagttcgtggtgctgaagaaggacgtggacgccgcctacatgaacaaggtggagctgcaggccaaggtggacagcctgaccgacgagatcaagttcttcaagtgcctgtacgagggcgagatcacccagatccagagccacatcagcgacaccagcatcgtgctgagcatggacaacaacagagacctggacctggacagcatcatcgccgaggtgagagcccagtacgaggagatcgccctgaagagcaaggccgaggccgagaccctgtaccagaccaagatccaggagctgcaggtgaccgccggccagcacggcgacgacctgaagctgaccaaggccgagatcagcgagctgaacagactgatccagagaatcagaagcgagatcggcaacgtgaagaagcagtgcgccgacctggagaccgccatcgccgacgccgagcagagaggcgactgcgccctgaaggacgccagagccaagctggacgagctggagggcgccctgcaccaggccaaggaggagctggccagaatgctgagagagtaccaggagctggtgagcctgaagctggccctggacatggagatcgccacctacagaaagctgctggagagcgaggagtgcagaatgagcggcgagtaccccaacagcgtgagcatcagcgtgatcagcagcaccaacgccggcgccggcggcgccggcttcagcatgggcttcggcgccagcagcagctacagctacaagaccgccgccgccgacgtgaagaccaagggcagctgcggcagcgagctgaaggaccccctggccaagaccagcggcagcagctgcgccaccaagaaggccagcagatag

SEQ ID NO: 86089 - DNA, 1410 bp, synthetic construct
  misc_feature 1..1410: note = Description of Artificial Sequence: Synthetic coding sequence
  source 1..1410: mol_type = other DNA
atgagcagacagctgacccacttccccagaggcgagagactgggcttcagcggctgcagcgccgtgctgagcggcggcatcggcagcagcagcgccagcttcagagccagagtgaagggcagcgccagcttcggcagcaagagcctgagctgcctgggcggcagcagaagcctggccctgagcgccgccgccagaagaggcggcggcagactgggcggcttcgtgggcaccgccttcggcagcgccggcctgggccccaagtgccccagcgtgtgcccccccggcggcatcccccaggtgaccgtgaacaagagcctgctggcccccctgaacgtggagatggaccccgagatccagagagtgagagcccaggagagagagcagatcaaggccctgaacaacaagttcgccagcttcatcgacaaggtgagattcctggagcagcagaaccaggtgctggagaccaagtggaacctgctgcagcagctggacctgaacaactgcagaaagaacctggagcccatctacgagggctacatcagcaacctgcagaagcagctggagatgctgagcggcgacggcgtgagactggacagcgagctgagaaacatgcaggacctggtggaggactacaagaagagatacgaggtggagatcaacagaagaaccgccgccgagaacgagttcgtggtgctgaagaaggacgtggacgccgcctacatgaacaaggtggagctgcaggccaaggtggacagcctgaccgacgagatcaagttcttcaagtgcctgtacgagggcgagatcacccagatccagagccacatcagcgacaccagcatcgtgctgagcatggacaacaacagagacctggacctggacagcatcatcgccgaggtgagagcccagtacgaggagatcgccctgaagagcaaggccgaggccgagaccctgtaccagaccaagtgcgccgacctggagaccgccatcgccgacgccgagcagagaggcgactgcgccctgaaggacgccagagccaagctggacgagctggagggcgccctgcaccaggccaaggaggagctggccagaatgctgagagagtaccaggagctggtgagcctgaagctggccctggacatggagatcgccacctacagaaagctgctggagagcgaggagtgcagaatgagcggcgagtaccccaacagcgtgagcatcagcgtgatcagcagcaccaacgccggcgccggcggcgccggcttcagcatgggcttcggcgccagcagcagctacagctacaagaccgccgccgccgacgtgaagaccaagggcagctgcggcagcgagctgaaggaccccctggccaagaccagcggcagcagctgcgccaccaagaaggccagcagatag

SEQ ID NO: 86090 - DNA, 972 bp, synthetic construct
  misc_feature 1..972: note = Description of Artificial Sequence: Synthetic coding sequence
  source 1..972: mol_type = other DNA
atgctgagcggcgacggcgtgagactggacagcgagctgagaaacatgcaggacctggtggaggactacaagaagagatacgaggtggagatcaacagaagaaccgccgccgagaacgagttcgtggtgctgaagaaggacgtggacgccgcctacatgaacaaggtggagctgcaggccaaggtggacagcctgaccgacgagatcaagttcttcaagtgcctgtacgagggcgagatcacccagatccagagccacatcagcgacaccagcatcgtgctgagcatggacaacaacagagacctggacctggacagcatcatcgccgaggtgagagcccagtacgaggagatcgccctgaagagcaaggccgaggccgagaccctgtaccagaccaagatccaggagctgcaggtgaccgccggccagcacggcgacgacctgaagctgaccaaggccgagatcagcgagctgaacagactgatccagagaatcagaagcgagatcggcaacgtgaagaagcagtgcgccgacctggagaccgccatcgccgacgccgagcagagaggcgactgcgccctgaaggacgccagagccaagctggacgagctggagggcgccctgcaccaggccaaggaggagctggccagaatgctgagagagtaccaggagctggtgagcctgaagctggccctggacatggagatcgccacctacagaaagctgctggagagcgaggagtgcagaatgagcggcgagtaccccaacagcgtgagcatcagcgtgatcagcagcaccaacgccggcgccggcggcgccggcttcagcatgggcttcggcgccagcagcagctacagctacaagaccgccgccgccgacgtgaagaccaagggcagctgcggcagcgagctgaaggaccccctggccaagaccagcggcagcagctgcgccaccaagaaggccagcagatag

SEQ ID NO: 86091 - DNA, 1536 bp, synthetic construct; identical to SEQ ID NO: 86088
  misc_feature 1..1536: note = Description of Artificial Sequence: Synthetic coding sequence
  source 1..1536: mol_type = other DNA

SEQ ID NO: 86092 - DNA, 1623 bp, synthetic construct
  misc_feature 1..1623: note = Description of Artificial Sequence: Synthetic coding sequence
  source 1..1623: mol_type = other DNA
atgagcagacagttcacctacaagagcggcgccgccgccaagggcggcttcagcggctgcagcgccgtgctgagcggcggcagcagcagcagctacagagccggcggcaagggcctgagcggcggcttcagcagcagaagcctgtacagcctgggcggcgccagaagcatcagcttcaacgtggccagcggcagcggctgggccggcggctacggcttcggcagaggcagagccagcggcttcgccggcagcatgttcggcagcgtggccctgggcagcgtgtgccccagcctgtgcccccccggcggcatccaccaggtgaccatcaacaagagcctgctggcccccctgaacgtggagctggaccccgagatccagaaggtgagagcccaggagagagagcagatcaaggtgctgaacaacaagttcgccagcttcatcgacaaggtgagattcctggagcagcagaaccaggtgctggagaccaagtgggagctgctgcagcagctggacctgaacaactgcaagaacaacctggagcccatcctggagggctacatcagcaacctgagaaagcagctggagaccctgagcggcgacagagtgagactggacagcgagctgagaagcgtgagagaggtggtggaggactacaagaagagatacgaggaggagatcaacaagagaaccaccgccgagaacgagttcgtggtgctgaagaaggacgtggacgccgcctacaccagcaaggtggagctgcaggccaaggtggacgccctggacggcgagatcaagttcttcaagtgcctgtacgagggcgagaccgcccagatccagagccacatcagcgacaccagcatcatcctgagcatggacaacaacagaaacctggacctggacagcatcatcgccgaggtgagagcccagtacgaggagatcgccagaaagagcaaggccgaggccgaggccctgtaccagaccaagttccaggagctgcagctggccgccggcagacacggcgacgacctgaagcacaccaagaacgagatcagcgagctgaccagactgatccagagactgagaagcgagatcgagagcgtgaagaagcagtgcgccaacctggagaccgccatcgccgacgccgagcagagaggcgactgcgccctgaaggacgccagagccaagctggacgagctggagggcgccctgcagcaggccaaggaggagctggccagaatgctgagagagtaccaggagctgctgagcgtgaagctgagcctggacatcgagatcgccacctacagaaagctgctggagggcgaggagtgcagaatgagcggcgagtacaccaacagcgtgagcatcagcgtgatcaacagcagcatggccggcatggccggcaccggcgccggcttcggcttcagcaacgccggcacctacggctactggcccagcagcgtgagcggcggctacagcatgctgcccggcggctgcgtgaccggcagcggcaactgcagccccagaggcgaggccagaaccagactgggcagcgccagcgagttcagagacagccagggcaagaccctggccctgagcagccccaccaagaagaccatgagatag

SEQ ID NO: 86093 - DNA, 1590 bp, synthetic construct
  misc_feature 1..1590: note = Description of Artificial Sequence: Synthetic coding sequence
  source 1..1590: mol_type = other DNA
atgagcagacagctgaacatcaagagcagcggcgacaagggcaacttcagcgtgcacagcgccgtggtgcccagaaaggccgtgggcagcctggccagctactgcgccgccggcagaggcgccggcgccggcttcggcagcagaagcctgtacagcctgggcggcaacagaagaatcagcttcaacgtggccggcggcggcgtgagagccggcggctacggcttcagacccggcagcggctacggcggcggcagagccagcggcttcgccggcagcatgttcggcagcgtggccctgggccccgcctgcctgagcgtgtgcccccccggcggcatccaccaggtgaccgtgaacaagagcctgctggcccccctgaacgtggagctggaccccgagatccagaaggtgagagcccaggagagagagcagatcaaggtgctgaacgacaagttcgccagcttcatcgacaaggtgagattcctggagcagcagaaccaggtgctggagaccaagtgggagctgctgcagcagctggacctgaacaactgcaagaagaacctggagcccatcctggagggctacatcagcaacctgagaaagcagctggagaccctgagcggcgacagagtgagactggacagcgagctgagaagcatgagagacctggtggaggactacaagaagagatacgaggtggagatcaacagaagaaccaccgccgagaacgagttcgtggtgctgaagaaggacgccgacgccgcctacgccgtgaaggtggagctgcaggccaaggtggacagcctggacaaggagatcaagttcctgaagtgcctgtacgacgccgagatcgcccagatccagacccacgccagcgagaccagcgtgatcctgagcatggacaacaacagagacctggacctggacagcatcatcgccgaggtgagaatgcactacgaggagatcgccctgaagagcaaggccgaggccgaggccctgtaccagaccaagatccaggagctgcagctggccgccagcagacacggcgacgacctgaagcacaccagaagcgagatggtggagctgaacagactgatccagagaatcagatgcgagatcggcaacgtgaagaagcagagagccagcctggagaccgccatcgccgacgccgagcagagaggcgacaacgccctgaaggacgcccaggccaagctggacgagctggagggcgccctgcaccaggccaaggaggagctggccagaatgctgagagagtaccaggagctgatgagcctgaagctggccctggacatggagatcgccacctacagaaagctgctggagggcgaggagtgcagaatgagcggcgagaaccccagcagcgtgagcatcagcgtgatcagcagcagcagctacagctaccaccaccccagcagcgccggcgtggacctgggcgccagcgccgtggccggcagcagcggcagcacccagagcggccagaccaagaccaccgaggccagaggcggcgacctgaaggacacccagggcaagagcacccccgccagcatccccgccagaaaggccaccagatag

SEQ ID NO: 86094 - DNA, 1656 bp, synthetic construct
  misc_feature 1..1656: note = Description of Artificial Sequence: Synthetic coding sequence
  source 1..1656: mol_type = other DNA
atgagcagacagagcagcatcaccttccagagcggcagcagaagaggcttcagcaccaccagcgccatcacccccgccgccggcagaagcagattcagcagcgtgagcgtggccagaagcgccgccggcagcggcggcctgggcagaatcagcagcgccggcgccagcttcggcagcagaagcctgtacaacctgggcggcgccaagagagtgagcatcaacggctgcggcagcagctgcagaagcggcttcggcggcagagccagcaacagattcggcgtgaacagcggcttcggctacggcggcggcgtgggcggcggcttcagcggccccagcttccccgtgtgcccccccggcggcatccaggaggtgaccgtgaaccagagcctgctgacccccctgcacctgcagatcgaccccaccatccagagagtgagagccgaggagagagagcagatcaagaccctgaacaacaagttcgccagcttcatcgacaaggtgagattcctggagcagcagaacaaggtgctggagaccaagtgggccctgctgcaggagcagggcagcagaaccgtgagacagaacctggagcccctgttcgacagctacaccagcgagctgagaagacagctggagagcatcaccaccgagagaggcagactggaggccgagctgagaaacatgcaggacgtggtggaggacttcaaggtgagatacgaggacgagatcaacaagagaaccgccgccgagaacgagttcgtggccctgaagaaggacgtggacgccgcctacatgaacaaggtggagctggaggccaaggtgaagagcctgcccgaggagatcaacttcatccacagcgtgttcgacgccgagctgagccagctgcagacccaggtgggcgacaccagcgtggtgctgagcatggacaacaacagaaacctggacctggacagcatcatcgccgaggtgaaggcccagtacgaggacatcgccaacagaagcagagccgaggccgagagctggtaccagaccaagtacgaggagctgcaggtgaccgccggcagacacggcgacgacctgagaaacaccaagcaggagatcagcgagatgaacagaatgatccagagactgagagccgagatcgacagcgtgaagaagcagtgcagcagcctgcagaccgccatcgccgacgccgagcagagaggcgagctggccctgaaggacgccagagccaagctggtggacctggaggaggccctgcagaaggccaagcaggacatggccagactgctgagagagtaccaggagctgatgaacatcaagctggccctggacgtggagatcgccacctacagaaagctgctggagggcgaggagtgcagactgagcggcgagggcgtgagccccgtgaacatcagcgtggtgaccagcaccctgagcagcggctacggcagcggcagcagcatcggcggcggcaacctgggcctgggcggcggcagcggctacagcttcaccaccagcggcggccacagcctgggcgccggcctgggcggcagcggcttcagcgccaccagcaacagaggcctgggcggcagcggcagcagcgtgaagttcgtgagcaccaccagcagcagccagaagagctacacccactag

SEQ ID NO: 86095 - DNA, 1737 bp, synthetic construct
  misc_feature 1..1737: note = Description of Artificial Sequence: Synthetic coding sequence
  source 1..1737: mol_type = other DNA
atgagccaccagttcagcagccagagcgccttcagcagcatgagcagaagagtgtacagcaccagcagcagcgccggcagcggcggcggcagccccgccgtgggcagcgtgtgctacgccagaggcagatgcggcggcggcggctacggcatccacggcagaggcttcggcagcagaagcctgtacaacctgggcggcagcagaagcatcagcatcaacctgatgggcagaagcaccagcggcttctgccagggcggcggcgtgggcggcttcggcggcggcagaggcttcggcgtgggcagcaccggcgccggcggcttcggcggcggcggcttcggcggcgccggcttcggcaccagcaacttcggcctgggcggcttcggcccctactgcccccccggcggcatccaggaggtgaccatcaaccagagcctgctggagcccctgcacctggaggtggaccccgagatccagagaatcaagacccaggagagagagcagatcatggtgctgaacaacaagttcgccagcttcatcgacaaggtgagattcctggagcagcagaaccaggtgctgcagaccaagtgggagctgctgcagcaggtgaacaccagcaccggcaccaacaacctggagcccctgctggagaactacatcggcgacctgagaagacaggtggacctgctgagcgccgagcagatgagacagaacgccgaggtgagaagcatgcaggacgtggtggaggactacaagagcaagtacgaggacgagatcaacaagagaaccggcagcgagaacgacttcgtggtgctgaagaaggacgtggacgccgcctacgtgagcaaggtggacctggagagcagagtggacaccctgaccggcgaggtgaacttcctgaagtacctgttcctgaccgagctgagccaggtgcagacccacatcagcgacaccaacgtgatcctgagcatggacaacaacagaagcctggacctggacagcatcatcgacgccgtgagaacccagtacgagctgatcgcccagagaagcaaggacgaggccgaggccctgtaccagaccaagtaccaggagctgcagatcaccgccggcagacacggcgacgacctgaagaacagcaagatggagatcgccgagctgaacagaaccgtgcagagactgcaggccgagatcagcaacgtgaagaagcagatcgagcagatgcagagcctgatcagcgacgccgaggagagaggcgagcaggccctgcaggacgcctggcagaagctgcaggacctggaggaggccctgcagcagagcaaggaggagctggccagactgctgagagactaccaggccatgctgggcgtgaagctgagcctggacgtggagatcgccacctacagacagctgctggagggcgaggagagcagaatgagcggcgagctgcagagccacgtgagcatcagcgtgcagaacagccaggtgagcgtgaacggcggcgccggcggcggcggcagctacggcagcggcggctacggcggcggcagcggcggcggctacggcggcggcagaagctacagaggcggcggcgccagaggcagaagcggcggcggctacggcagcggctgcggcggcggcggcggcagctacggcggcagcggcagaagcggcagaggcagcagcagagtgcagatcatccagaccagcaccaacaccagccacagaagaatcctggagtag

SEQ ID NO: 86096 - DNA, 1038 bp, synthetic construct
  misc_feature 1..1038: note = Description of Artificial Sequence: Synthetic coding sequence
  source 1..1038: mol_type = other DNA
atgagacagaacgccgaggtgagaagcatgcaggacgtggtggaggactacaagagcaagtacgaggacgagatcaacaagagaaccggcagcgagaacgacttcgtggtgctgaagaaggacgtggacgccgcctacgtgagcaaggtggacctggagagcagagtggacaccctgaccggcgaggtgaacttcctgaagtacctgttcctgaccgagctgagccaggtgcagacccacatcagcgacaccaacgtgatcctgagcatggacaacaacagaagcctggacctggacagcatcatcgacgccgtgagaacccagtacgagctgatcgcccagagaagcaaggacgaggccgaggccctgtaccagaccaagtaccaggagctgcagatcaccgccggcagacacggcgacgacctgaagaacagcaagatggagatcgccgagctgaacagaaccgtgcagagactgcaggccgagatcagcaacgtgaagaagcagatcgagcagatgcagagcctgatcagcgacgccgaggagagaggcgagcaggccctgcaggacgcctggcagaagctgcaggacctggaggaggccctgcagcagagcaaggaggagctggccagactgctgagagactaccaggccatgctgggcgtgaagctgagcctggacgtggagatcgccacctacagacagctgctggagggcgaggagagcagaatgagcggcgagctgcagagccacgtgagcatcagcgtgcagaacagccaggtgagcgtgaacggcggcgccggcggcggcggcagctacggcagcggcggctacggcggcggcagcggcggcggctacggcggcggcagaagctacagaggcggcggcgccagaggcagaagcggcggcggctacggcagcggctgcggcggcggcggcggcagctacggcggcagcggcagaagcggcagaggcagcagcagagtgcagatcatccagaccagcaccaacaccagccacagaagaatcctggagtag

SEQ ID NO: 86097 - DNA, 1563 bp, synthetic construct
  misc_feature 1..1563: note = Description of Artificial Sequence: Synthetic coding sequence
  source 1..1563: mol_type = other DNA
atgagcctgagcccctgcagagcccagagaggcttcagcgccagaagcgcctgcagcgccagaagcagaggcagaagcagaggcggcttcagcagcagaggcggcttcagcagcagaagcctgaacagcttcggcggctgcctggagggcagcagaggcagcacctggggcagcggcggcagactgggcgtgagattcggcgagtggagcggcggccccggcctgagcctgtgcccccccggcggcatccaggaggtgaccatcaaccagaacctgctgacccccctgaagatcgagatcgacccccagttccaggtggtgagaacccaggagacccaggagatcagaaccctgaacaaccagttcgccagcttcatcgacaaggtgagattcctggagcagcagaacaaggtgctggagaccaagtggcacctgctgcagcagcagggcctgagcggcagccagcagggcctggagcccgtgttcgaggcctgcctggaccagctgagaaagcagctggagcagctgcagggcgagagaggcgccctggacgccgagctgaaggcctgcagagaccaggaggaggagtacaagagcaagtacgaggaggaggcccacagaagagccaccctggagaacgacttcgtggtgctgaagaaggacgtggacggcgtgttcctgagcaagatggagctggagggcaagctggaggccctgagagagtacctgtacttcctgaagcacctgaacgaggaggagctgggccagctgcagacccaggccagcgacaccagcgtggtgctgagcatggacaacaacagatacctggacttcagcagcatcatcaccgaggtgagagccagatacgaggagatcgccagaagcagcaaggccgaggccgaggccctgtaccagaccaagtaccaggagctgcaggtgagcgcccagctgcacggcgacagaatgcaggagaccaaggtgcagatcagccagctgcaccaggagatccagagactgcagagccagaccgagaacctgaagaagcagaacgccagcctgcaggccgccatcaccgacgccgagcagagaggcgagctggccctgaaggacgcccaggccaaggtggacgagctggaggccgccctgagaatggccaagcagaacctggccagactgctgtgcgagtaccaggagctgaccagcaccaagctgagcctggacgtggagatcgccacctacagaagactgctggagggcgaggagtgcagaatgagcggcgagtgcaccagccaggtgaccatcagcagcgtgggcggcagcgccgtgatgagcggcggcgtgggcggcggcctgggcagcacctgcggcctgggcagcggcaagggcagccccggcagctgctgcaccagcatcgtgaccggcggcagcaacatcatcctgggcagcggcaaggaccccgtgctggacagctgcagcgtgagcggcagcagcgccggcagcagctgccacaccatcctgaagaagaccgtggagagcagcctgaagaccagcatcacctactag

SEQ ID NO: 86098 - DNA, 1233 bp, synthetic construct
  misc_feature 1..1233: note = Description of Artificial Sequence: Synthetic coding sequence
  source 1..1233: mol_type = other DNA
atggagggccacgaggccagccccgcccaggtgggccagggcgacagaggcaaggtgagattcctggagcagcagaacaaggtgctggagaccaagtggcacctgctgcagcagcagggcctgagcggcagccagcagggcctggagcccgtgttcgaggcctgcctggaccagctgagaaagcagctggagcagctgcagggcgagagaggcgccctggacgccgagctgaaggcctgcagagaccaggaggaggagtacaagagcaagtacgaggaggaggcccacagaagagccaccctggagaacgacttcgtggtgctgaagaaggacgtggacggcgtgttcctgagcaagatggagctggagggcaagctggaggccctgagagagtacctgtacttcctgaagcacctgaacgaggaggagctgggccagctgcagacccaggccagcgacaccagcgtggtgctgagcatggacaacaacagatacctggacttcagcagcatcatcaccgaggtgagagccagatacgaggagatcgccagaagcagcaaggccgaggccgaggccctgtaccagaccaagtaccaggagctgcaggtgagcgcccagctgcacggcgacagaatgcaggagaccaaggtgcagatcagccagctgcaccaggagatccagagactgcagagccagaccgagaacctgaagaagcagaacgccagcctgcaggccgccatcaccgacgccgagcagagaggcgagctggccctgaaggacgcccaggccaaggtggacgagctggaggccgccctgagaatggccaagcagaacctggccagactgctgtgcgagtaccaggagctgaccagcaccaagctgagcctggacgtggagatcgccacctacagaagactgctggagggcgaggagtgcagaatgagcggcgagtgcaccagccaggtgaccatcagcagcgtgggcggcagcgccgtgatgagcggcggcgtgggcggcggcctgggcagcacctgcggcctgggcagcggcaagggcagccccggcagctgctgcaccagcatcgtgaccggcggcagcaacatcatcctgggcagcggcaaggaccccgtgctggacagctgcagcgtgagcggcagcagcgccggcagcagctgccacaccatcctgaagaagaccgtggagagcagcctgaagaccagcatcacctactag

SEQ ID NO: 86099 - DNA, 876 bp, synthetic construct
  misc_feature 1..876: note = Description of Artificial Sequence: Synthetic coding sequence
  source 1..876: mol_type = other DNA
atggagctggagggcaagctggaggccctgagagagtacctgtacttcctgaagcacctgaacgaggaggagctgggccagctgcagacccaggccagcgacaccagcgtggtgctgagcatggacaacaacagatacctggacttcagcagcatcatcaccgaggtgagagccagatacgaggagatcgccagaagcagcaaggccgaggccgaggccctgtaccagaccaagtaccaggagctgcaggtgagcgcccagctgcacggcgacagaatgcaggagaccaaggtgcagatcagccagctgcaccaggagatccagagactgcagagccagaccgagaacctgaagaagcagaacgccagcctgcaggccgccatcaccgacgccgagcagagaggcgagctggccctgaaggacgcccaggccaaggtggacgagctggaggccgccctgagaatggccaagcagaacctggccagactgctgtgcgagtaccaggagctgaccagcaccaagctgagcctggacgtggagatcgccacctacagaagactgctggagggcgaggagtgcagaatgagcggcgagtgcaccagccaggtgaccatcagcagcgtgggcggcagcgccgtgatgagcggcggcgtgggcggcggcctgggcagcacctgcggcctgggcagcggcaagggcagccccggcagctgctgcaccagcatcgtgaccggcggcagcaacatcatcctgggcagcggcaaggaccccgtgctggacagctgcagcgtgagcggcagcagcgccggcagcagctgccacaccatcctgaagaagaccgtggagagcagcctgaagaccagcatcacctactag

SEQ ID NO: 86100 - DNA, 1608 bp, synthetic construct
  misc_feature 1..1608: note = Description of Artificial Sequence: Synthetic coding sequence
  source 1..1608: mol_type = other DNA
atgagaagcagcgtgagcagacagacctacagcaccaagggcggcttcagcagcaacagcgccagcggcggcagcggcagccaggccagaaccagcttcagcagcgtgaccgtgagcagaagcagcggcagcggcggcggcgcccactgcggccccggcaccggcggcttcggcagcagaagcctgtacaacctgggcggccacaagagcatcagcgtgagcgtggccggcggcgccctgctgggcagagccctgggcggcttcggcttcggcagcagagccttcatgggccagggcgccggcagacagaccttcggccccgcctgcccccccggcggcatccaggaggtgaccgtgaaccagagcctgctgacccccctgcacgtggagatcgaccccgagatccagagagtgagaacccaggagagagagcagatcaagaccctgaacaacaagttcgccagcttcatcgacaaggtgagattcctggagcagcagaacaaggtgctggagaccaagtgggccctgctgcaggagcagggccagaacctgggcgtgaccagaaacaacctggagcccctgttcgaggcctacctgggcagcatgagaagcaccctggacagactgcagagcgagagaggcagactggacagcgagctgagaaacgtgcaggacctggtggaggacttcaagaacaagtacgaggacgagatcaacaagcacaccgccgccgagaacgagttcgtggtgctgaagaaggacgtggacgccgcctacatgggcagaatggacctgcacggcaaggtgggcaccctgacccaggagatcgacttcctgcagcagctgtacgagatggagctgagccaggtgcagacccacgtgagcaacaccaacgtggtgctgagcatggacaacaacagaaacctggacctggacagcatcatcgccgaggtgaaggcccagtacgagctgatcgcccagagaagcagagccgaggccgaggcctggtaccagaccaagtacgaggagctgcaggtgaccgccggcaagcacggcgacaacctgagagacaccaagaacgagatcgccgagctgaccagaaccatccagagactgcagggcgaggccgacgccgccaagaagcagtgccagcagctgcagaccgccatcgccgaggccgagcagagaggcgagctggccctgaaggacgcccagaagaagctgggcgacctggacgtggccctgcaccaggccaaggaggacctgaccagactgctgagagactaccaggagctgatgaacgtgaagctggccctggacgtggagatcgccacctacagaaagctgctggagagcgaggagagcagaatgagcggcgagtgccccagcgccgtgagcatcagcgtgaccggcaacagcaccaccgtgtgcggcggcggcgccgccagcttcggcggcggcatcagcctgggcggcagcggcggcgccaccaagggcggcttcagcaccaacgtgggctacagcaccgtgaagggcggccccgtgagcgccggcaccagcatcctgagaaagaccaccaccgtgaagaccagcagccagagatactag

SEQ ID NO: 86101 - DNA, 1269 bp, synthetic construct
  misc_feature 1..1269: note = Description of Artificial Sequence: Synthetic coding sequence
  source 1..1269: mol_type = other DNA
atggcctgcagaagctgcgtggtgggcttcagcagcctgagcagctgcgaggtgacccccgtgggcagccccagacccggcaccagcggctgggacagctgcagagcccccggccccggcttcagcagcagaagcctgaccggctgctggagcgccggcaccatcagcaaggtgaccgtgaaccccggcctgctggtgcccctggacgtgaagctggaccccgccgtgcagcagctgaagaaccaggagaaggaggagatgaaggccctgaacgacaagttcgccagcctgatcggcaaggtgcaggccctggagcagagaaaccagctgctggagaccagatggagcttcctgcagggccaggacagcgccatcttcgacctgggccacctgtacgaggagtaccagggcagactgcaggaggagctgagaaaggtgagccaggagagaggccagctggaggccaacctgctgcaggtgctggagaaggtggaggagttcagaatcagatacgaggacgagatcagcaagagaaccgacatggagttcaccttcgtgcagctgaagaaggacctggacgccgagtgcctgcacagaaccgagctggagaccaagctgaagagcctggagagcttcgtggagctgatgaagaccatctacgagcaggagctgaaggacctggccgcccaggtgaaggacgtgagcgtgaccgtgggcatggacagcagatgccacatcgacctgagcggcatcgtggaggaggtgaaggcccagtacgacgccgtggccgccagaagcctggaggaggccgaggcctacagcagaagccagctggaggagcaggccgccagaagcgccgagtacggcagcagcctgcagagcagcagaagcgagatcgccgacctgaacgtgagaatccagaagctgagaagccagatcctgagcgtgaagagccactgcctgaagctggaggagaacatcaagaccgccgaggagcagggcgagctggccttccaggacgccaagaccaagctggcccagctggaggccgccctgcagcaggccaagcaggacatggccagacagctgagaaagtaccaggagctgatgaacgtgaagctggccctggacatcgagatcgccacctacagaaagctggtggagggcgaggagggcagaatggacagccccagcgccaccgtggtgagcgccgtgcagagcagatgcaagaccgcccccagcctgccctaccccctgtgcagcctgtag

SEQ ID NO: 86102 - DNA, 1359 bp, synthetic construct
  misc_feature 1..1359: note = Description of Artificial Sequence: Synthetic coding sequence
  source 1..1359: mol_type = other DNA
atggcctgcagaagctgcgtggtgggcttcagcagcctgagcagctgcgaggtgacccccgtgggcagccccagacccggcaccagcggctgggacagctgcagagcccccggccccggcttcagcagcagaagcctgaccggctgctggagcgccggcaccatcagcaaggtgaccgtgaaccccggcctgctggtgcccctggacgtgaagctggaccccgccgtgcagcagctgaagaaccaggagaaggaggagatgaaggccctgaacgacaagttcgccagcctgatcggcaaggtgcaggccctggagcagagaaaccagctgctggagaccagatggagcttcctgcagggccaggacagcgccatcttcgacctgggccacctgtacgaggagtaccagggcagactgcaggaggagctgagaaaggtgagccaggagagaggccagctggaggccaacctgctgcaggtgctggagaaggtggaggagttcagaatcagatacgaggacgagatcagcaagagaaccgacatggagttcaccttcgtgcagctgaagaaggacctggacgccgagtgcctgcacagaaccgagctggagaccaagctgaagagcctggagagcttcgtggagctgatgaagaccatctacgagcaggagctgaaggacctggccgcccaggtgaaggacgtgagcgtgaccgtgggcatggacagcagatgccacatcgacctgagcggcatcgtggaggaggtgaaggcccagtacgacgccgtggccgccagaagcctggaggaggccgaggcctacagcagaagccagctggaggagcaggccgccagaagcgccgagtacggcagcagcctgcagagcagcagaagcgagatcgccgacctgaacgtgagaatccagaagctgagaagccagatcctgagcgtgaagagccactgcctgaagctggaggagaacatcaagaccgccgaggagcagggcgagctggccttccaggacgccaagaccaagctggcccagctggaggccgccctgcagcaggccaagcaggacatggccagacagctgagaaagtaccaggagctgatgaacgtgaagctggccctggacatcgagatcgccacctacagaaagctggtggagggcgaggagggcagaatggacagccccagcgccaccgtggtgagcgccgtgcagagcagatgcaagaccgccgccagcagaagcggcctgagcaaggcccccagcagaaagaagaagggcagcaagggccccgtgatcaagatcaccgagatgagcgagaagtacttcagccaggagagcgaggtgagcgagtag

SEQ ID NO: 86103 - DNA, 1518 bp, synthetic construct
  misc_feature 1..1518: note = Description of Artificial Sequence: Synthetic coding sequence
  source 1..1518: mol_type = other DNA
atgacctgcggcagcggcttcggcggcagagccttcagctgcatcagcgcctgcggccccagacccggcagatgctgcatcaccgccgccccctacagaggcatcagctgctacagaggcctgaccggcggcttcggcagccacagcgtgtgcggcggcttcagagccggcagctgcggcagaagcttcggctacagaagcggcggcgtgtgcggccccagccccccctgcatcaccaccgtgagcgtgaacgagagcctgctgacccccctgaacctggagatcgaccccaacgcccagtgcgtgaagcaggaggagaaggagcagatcaagagcctgaacagcagattcgccgccttcatcgacaaggtgagattcctggagcagcagaacaagctgctggagaccaagctgcagttctaccagaacagagagtgctgccagagcaacctggagcccctgttcgagggctacatcgagaccctgagaagagaggccgagtgcgtggaggccgacagcggcagactggccagcgagctgaaccacgtgcaggaggtgctggagggctacaagaagaagtacgaggaggaggtgagcctgagagccaccgccgagaacgagttcgtggccctgaagaaggacgtggactgcgcctacctgagaaagagcgacctggaggccaacgtggaggccctgatccaggagatcgacttcctgagaagactgtacgaggaggagatcctgatcctgcagagccacatcagcgacaccagcgtggtggtgaagctggacaacagcagagacctgaacatggactgcatcatcgccgagatcaaggcccagtacgacgacatcgtgaccagaagcagagccgaggccgagagctggtacagaagcaagtgcgaggagatgaaggccaccgtgatcagacacggcgagaccctgagaagaaccaaggaggagatcaacgagctgaacagaatgatccagagactgaccgccgaggtggagaacgccaagtgccagaacagcaagctggaggccgccgtggcccagagcgagcagcagggcgaggccgccctgagcgacgccagatgcaagctggccgagctggagggcgccctgcagaaggccaagcaggacatggcctgcctgatcagagagtaccaggaggtgatgaacagcaagctgggcctggacatcgagatcgccacctacagaagactgctggagggcgaggagcagagactgtgcgagggcatcggcgccgtgaacgtgtgcgtgagcagcagcagaggcggcgtggtgtgcggcgacctgtgcgtgagcggcagcagacccgtgaccggcagcgtgtgcagcgccccctgcaacggcaacgtggccgtgagcaccggcctgtgcgccccctgcggccagctgaacaccacctgcggcggcggcagctgcggcgtgggcagctgcggcatcagcagcctgggcgtgggcagctgcggcagcagctgcagaaagtgctag

SEQ ID NO: 86104 - DNA, 1455 bp, synthetic construct
  misc_feature 1..1455: note = Description of Artificial Sequence: Synthetic coding sequence
  source 1..1455: mol_type = other DNA
atgacctgcggcagcggcttcggcggcagagccttcagctgcatcagcgcctgcggccccagacccggcagatgctgcatcaccgccgccccctacagaggcatcagctgctacagaggcctgaccggcggcttcggcagccacagcgtgtgcggcggcttcagagccggcagctgcggcagaagcttcggctacagaagcggcggcgtgtgcggccccagccccccctgcatcaccaccgtgagcgtgaacgagagcctgctgacccccctgaacctggagatcgaccccaacgcccagtgcgtgaagcaggaggagaaggagcagatcaagagcctgaacagcagattcgccgccttcatcgacaaggtgagattcctggagcagcagaacaagctgctggagaccaagctgcagttctaccagaacagagagtgctgccagagcaacctggagcccctgttcgagggctacatcgagaccctgagaagagaggccgagtgcgtggaggccgacagcggcagactggccagcgagctgaaccacgtgcaggaggtgctggagggctacaagaagaagtacgaggaggaggtgagcctgagagccaccgccgagaacgagttcgtggccctgaagaaggacgtggactgcgcctacctgagaaagagcgacctggaggccaacgtggaggccctgatccaggagatcgacttcctgagaagactgtacgaggaggagatcctgatcctgcagagccacatcagcgacaccagcgtggtggtgaagctggacaacagcagagacctgaacatggactgcatcatcgccgagatcaaggcccagtacgacgacatcgtgaccagaagcagagccgaggccgagagctggtacagaagcaagtgcgaggagatgaaggccaccgtgatcagacacggcgagaccctgagaagaaccaaggaggagatcaacgagctgaacagaatgatccagagactgaccgccgaggtggagaacgccaagtgccagaacagcaagctggaggccgccgtggcccagagcgagcagcagggcgaggccgccctgagcgacgccagatgcaagctggccgagctggagggcgccctgcagaaggccaagcaggacatggcctgcctgatcagagagtaccaggaggtgatgaacagcaagctgggcctggacatcgagatcgccacctacagaagactgctggagggcgaggagcagagactgtgcgagggcatcggcgccgtgaacgtgtgcgtgagcagcagcagaggcggcgtggtgtgcggcgacctgtgcgtgagcggcagcagacccgtgaccggcagcgtgtgcagcgccccctgcaacggcaacgtggccgtgagcaccggcctgtgcgccccctgcggccaggtgggcagctgcggcagcagctgcagaaagtgctag

SEQ ID NO: 86105 - DNA, 1482 bp, synthetic construct
  misc_feature 1..1482: note = Description of Artificial Sequence: Synthetic coding sequence
  source 1..1482: mol_type = other DNA
atgacctgcggcttcaacagcatcggctgcggcttcagacccggcaacttcagctgcgtgagcgcctgcggccccagacccagcagatgctgcatcaccgccgccccctacagaggcatcagctgctacagaggcctgaccggcggcttcggcagccacagcgtgtgcggcggcttcagagccggcagctgcggcagaagcttcggctacagaagcggcggcgtgtgcggccccagccccccctgcatcaccaccgtgagcgtgaacgagagcctgctgacccccctgaacctggagatcgaccccaacgcccagtgcgtgaagcaggaggagaaggagcagatcaagagcctgaacagcagattcgccgccttcatcgacaaggtgagattcctggagcagcagaacaagctgctggagaccaagctgcagttctaccagaacagagagtgctgccagagcaacctggagcccctgttcgccggctacatcgagaccctgagaagagaggccgagtgcgtggaggccgacagcggcagactggccagcgagctgaaccacgtgcaggaggtgctggagggctacaagaagaagtacgaggaggaggtggccctgagagccaccgccgagaacgagttcgtggccctgaagaaggacgtggactgcgcctacctgagaaagagcgacctggaggccaacgtggaggccctgatccaggagatcgacttcctgagaagactgtacgaggaggagatcagaatcctgcagagccacatcagcgacaccagcgtggtggtgaagctggacaacagcagagacctgaacatggactgcatcgtggccgagatcaaggcccagtacgacgacatcgccaccagaagcagagccgaggccgagagctggtacagaagcaagtgcgaggagatgaaggccaccgtgatcagacacggcgagaccctgagaagaaccaaggaggagatcaacgagctgaacagaatgatccagagactgaccgccgaggtggagaacgccaagtgccagaacagcaagctggaggccgccgtggcccagagcgagcagcagggcgaggccgccctgagcgacgccagatgcaagctggccgagctggagggcgccctgcagaaggccaagcaggacatggcctgcctgatcagagagtaccaggaggtgatgaacagcaagctgggcctggacatcgagatcgccacctacagaagactgctggagggcgaggagcagagactgtgcgagggcgtggaggccgtgaacgtgtgcgtgagcagcagcagaggcggcgtggtgtgcggcgacctgtgcgtgagcggcagcagacccgtgaccggcagcgtgtgcagcgccccctgcaacggcaacctggtggtgagcaccggcctgtgcaagccctgcggccagctgaacaccacctgcggcggcggcagctgcggccagggcagacactag

SEQ ID NO: 86106 - DNA, 1524 bp, synthetic construct
  misc_feature 1..1524: note = Description of Artificial Sequence: Synthetic coding sequence
  source 1..1524: mol_type = other DNA
atgagctgcagaagctacagaatcagcagcggctgcggcgtgaccagaaacttcagcagctgcagcgccgtggcccccaagaccggcaacagatgctgcatcagcgccgccccctacagaggcgtgagctgctacagaggcctgaccggcttcggcagcagaagcctgtgcaacctgggcagctgcggccccagaatcgccgtgggcggcttcagagccggcagctgcggcagaagcttcggctacagaagcggcggcgtgtgcggccccagccccccctgcatcaccaccgtgagcgtgaacgagagcctgctgacccccctgaacctggagatcgaccccaacgcccagtgcgtgaagcaggaggagaaggagcagatcaagagcctgaacagcagattcgccgccttcatcgacaaggtgagattcctggagcagcagaacaagctgctggagaccaagtggcagttctaccagaaccagagatgctgcgagagcaacctggagcccctgttcagcggctacatcgagaccctgagaagagaggccgagtgcgtggaggccgacagcggcagactggccagcgagctgaaccacgtgcaggaggtgctggagggctacaagaagaagtacgaggaggaggtggccctgagagccaccgccgagaacgagttcgtggtgctgaagaaggacgtggactgcgcctacctgagaaagagcgacctggaggccaacgtggaggccctggtggaggagagcagcttcctgagaagactgtacgaggaggagatcagagtgctgcaggcccacatcagcgacaccagcgtgatcgtgaagatggacaacagcagagacctgaacatggactgcatcatcgccgagatcaaggcccagtacgacgacgtggccagcagaagcagagccgaggccgagagctggtacagaagcaagtgcgaggagatgaaggccaccgtgatcagacacggcgagaccctgagaagaaccaaggaggagatcaacgagctgaacagaatgatccagagactgaccgccgagatcgagaacgccaagtgccagagagccaagctggaggccgccgtggccgaggccgagcagcagggcgaggccgccctgagcgacgccagatgcaagctggccgagctggagggcgccctgcagaaggccaagcaggacatggcctgcctgctgaaggagtaccaggaggtgatgaacagcaagctgggcctggacatcgagatcgccacctacagaagactgctggagggcgaggagcacagactgtgcgagggcgtgggcagcgtgaacgtgtgcgtgagcagcagcagaggcggcgtgagctgcggcggcctgagctacagcaccacccccggcagacagatcaccagcggccccagcgccatcggcggcagcatcaccgtggtggcccccgacagctgcgccccctgccagcccagaagcagcagcttcagctgcggcagcagcagaagcgtgagattcgcctag

SEQ ID NO: 86107 - DNA, 888 bp, synthetic construct
  misc_feature 1..888: note = Description of Artificial Sequence: Synthetic coding sequence
  source 1..888: mol_type = other DNA
atggtgttcaaggtgcagttcctgagcagcagacccagcctgagccacacccaggacgtggactgcgcctacctgagaaagagcgacctggaggccaacgtggaggccctggtggaggagagcagcttcctgagaagactgtacgaggaggagatcagagtgctgcaggcccacatcagcgacaccagcgtgatcgtgaagatggacaacagcagagacctgaacatggactgcatcatcgccgagatcaaggcccagtacgacgacgtggccagcagaagcagagccgaggccgagagctggtacagaagcaagtgcgaggagatgaaggccaccgtgatcagacacggcgagaccctgagaagaaccaaggaggagatcaacgagctgaacagaatgatccagagactgaccgccgagatcgagaacgccaagtgccagagagccaagctggaggccgccgtggccgaggccgagcagcagggcgaggccgccctgagcgacgccagatgcaagctggccgagctggagggcgccctgcagaaggccaagcaggacatggcctgcctgctgaaggagtaccaggaggtgatgaacagcaagctgggcctggacatcgagatcgccacctacagaagactgctggagggcgaggagcacagactgtgcgagggcgtgggcagcgtgaacgtgtgcgtgagcagcagcagaggcggcgtgagctgcggcggcctgagctacagcaccacccccggcagacagatcaccagcggccccagcgccatcggcggcagcatcaccgtggtggcccccgacagctgcgccccctgccagcccagaagcagcagcttcagctgcggcagcagcagaagcgtgagattcgcctag

SEQ ID NO: 86108 - DNA, 1461 bp, synthetic construct
  misc_feature 1..1461: note = Description of Artificial Sequence: Synthetic coding sequence
  source 1..1461: mol_type = other DNA
atgacctgcggcagctactgcggcggcagagccttcagctgcatcagcgcctgcggccccagacccggcagatgctgcatcaccgccgccccctacagaggcatcagctgctacagaggcctgaccggcggcttcggcagccacagcgtgtgcggcggcttcagagccggcagctgcggcagaagcttcggctacagaagcggcggcgtgtgcggccccagccccccctgcatcaccaccgtgagcgtgaacgagagcctgctgacccccctgaacctggagatcgaccccaacgcccagtgcgtgaagcaggaggagaaggagcagatcaagagcctgaacagcagattcgccgccttcatcgacaaggtgagattcctggagcagcagaacaagctgctggagaccaagctgcagttctaccagaacagagagtgctgccagagcaacctggagcccctgttcgagggctacatcgagaccctgagaagagaggccgagtgcgtggaggccgacagcggcagactggccagcgagctgaaccacgtgcaggaggtgctggagggctacaagaagaagtacgaggaggaggtgagcctgagagccaccgccgagaacgagttcgtggccctgaagaaggacgtggactgcgcctacctgagaaagagcgacctggaggccaacgtggaggccctgatccaggagatcgacttcctgagaagactgtacgaggaggagatcagagtgctgcagagccacatcagcgacaccagcgtggtggtgaagctggacaacagcagagacctgaacatggactgcatcatcgccgagatcaaggcccagtacgacgacatcgtgaccagaagcagagccgaggccgagagctggtacagaagcaagtgcgaggagatgaaggccaccgtgatcagacacggcgagaccctgagaagaaccaaggaggagatcaacgagctgaacagaatgatccagagactgaccgccgaggtggagaacgccaagtgccagaacagcaagctggaggccgccgtggcccagagcgagcagcagggcgaggccgccctgagcgacgccagatgcaagctggccgagctggagggcgccctgcagaaggccaagcaggacatggcctgcctgatcagagagtaccaggaggtgatgaacagcaagctgggcctggacatcgagatcgccacctacagaagactgctggagggcgaggagcagagactgtgcgagggcgtgggcagcgtgaacgtgtgcgtgagcagcagcagaggcggcgtggtgtgcggcgacctgtgcgccagcaccaccgcccccgtggtgagcaccagagtgagcagcgtgcccagcaacagcaacgtggtggtgggcaccaccaacgcctgcgcccccagcgccagagtgggcgtgtgcggcggcagctgcaagagatgctag

SEQ ID NO: 86109 - DNA, 1872 bp, synthetic construct
  misc_feature 1..1872: note = Description of Artificial Sequence: Synthetic coding sequence
  source 1..1872: mol_type = other DNA
atgagctgcagacagttcagcagcagctacctgagcagaagcggcggcggcggcggcggcggcctgggcagcggcggcagcatcagaagcagctacagcagattcagcagcagcggcggcggcggcggcggcggcagattcagcagcagcagcggctacggcggcggcagcagcagagtgtgcggcagaggcggcggcggcagcttcggctacagctacggcggcggcagcggcggcggcttcagcgccagcagcctgggcggcggcttcggcggcggcagcagaggcttcggcggcgccagcggcggcggctacagcagcagcggcggcttcggcggcggcttcggcggcggcagcggcggcggcttcggcggcggctacggcagcggcttcggcggcttcggcggcttcggcggcggcgccggcggcggcgacggcggcatcctgaccgccaacgagaagagcaccatgcaggagctgaacagcagactggccagctacctggacaaggtgcaggccctggaggaggccaacaacgacctggagaacaagatccaggactggtacgacaagaagggccccgccgccatccagaagaactacagcccctactacaacaccatcgacgacctgaaggaccagatcgtggacctgaccgtgggcaacaacaagaccctgctggacatcgacaacaccagaatgaccctggacgacttcagaatcaagttcgagatggagcagaacctgagacagggcgtggacgccgacatcaacggcctgagacaggtgctggacaacctgaccatggagaagagcgacctggagatgcagtacgagaccctgcaggaggagctgatggccctgaagaagaaccacaaggaggagatgagccagctgaccggccagaacagcggcgacgtgaacgtggagatcaacgtggcccccggcaaggacctgaccaagaccctgaacgacatgagacaggagtacgagcagctgatcgccaagaacagaaaggacatcgagaaccagtacgagacccagatcacccagatcgagcacgaggtgagcagcagcggccaggaggtgcagagcagcgccaaggaggtgacccagctgagacacggcgtgcaggagctggagatcgagctgcagagccagctgagcaagaaggccgccctggagaagagcctggaggacaccaagaacagatactgcggccagctgcagatgatccaggagcagatcagcaacctggaggcccagatcaccgacgtgagacaggagatcgagtgccagaaccaggagtacagcctgctgctgagcatcaagatgagactggagaaggagatcgagacctaccacaacctgctggagggcggccaggaggacttcgagagcagcggcgccggcaagatcggcctgggcggcagaggcggcagcggcggcagctacggcagaggcagcagaggcggcagcggcggcagctacggcggcggcggcagcggcggcggctacggcggcggcagcggcagcagaggcggcagcggcggcagctacggcggcggcagcggcagcggcggcggcagcggcggcggctacggcggcggcagcggcggcggccacagcggcggcagcggcggcggccacagcggcggcagcggcggcaactacggcggcggcagcggcagcggcggcggcagcggcggcggctacggcggcggcagcggcagcagaggcggcagcggcggcagccacggcggcggcagcggcttcggcggcgagagcggcggcagctacggcggcggcgaggaggccagcggcagcggcggcggctacggcggcggcagcggcaagagcagccacagctag

SEQ ID NO: 86110 - DNA, 534 bp, synthetic construct
  misc_feature 1..534: note = Description of Artificial Sequence: Synthetic coding sequence
  source 1..534: mol_type = other DNA
atggcctgctgccagaccagcttctgcggcttccccagctgcagcaccagcggcacctgcggcagcagctgctgccagcccagctgctgcgagaccagcagctgccagcccagatgctgcgagaccagctgctgccagcccagctgctgccagaccagcttctgcggcttccccagcttcagcaccggcggcacctgcgacagcagctgctgccagcccagctgctgcgagaccagctgctgccagcccagctgctaccagaccagcagctgcggcaccggctgcggcatcggcggcggcatcggctacggccaggagggcagcagcggcgccgtgagcaccagaatcagatggtgcagacccgactgcagagtggagggcacctgcctgcccccctgctgcgtggtgagctgcaccccccccagctgctgccagctgcaccacgccgaggccagctgctgcagacccagctactgcggccagagctgctgcagacccgtgtgctgctgctactgcagcgagcccacctgctag

SEQ ID NO: 86111 - DNA, 504 bp, synthetic construct
  misc_feature 1..504: note = Description of Artificial Sequence: Synthetic coding sequence
  source 1..504: mol_type = other DNA
atggcctgctgccagaccagcttctgcggcttccccagctgcagcaccagcggcacctgcggcagcagctgctgccagcccagatgctgcgagaccagctgctgccagcccagctgctgccagaccagcttctgcggcttccccagcttcagcaccggcggcacctgcgacagcagctgctgccagcccagctgctgcgagaccagctgctgccagcccagctgctaccagaccagcagctgcggcaccggctgcggcatcggcggcggcatcggctacggccaggagggcagcagcggcgccgtgagcaccagaatcagatggtgcagacccgactgcagagtggagggcacctgcctgcccccctgctgcgtggtgagctgcaccccccccagctgctgccagctgcaccacgccgaggccagctgctgcagacccagctactgcggccagagctgctgcagacccgtgtgctgctgctactgcagcgagcccacctgctag

SEQ ID NO: 86112 - DNA, 492 bp, synthetic construct
  misc_feature 1..492: note = Description of Artificial Sequence: Synthetic coding sequence
  source 1..492: mol_type = other DNA
atgagcttcaactgcagcaccagaaactgcagcagcagacccatcggcggcagatgcatcgtgcccgtggcccaggtgaccaccaccagcaccaccgacgccgactgcctgggcggcatctgcctgcccagcagcttccagaccggcagctggctgctggaccactgccaggagacctgctgcgagcccaccgcctgccagcccacctgctacagaagaaccagctgcgtgagcaacccctgccaggtgacctgcagcagacagaccacctgcatcagcaacccctgcagcaccacctacagcagacccctgaccttcgtgagcagcggctgccagcccctgggcggcatcagcagcgtgtgccagcccgtgggcggcatcagcaccgtgtgccagcccgtgggcggcgtgagcaccgtgtgccagcccgcctgcggcgtgagcagaacctaccagcagagctgcgtgagcagctgcagaagaacctgctag

SEQ ID NO: 86113 - DNA, 504 bp, synthetic construct
  misc_feature 1..504: note = Description of Artificial Sequence: Synthetic coding sequence
  source 1..504: mol_type = other DNA
atgacctgctgccagaccagcttctgcggctaccccagctgcagcaccagcggcacctgcggcagcagctgctgccagcccagctgctgcgagaccagctgctgccagcccagctgctgccagaccagcttctgcggcttccccagcttcagcaccagcggcacctgcagcagcagctgctgccagcccagctgctgcgagaccagctgctgccagcccagctgctgccagaccagcagctgcggcaccggctgcggcatcggcggcggcatcggctacggccaggagggcagcagcggcgccgtgagcaccagaatcagatggtgcagacccgactgcagagtggagggcacctgcctgcccccctgctgcgtggtgagctgcaccccccccacctgctgccagctgcaccacgccgaggccagctgctgcagacccagctactgcggccagagctgctgcagacccgtgtgctgctgctacagctgcgagcccacctgctag

SEQ ID NO: 86114 - DNA, 366 bp, synthetic construct
  misc_feature 1..366: note = Description of Artificial Sequence: Synthetic coding sequence
  source 1..366: mol_type = other DNA
atggccagctgcagcaccagcggcacctgcggcagcagctgctgccagcccagctgctgcgagaccagctgctgccagcccagctgctgccagaccagcagctgcggcaccggctgcggcatcggcggcggcatcggctacggccaggagggcagcggcggcagcgtgagcaccagaatcagatggtgccaccccgactgccacgtggagggcacctgcctgcccccctgctacctggtgagctgcaccccccccagctgctgccagctgcaccacgccgaggccagctgctgcagacccagctactgcggccagagctgctgcagacccgcctgctgctgccactgctgcgagcccacctgctag

SEQ ID NO: 86115 - DNA, 837 bp, synthetic construct
  misc_feature 1..837: note = Description of Artificial Sequence: Synthetic coding sequence
  source 1..837: mol_type = other DNA
atgggctgctgcggctgcagcggcggctgcggcagcagctgcggcggctgcggcagcggctgcggcggctgcggcagcggctgcggcggctgcggcagcggctgcggcggcagcggcagcagctgctgcgtgcccgtgtgctgctgcaagcccgtgtgctgcagagtgcccacctgcagctgcagcagctgcggcaagggcggctgcggcagcagcggcggcagcaagggcggctgcggcagctgcggcggctgcaagggcggctgcggcagctgcggcggcagcaagggcggctgcggcagctgcggcggcagcaagggcggctgcggcagctgcggcggcagcaagggcggctgcggcagcggctgcggcggctgcggcagcagctgctgcgtgcccgtgtgctgctgcaagcccatgtgctgctgcgtgcccgcctgcagctgcagcagctgcggcaagggcggctgcggcagctgcggctgcagcaagggcgcctgcggcagctgcggcggcagcaagggcggctgcggcagctgcggcggctgcaagggcggctgcggcagctgcggcggcagcaagggcggctgcggcagcggctgcggcggctgcggcagcggctgcggcgtgcccgtgtgctgctgcagctgcagcagctgcggcagctgcgccggcagcaagggcggctgcggcagcagctgcagccagtgcagctgctgcaagccctgctgctgcagcagcggctgcggcagcagctgctgccagagcagctgctgcaagccctgctgcagccagagcagctgctgcgtgcccgtgtgctgccagtgcaagatctag

SEQ ID NO: 86116 - DNA, 510 bp, synthetic construct
  misc_feature 1..510: note = Description of Artificial Sequence: Synthetic coding sequence
  source 1..510: mol_type = other DNA
atgggctgctgcggctgcagcggcggctgcggcagcagctgcggcggctgcgacagcagctgcggcagctgcggcagcggctgcagaggctgcggccccagctgctgcgcccccgtgtactgctgcaagcccgtgtgctgctgcgtgcccgcctgcagctgcagcagctgcggcaagagaggctgcggcagctgcggcggcagcaagggcggctgcggcagctgcggctgcagccagtgcagctgctgcaagccctgctgctgcagcagcggctgcggcagcagctgctgccagtgcagctgctgcaagccctactgcagccagtgcagctgctgcaagccctgctgcagcagcagcggcagaggcagcagctgctgccagagcagctgctgcaagccctgctgcagcagcagcggctgcggcagcagctgctgccagagcagctgctgcaagccctgctgcagccagagcagatgctgcgtgcccgtgtgctaccagtgcaagatctag

SEQ ID NO: 86117 - DNA, 1740 bp, synthetic construct
  misc_feature 1..1740: note = Description of Artificial Sequence: Synthetic coding sequence
  source 1..1740: mol_type = other DNA
atgtgcgaccagcagcagatccagtgcagactgcccctgcagcagtgctgcgtgaagggccccagcttctgcagcagccagagccccttcgcccagagccaggtggtggtgcaggccccctgcgagatgcagatcgtggactgccccgccagctgccccgtgcaggtgtgccaggtgagcgaccaggccccctgccagagccagaccacccaggtgaagtgccagagcaagaccaagcaggtgaagggccaggcccagtgccagagcaagaccacccaggtgaagggccaggccgccagccagagccagaccagcagcgtgcagagccaggccccctgccagagcgaggtgagctacgtgcagtgcgaggccagccagcccgtgcagacctgcttcgtggagtgcgcccccgtgtgctacaccgagacctgctacgtggagtgccccgtgcagaactacgtgccctgccccgccccccagcccgtgcagatgtacagaggcagacccgccgtgtgccagccccagggcagattcagcacccagtgccagtaccagggcagctacagcagctgcggcccccagttccagagcagagccacctgcaacaactacaccccccagttccagctgagacccagctacagcagctgcttcccccagtacagaagcagaaccagcttcagcccctgcgtgccccagtgccagacccagggcagctacggcagcttcaccgagcagcacagaagcagaagcaccagcagatgcctgcccccccccagaagactgcagctgttccccagaagctgcagcccccccagaagattcgagccctgcagcagcagctacctgcccctgagacccagcgagggcttccccaactactgcaccccccccagaagaagcgagcccatctacaacagcagatgccccagaagacccatcagcagctgcagccagagaagaggccccaagtgcagaatcgagatcagcagcccctgctgccccagacaggtgcccccccagagatgccccgtggagatcccccccatcagaagaagaagccagagctgcggcccccagcccagctggggcgccagctgccccgagctgagaccccacgtggagcccagacccctgcccagcttctgcccccccagaagactggaccagtgccccgagagccccctgcagagatgccccccccccgcccccagacccagactgagacccgagccctgcatcagcctggagcccagacccagacccctgcccagacagctgagcgagccctgcctgtaccccgagcccctgcccgccctgagacccacccccagacccgtgcccctgcccagacccggccagtgcgagatccccgagcccagaccctgcctgcagccctgcgagcaccccgagccctgccccagacccgagcccatccccctgcccgccccctgccccagccccgagccctgcagagagacctggagaagccccagcccctgctggggccccaaccccgtgccctaccccggcgacctgggctgccacgagagcagcccccacagactggacaccgaggccccctactgcggccccagcagctacaaccagggccaggagagcggcgccggctgcggccccggcgacgtgttccccgagagaagaggccaggacggccacggcgaccagggcaacgccttcgccggcgtgaagggcgaggccaagagcgcctacttctag

SEQ ID NO: 86118 - DNA, 1059 bp, synthetic construct
  misc_feature 1..1059: note = Description of Artificial Sequence: Synthetic coding sequence
  source 1..1059: mol_type = other DNA
atggccggcaccatctgcttcatcatgtgggtgctgttcatcaccgacaccgtgtggagcagaagcgtgagacaggtgtacgaggtgcacgacagcgacgactggaccatccacgacttcgagtgccccatggagtgcttctgcccccccagcttccccaccgccctgtactgcgagaacagaggcctgaaggagatccccgccatccccagcagaatctggtacctgtacctgcagaacaacctgatcgagaccatccccgagaagcccttcgagaacgccacccagctgagatggatcaacctgaacaagaacaagatcaccaactacggcatcgagaagggcgccctgagccagctgaagaagctgctgttcctgttcctggaggacaacgagctggaggaggtgcccagccccctgcccagaagcctggagcagctgcagctggccagaaacaaggtgagcagaatcccccagggcaccttcagcaacctggagaacctgaccctgctggacctgcagaacaacaagctggtggacaacgccttccagagagacaccttcaagggcctgaagaacctgatgcagctgaacatggccaagaacgccctgagaaacatgccccccagactgcccgccaacaccatgcagctgttcctggacaacaacagcatcgagggcatccccgagaactacttcaacgtgatccccaaggtggccttcctgagactgaaccacaacaagctgagcgacgagggcctgcccagcagaggcttcgacgtgagcagcatcctggacctgcagctgagccacaaccagctgaccaaggtgcccagaatcagcgcccacctgcagcacctgcacctggaccacaacaagatcaagagcgtgaacgtgagcgtgatctgccccagccccagcatgctgcccgccgagagagacagcttcagctacggcccccacctgagatacctgagactggacggcaacgagatcaagccccccatccccatggccctgatgacctgcttcagactgctgcaggccgtgatcatctag

SEQ ID NO: 86119 - DNA, 897 bp, synthetic construct
  misc_feature 1..897: note = Description of Artificial Sequence: Synthetic coding sequence
  source 1..897: mol_type = other DNA
atggaggagaagcagatcctgtgcgtgggcctggtggtgctggacgtgatcagcctggtggacaagtaccccaaggaggacagcgagatcagatgcctgagccagagatggcagagaggcggcaacgccagcaacagctgcaccgtgctgagcctgctgggcgccccctgcgccttcatgggcagcatggcccccggccacgtggccgacttcctggtggccgacttcagaagaagaggcgtggacgtgagccaggtggcctggcagagcaagggcgacacccccagcagctgctgcatcatcaacaacagcaacggcaacagaaccatcgtgctgcacgacaccagcctgcccgacgtgagcgccaccgacttcgagaaggtggacctgacccagttcaagtggatccacatcgagggcagaaacgccagcgagcaggtgaagatgctgcagagaatcgacgcccacaacaccagacagccccccgagcagaagatcagagtgagcgtggaggtggagaagcccagagaggagctgttccagctgttcggctacggcgacgtggtgttcgtgagcaaggacgtggccaagcacctgggcttccagagcgccgaggaggccctgagaggcctgtacggcagagtgagaaagggcgccgtgctggtgtgcgcctgggccgaggagggcgccgacgccctgggccccgacggcaagctgctgcacagcgacgccttccccccccccagagtggtggacaccctgggcgccggcgacaccttcaacgccagcgtgatcttcagcctgagccagggcagaagcgtgcaggaggccctgagattcggctgccaggtggccggcaagaagtgcggcctgcagggcttcgacggcatcgtgtag

SEQ ID NO: 86120 - DNA, 897 bp, synthetic construct
  misc_feature 1..897: note = Description of Artificial Sequence: Synthetic coding sequence
  source 1..897: mol_type = other DNA
atggaggagaagcagatcctgtgcgtgggcctggtggtgctggacgtgatcagcctggtggacaagtaccccaaggaggacagcgagatcagatgcctgagccagagatggcagagaggcggcaacgccagcaacagctgcaccgtgctgagcctgctgggcgccccctgcgccttcatgggcagcatggcccccggccacgtggccgacttcgtgctggacgacctgagaagatacagcgtggacctgagatacaccgtgttccagaccaccggcagcgtgcccatcgccaccgtgatcatcaacgaggccagcggcagcagaaccatcctgtactacgacagaagcctgcccgacgtgagcgccaccgacttcgagaaggtggacctgacccagttcaagtggatccacatcgagggcagaaacgccagcgagcaggtgaagatgctgcagagaatcgacgcccacaacaccagacagccccccgagcagaagatcagagtgagcgtggaggtggagaagcccagagaggagctgttccagctgttcggctacggcgacgtggtgttcgtgagcaaggacgtggccaagcacctgggcttccagagcgccgaggaggccctgagaggcctgtacggcagagtgagaaagggcgccgtgctggtgtgcgcctgggccgaggagggcgccgacgccctgggccccgacggcaagctgctgcacagcgacgccttccccccccccagagtggtggacaccctgggcgccggcgacaccttcaacgccagcgtgatcttcagcctgagccagggcagaagcgtgcaggaggccctgagattcggctgccaggtggccggcaagaagtgcggcctgcagggcttcgacggcatcgtgtag

SEQ ID NO: 86121 - DNA, 1041 bp, synthetic construct
  misc_feature 1..1041: note = Description of Artificial Sequence: Synthetic coding sequence
  source 1..1041: mol_type = other DNA
atggaggagaagtacctgcccgagctgatggccgagaaggacagcctggaccccagcttcacccacgccctgagactggtgaaccaggagatcgagaagttccagaagggcgagggcaaggacgaggagaagtacatcgacgtggtgatcaacaagaacatgaagctgggccagaaggtgctgatccccgtgaagcagttccccaagttcaacttcgtgggcaagctgctgggccccagaggcaacagcctgaagagactgcaggaggagaccctgaccaagatgagcatcctgggcaagggcagcatgagagacaaggccaaggaggaggagctgagaaagagcggcgaggccaagtacttccacctgaacgacgacctgcacgtgctgatcgaggtgttcgccccccccgccgaggcctacgccagaatgggccacgccctggaggagatcaagaagttcctgatccccgactacaacgacgagatcagacaggcccagctgcaggagctgacctacctgaacggcggcagcgagaacgccgacgtgcccgtggtgagaggcaagcccaccctgagaaccagaggcgtgcccgcccccgccatcaccagaggcagaggcggcgtgaccgccagacccgtgggcgtggtggtgcccagaggcacccccacccccagaggcgtgctgagcaccagaggccccgtgagcagaggcagaggcctgctgacccccagagccagaggcgtgccccccaccggctacagaccccccccccccccccccacccaggagacctacggcgagtacgactacgacgacggctacggcaccgcctacgacgagcagagctacgacagctacgacaacagctacagcacccccgcccagagcggcgccgactactacgactacggccacggcctgagcgaggagacctacgacagctacggccaggaggagtggaccaacagcagacacaaggcccccagcgccagaaccgccaagggcgtgtacagagaccagccctacggcagatactag

SEQ ID NO: 86122 - DNA, 495 bp, synthetic construct
  misc_feature 1..495: note = Description of Artificial Sequence: Synthetic coding sequence
  source 1..495: mol_type = other DNA
atggacatgggcaccagcgccctgagcaagaagccctggtggaccctgccccagaacttccacgcccccatggtgttccacatggaggaggaccaggaggagctgatcttcggccacggcgacacctacctgagatgcatcgaggtgcacagccacaccctgatccagctggagagctggttcaccgccaccggccagaccagagtgaccgtggtgggcccccacagagccagacagtggctgctgcacatgttctgctgcgtgggcagccaggacagctaccaccacgccagaggcctggagatgctggagagagtgagaagccagcccctgaccaacgacgacctggtgaccagcatcagcgtgcccccctacaccggcgacctgagcctggcccccagaatcagcggcaccgtgtgcctgagcgtgccccagcccagcccctaccaggtgatcggctgcagcggcttccacctgagcagcctgtacccctag

SEQ ID NO: 86123 - DNA, 714 bp, synthetic construct
  misc_feature 1..714: note = Description of Artificial Sequence: Synthetic coding sequence
  source 1..714: mol_type = other DNA
atgctgagcgccttccagagactgttcagagtgctgttcgtgatcgagaccgtgagcgagtacggcgtgctgatcttcatctacggctggcccttcctgcagaccctggccatgctgctgatcggcaccgtgagcttccacctgtggatcagaagaaacagagagagaaacagcagaagcggcaagaccagatgcagaagcaagagaagcgagcagagcatggacatgggcaccagcgccctgagcaagaagccctggtggaccctgccccagaacttccacgcccccatggtgttccacatggaggaggaccaggaggagctgatcttcggccacggcgacacctacctgagatgcatcgaggtgcacagccacaccctgatccagctggagagctggttcaccgccaccggccagaccagagtgaccgtggtgggcccccacagagccagacagtggctgctgcacatgttctgctgcgtgggcagccaggacagctaccaccacgccagaggcctggagatgctggagagagtgagaagccagcccctgaccaacgacgacctggtgaccagcatcagcgtgcccccctacaccggcgacctgagcctggcccccagaatcagcggcaccgtgtgcctgagcgtgccccagcccagcccctaccaggtgatcggctgcagcggcttccacctgagcagcctgtacccctag

SEQ ID NO: 86124 - DNA, 297 bp, synthetic construct
  misc_feature 1..297: note = Description of Artificial Sequence: Synthetic coding sequence
  source 1..297: mol_type = other DNA
atggacatgggcaccagcgccctgagcaagaagccctggtggaccctgccccagaacttccacgcccccatggtgttccacatggaggaggaccaggaggagctgatcttcggccacggcgacacctacctgagatgcatcgaggtgcacagccacaccctgatccagctggagagctggttcaccgccaccggccagaccagagtgaccgtggtgggcccccacagagccagacagtggctgctgcacatgttctgctgcgtgggcagccaggacagctaccaccacgccagatag

SEQ ID NO: 86125 - DNA, 2133 bp, synthetic construct
  misc_feature 1..2133: note = Description of Artificial Sequence: Synthetic coding sequence
  source 1..2133: mol_type = other DNA
atgagcgactacagcaccggcggccccccccccggcccccccccccccgccggcggcggcggcggcgccggcggcgccggcggcggccccccccccggcccccccggcgccggcgacagaggcggcggcggccccggcggcggcggccccggcggcggcagcgccggcggccccagccagccccccggcggcggcggccccggcatcagaaaggacgccttcgccgacgccgtgcagagagccagacagatcgccgccaagatcggcggcgacgccgccaccaccgtgaacaacagcacccccgacttcggcttcggcggccagaagagacagctggaggacggcgaccagcccgagagcaagaagctggccagccagggcgacagcatcagcagccagctgggccccatccaccccccccccagaaccagcatgaccgaggagtacagagtgcccgacggcatggtgggcctgatcatcggcagaggcggcgagcagatcaacaagatccagcaggacagcggctgcaaggtgcagatcagccccgacagcggcggcctgcccgagagaagcgtgagcctgaccggcgcccccgagagcgtgcagaaggccaagatgatgctggacgacatcgtgagcagaggcagaggcggcccccccggccagttccacgacaacgccaacggcggccagaacggcaccgtgcaggagatcatgatccccgccggcaaggccggcctggtgatcggcaagggcggcgagaccatcaagcagctgcaggagagagccggcgtgaagatgatcctgatccaggacggcagccagaacaccaacgtggacaagcccctgagaatcatcggcgacccctacaaggtgcagcaggcctgcgagatggtgatggacatcctgagagagagagaccagggcggcttcggcgacagaaacgagtacggcagcagaatcggcggcggcatcgacgtgcccgtgcccagacacagcgtgggcgtggtgatcggcagaagcggcgagatgatcaagaagatccagaacgacgccggcgtgagaatccagttcaagcaggacgacggcaccggccccgagaagatcgcccacatcatgggcccccccgacagatgcgagcacgccgccagaatcatcaacgacctgctgcagagcctgagaagcggcccccccggcccccccggcggccccggcatgccccccggcggcagaggcagaggcagaggccagggcaactggggcccccccggcggcgagatgaccttcagcatccccacccacaagtgcggcctggtgatcggcagaggcggcgagaacgtgaaggccatcaaccagcagaccggcgccttcgtggagatcagcagacagctgccccccaacggcgaccccaacttcaagctgttcatcatcagaggcagcccccagcagatcgaccacgccaagcagctgatcgaggagaagatcgagggccccctgtgccccgtgggccccggccccggcggccccggccccgccggccccatgggccccttcaaccccggccccttcaaccagggcccccccggcgcccccccccacgccggcggcccccccccccaccagtaccccccccagggctggggcaacacctacccccagtggcagccccccgccccccacgaccccagcaaggccgccgccgccgccgccgaccccaacgccgcctgggccgcctactacagccactactaccagcagccccccggccccgtgcccggccccgcccccgcccccgccgccccccccgcccagggcgagcccccccagcccccccccaccggccagagcgactacaccaaggcctgggaggagtactacaagaagatcggccagcagccccagcagcccggcgcccccccccagcaggactacaccaaggcctgggaggagtactacaagaagcaggcccaggtggccaccggcggcggccccggcgccccccccggcttcctggccccccccaccgtgttccagcccctgctgagcagcgccctggcccagctgcccagacccagacccagccccctgcccggcctggtgtgctgcctgttcatctgcagcagaggcgactag

SEQ ID NO: 86126 - DNA, 2136 bp, synthetic construct
  misc_feature 1..2136: note = Description of Artificial Sequence: Synthetic coding sequence
  source 1..2136: mol_type = other DNA
atgagcgactacagcaccggcggccccccccccggcccccccccccccgccggcggcggcggcggcgccggcggcgccggcggcggccccccccccggcccccccggcgccggcgacagaggcggcggcggccccggcggcggcggccccggcggcggcagcgccggcggccccagccagccccccggcggcggcggccccggcatcagaaaggacgccttcgccgacgccgtgcagagagccagacagatcgccgccaagatcggcggcgacgccgccaccaccgtgaacaacagcacccccgacttcggcttcggcggccagaagagacagctggaggacggcgaccagcccgagagcaagaagctggccagccagggcgacagcatcagcagccagctgggccccatccaccccccccccagaaccagcatgaccgaggagtacagagtgcccgacggcatggtgggcctgatcatcggcagaggcggcgagcagatcaacaagatccagcaggacagcggctgcaaggtgcagatcagccccgacagcggcggcctgcccgagagaagcgtgagcctgaccggcgcccccgagagcgtgcagaaggccaagatgatgctggacgacatcgtgagcagaggcagaggcggcccccccggccagttccacgacaacgccaacggcggccagaacggcaccgtgcaggagatcatgatccccgccggcaaggccggcctggtgatcggcaagggcggcgagaccatcaagcagctgcaggagagagccggcgtgaagatgatcctgatccaggacggcagccagaacaccaacgtggacaagcccctgagaatcatcggcgacccctacaaggtgcagcaggcctgcgagatggtgatggacatcctgagagagagagaccagggcggcttcggcgacagaaacgagtacggcagcagaatcggcggcggcatcgacgtgcccgtgcccagacacagcgtgggcgtggtgatcggcagaagcggcgagatgatcaagaagatccagaacgacgccggcgtgagaatccagttcaagcaggacgacggcaccggccccgagaagatcgcccacatcatgggcccccccgacagatgcgagcacgccgccagaatcatcaacgacctgctgcagagcctgagaagcggcccccccggcccccccggcggccccggcatgccccccggcggcagaggcagaggcagaggccagggcaactggggcccccccggcggcgagatgaccttcagcatccccacccacaagtgcggcctggtgatcggcagaggcggcgagaacgtgaaggccatcaaccagcagaccggcgccttcgtggagatcagcagacagctgccccccaacggcgaccccaacttcaagctgttcatcatcagaggcagcccccagcagatcgaccacgccaagcagctgatcgaggagaagatcgagggccccctgtgccccgtgggccccggccccggcggccccggccccgccggccccatgggccccttcaaccccggccccttcaaccagggcccccccggcgcccccccccacgccggcggcccccccccccaccagtaccccccccagggctggggcaacacctacccccagtggcagccccccgccccccacgaccccagcaaggccgccgccgccgccgccgaccccaacgccgcctgggccgcctactacagccactactaccagcagccccccggccccgtgcccggccccgcccccgcccccgccgccccccccgcccagggcgagcccccccagcccccccccaccggccagagcgactacaccaaggcctgggaggagtactacaagaagatcggccagcagccccagcagcccggcgcccccccccagcaggactacaccaaggcctgggaggagtactacaagaagcaggcccaggtggccaccggcggcggccccggcgccccccccggcagccagcccgactacagcgccgcctgggccgagtactacagacagcaggccgcctactacggccagacccccggccccggcggcccccagcccccccccacccagcagggccagcagcaggcccagtag

SEQ ID NO: 86127 - DNA, 1095 bp, synthetic construct
  misc_feature 1..1095: note = Description of Artificial Sequence: Synthetic coding sequence
  source 1..1095: mol_type = other DNA
atgagcgactacagccccggcggcggcagcgccggcggccccagccagccccccggcggcggcggccccggcatcagaaaggacgccttcgccgacgccgtgcagagagccagacagatcgccgccaagatcggcggcgacgccgccaccaccgtgaacaacagcacccccgacttcggcttcggcggccagaagagacagctggaggacggcgaccagcccgagagcaagaagctggccagccagggcgacagcatcagcagccagctgggccccatccaccccccccccagaaccagcatgaccgaggagtacagagtgcccgacggcatggtgggcctgatcatcggcagaggcggcgagcagatcaacaagatccagcaggacagcggctgcaaggtgcagatcagccccgacagcggcggcctgcccgagagaagcgtgagcctgaccggcgcccccgagagcgtgcagaaggccaagatgatgctggacgacatcgtgagcagaggcagaggcggcccccccggccagttccacgacaacgccaacggcggccagaacggcaccgtgcaggagatcatgatccccgccggcaaggccggcctggtgatcggcaagggcggcgagaccatcaagcagctgcaggagagagccggcgtgaagatgatcctgatccaggacggcagccagaacaccaacgtggacaagcccctgagaatcatcggcgacccctacaaggtgcagcaggcctgcgagatggtgatggacatcctgagagagagagaccagggcggcttcggcgacagaaacgagtacggcagcagaatcggcggcggcatcgacgtgcccgtgcccagacacagcgtgggcgtggtgatcggcagaagcggcgagatgatcaagaagatccagaacgacgccggcgtgagaatccagttcaagcaggacgacggcaccggccccgagaagatcgcccacatcatgggcccccccgacagatgcgagcacgccgccagaatcatcaacgaccccagcagcagcagcttcctgctgcccacccccggccacagacccagctgcctgagcggctag

SEQ ID NO: 86128 - DNA, 255 bp, synthetic construct
  misc_feature 1..255: note = Description of Artificial Sequence: Synthetic coding sequence
  source 1..255: mol_type = other DNA
atggacgacgacgccgcccccagagtggagggcgtgcccgtggccgtgcacaagcacgccctgcacgacggcctgagacaggtggccggccccggcgccgccgccgcccacctgcccagatggccccccccccagctggccgccagcagaagagaggccccccccctgagccagagaccccacagaacccagggcgccggcagcccccccgagaccaacgagaagctgaccaacccccaggtgaaggagaagtag

SEQ ID NO: 86129 - DNA, 822 bp, synthetic construct
  misc_feature 1..822: note = Description of Artificial Sequence: Synthetic coding sequence
  source 1..822: mol_type = other DNA
atgagcatgagccccaccgtgatcatcctggcctgcctgggcttcttcctggaccagagcgtgtgggcccacgtgggcggccaggacaagcccttctgcagcgcctggcccagcgccgtggtgccccagggcggccacgtgaccctgagatgccactacagaagaggcttcaacatcttcaccctgtacaagaaggacggcgtgcccgtgcccgagctgtacaacagaatcttctggaacagcttcctgatcagccccgtgacccccgcccacgccggcacctacagatgcagaggcttccacccccacagccccaccgagtggagcgcccccagcaaccccctggtgatcatggtgaccggcctgtacgagaagcccagcctgaccgccagacccggccccaccgtgagagccggcgagaacgtgaccctgagctgcagcagccagagcagcttcgacatctaccacctgagcagagagggcgaggcccacgagctgagactgcccgccgtgcccagcatcaacggcaccttccaggccgacttccccctgggccccgccacccacggcgagacctacagatgcttcggcagcttccacggcagcccctacgagtggagcgaccccagcgaccccctgcccgtgagcgtgaccggcaaccccagcagcagctggcccagccccaccgagcccagcttcaagaccggcatcgccagacacctgcacgccgtgatcagatacagcgtggccatcatcctgttcaccatcctgcccttcttcctgctgcacagatggtgcagcaagaagaagatgctgctgtag

SEQ ID NO: 86130 - DNA, 1269 bp, synthetic construct
  misc_feature 1..1269: note = Description of Artificial Sequence: Synthetic coding sequence
  source 1..1269: mol_type = other DNA
atgggcggccaggacaagcccttcctgagcgcctggcccagcgccgtggtgcccagaggcggccacgtgaccctgagatgccactacagacacagattcaacaacttcatgctgtacaaggaggacagaatccacatccccatcttccacggcagaatcttccaggagagcttcaacatgagccccgtgaccaccgcccacgccggcaactacacctgcagaggcagccacccccacagccccaccggctggagcgcccccagcaaccccgtggtgatcatggtgaccggcaaccacagaaagcccagcctgctggcccaccccggccccctggtgaagagcggcgagagagtgatcctgcagtgctggagcgacatcatgttcgagcacttcttcctgcacaaggagggcatcagcaaggaccccagcagactggtgggccagatccacgacggcgtgagcaaggccaacttcagcatcggccccatgatgctggccctggccggcacctacagatgctacggcagcgtgacccacaccccctaccagctgagcgcccccagcgaccccctggacatcgtggtgaccggcccctacgagaagcccagcctgagcgcccagcccggccccaaggtgcaggccggcgagagcgtgaccctgagctgcagcagcagaagcagctacgacatgtaccacctgagcagagagggcggcgcccacgagagaagactgcccgccgtgagaaaggtgaacagaaccttccaggccgacttccccctgggccccgccacccacggcggcacctacagatgcttcggcagcttcagacacagcccctacgagtggagcgaccccagcgaccccctgctggtgagcgtgaccggcaaccccagcagcagctggcccagccccaccgagcccagcagcaagagcggcaaccccagacacctgcacatcctgatcggcaccagcgtggtgatcatcctgttcatcctgctgctgttcttcctgctgcacctgtggtgcagcaacaagaagaacgccgccgtgatggaccaggagcccgccggcaacagaaccgccaacagcgaggacagcgacgagcaggaccccgaggaggtgacctacgcccagctggaccactgcgtgttcacccagagaaagatcaccagacccagccagagacccaagaccccccccaccgacaccatcctgtacaccgagctgcccaacgccaagcccagaagcaaggtggtgagctgcccctag

SEQ ID NO: 86131 - DNA, 1050 bp, synthetic construct
  misc_feature 1..1050: note = Description of Artificial Sequence: Synthetic coding sequence
  source 1..1050: mol_type = other DNA
atgagcctgatggtggtgagcatggcctgcgtgggcctgttcctggtgcagagagccggcccccacatgggcaaccacagaaagcccagcctgctggcccaccccggccccctggtgaagagcggcgagagagtgatcctgcagtgctggagcgacatcatgttcgagcacttcttcctgcacaaggagggcatcagcaaggaccccagcagactggtgggccagatccacgacggcgtgagcaaggccaacttcagcatcggccccatgatgctggccctggccggcacctacagatgctacggcagcgtgacccacaccccctaccagctgagcgcccccagcgaccccctggacatcgtggtgaccggcccctacgagaagcccagcctgagcgcccagcccggccccaaggtgcaggccggcgagagcgtgaccctgagctgcagcagcagaagcagctacgacatgtaccacctgagcagagagggcggcgcccacgagagaagactgcccgccgtgagaaaggtgaacagaaccttccaggccgacttccccctgggccccgccacccacggcggcacctacagatgcttcggcagcttcagacacagcccctacgagtggagcgaccccagcgaccccctgctggtgagcgtgaccggcaaccccagcagcagctggcccagccccaccgagcccagcagcaagagcggcaaccccagacacctgcacatcctgatcggcaccagcgtggtgatcatcctgttcatcctgctgctgttcttcctgctgcacctgtggtgcagcaacaagaagaacgccgccgtgatggaccaggagcccgccggcaacagaaccgccaacagcgaggacagcgacgagcaggaccccgaggaggtgacctacgcccagctggaccactgcgtgttcacccagagaaagatcaccagacccagccagagacccaagaccccccccaccgacaccatcctgtacaccgagctgcccaacgccaagcccagaagcaaggtggtgagctgcccctag

SEQ ID NO: 86132 - DNA, 1335 bp, synthetic construct
  misc_feature 1..1335: note = Description of Artificial Sequence: Synthetic coding sequence
  source 1..1335: mol_type = other DNA
atgagcctgatggtggtgagcatggcctgcgtgggcctgttcctggtgcagagagccggcccccacatgggcggccaggacaagcccttcctgagcgcctggcccagcgccgtggtgcccagaggcggccacgtgaccctgagatgccactacagacacagattcaacaacttcatgctgtacaaggaggacagaatccacatccccatcttccacggcagaatcttccaggagagcttcaacatgagccccgtgaccaccgcccacgccggcaactacacctgcagaggcagccacccccacagccccaccggctggagcgcccccagcaaccccgtggtgatcatggtgaccggcaaccacagaaagcccagcctgctggcccaccccggccccctggtgaagagcggcgagagagtgatcctgcagtgctggagcgacatcatgttcgagcacttcttcctgcacaaggagggcatcagcaaggaccccagcagactggtgggccagatccacgacggcgtgagcaaggccaacttcagcatcggccccatgatgctggccctggccggcacctacagatgctacggcagcgtgacccacaccccctaccagctgagcgcccccagcgaccccctggacatcgtggtgaccggcccctacgagaagcccagcctgagcgcccagcccggccccaaggtgcaggccggcgagagcgtgaccctgagctgcagcagcagaagcagctacgacatgtaccacctgagcagagagggcggcgcccacgagagaagactgcccgccgtgagaaaggtgaacagaaccttccaggccgacttccccctgggccccgccacccacggcggcacctacagatgcttcggcagcttcagacacagcccctacgagtggagcgaccccagcgaccccctgctggtgagcgtgaccggcaaccccagcagcagctggcccagccccaccgagcccagcagcaagagcggcaaccccagacacctgcacatcctgatcggcaccagcgtggtgatcatcctgttcatcctgctgctgttcttcctgctgcacctgtggtgcagcaacaagaagaacgccgccgtgatggaccaggagcccgccggcaacagaaccgccaacagcgaggacagcgacgagcaggaccccgaggaggtgacctacgcccagctggaccactgcgtgttcacccagagaaagatcaccagacccagccagagacccaagaccccccccaccgacaccatcctgtacaccgagctgcccaacgccaagcccagaagcaaggtggtgagctgcccctag

SEQ ID NO: 86133 - DNA, 1368 bp, synthetic construct
  misc_feature 1..1368: note = Description of Artificial Sequence: Synthetic coding sequence
  source 1..1368: mol_type = other DNA
atgagcctgatggtggtgagcatggcctgcgtgggcctgttcctggtgcagagagccggcccccacatgggcggccaggacaagcccttcctgagcgcctggcccagcgccgtggtgcccagaggcggccacgtgaccctgagatgccactacagacacagattcaacaacttcatgctgtacaaggaggacagaatccacatccccatcttccacggcagaatcttccaggagagcttcaacatgagccccgtgaccaccgcccacgccggcaactacacctgcagaggcagccacccccacagccccaccggctggagcgcccccagcaaccccgtggtgatcatggtgaccggcaaccacagaaagcccagcctgctggcccaccccggccccctggtgaagagcggcgagagagtgatcctgcagtgctggagcgacatcatgttcgagcacttcttcctgcacaaggagggcatcagcaaggaccccagcagactggtgggccagatccacgacggcgtgagcaaggccaacttcagcatcggccccatgatgctggccctggccggcacctacagatgctacggcagcgtgacccacaccccctaccagctgagcgcccccagcgaccccctggacatcgtggtgaccggcccctacgagaagcccagcctgagcgcccagcccggccccaaggtgcaggccggcgagagcgtgaccctgagctgcagcagcagaagcagctacgacatgtaccacctgagcagagagggcggcgcccacgagagaagactgcccgccgtgagaaaggtgaacagaaccttccaggccgacttccccctgggccccgccacccacggcggcacctacagatgcttcggcagcttcagacacagcccctacgagtggagcgaccccagcgaccccctgctggtgagcgtgaccggcaaccccagcagcagctggcccagccccaccgagcccagcagcaagagcggcatctgcagacacctgcacgtgctgatcggcaccagcgtggtgatcttcctgttcatcctgctgctgttcttcctgctgtacagatggtgcagcaacaagaagaacgccgccgtgatggaccaggagcccgccggcgacagaaccgtgaacagacaggacagcgacgagcaggacccccaggaggtgacctacgcccagctggaccactgcgtgttcatccagagaaagatcagcagacccagccagagacccaagacccccctgaccgacaccagcgtgtacaccgagctgcccaacgccgagcccagaagcaaggtggtgagctgccccagagccccccagagcggcctggagggcgtgttctag

SEQ ID NO: 86134 - DNA, 1335 bp, synthetic construct; identical to SEQ ID NO: 86132
  misc_feature 1..1335: note = Description of Artificial Sequence: Synthetic coding sequence
  source 1..1335: mol_type = other DNA

SEQ ID NO: 86135 - DNA, 1284 bp, synthetic construct
  misc_feature 1..1284: note = Description of Artificial Sequence: Synthetic coding sequence
  source 1..1284: mol_type = other DNA
atgagcctgatggtggtgagcatggcctgcgtgggcctgttcctggtgcagagagccggcccccacatgggcggccaggacaagcccttcctgagcgcctggcccagcgccgtggtgcccagaggcggccacgtgaccctgagatgccactacagacacagattcaacaacttcatgctgtacaaggaggacagaatccacatccccatcttccacggcagaatcttccaggagagcttcaacatgagccccgtgaccaccgcccacgccggcaactacacctgcagaggcagccacccccacagccccaccggctggagcgcccccagcaaccccgtggtgatcatggtgaccggcaaccacagaaagcccagcctgctggcccaccccggccccctggtgaagagcggcgagagagtgatcctgcagtgctggagcgacatcatgttcgagcacttcttcctgcacaaggagggcatcagcaaggaccccagcagactggtgggccagatccacgacggcgtgagcaaggccaacttcagcatcggccccatgatgctggccctggccggcacctacagatgctacggcagcgtgacccacaccccctaccagctgagcgcccccagcgaccccctggacatcgtggtgaccggcccctacgagaagcccagcctgagcgcccagcccggccccaaggtgcaggccggcgagagcgtgaccctgagctgcagcagcagaagcagctacgacatgtaccacctgagcagagagggcggcgcccacgagagaagactgcccgccgtgagaaaggtgaacagaaccttccaggccgacttccccctgggccccgccacccacggcggcacctacagatgcttcggcagcttcagacacagcccctacgagtggagcgaccccagcgaccccctgctggtgagcgtgaccggcaaccccagacacctgcacatcctgatcggcaccagcgtggtgatcatcctgttcatcctgctgctgttcttcctgctgcacctgtggtgcagcaacaagaagaacgccgccgtgatggaccaggagcccgccggcaacagaaccgccaacagcgaggacagcgacgagcaggaccccgaggaggtgacctacgcccagctggaccactgcgtgttcacccagagaaagatcaccagacccagccagagacccaagaccccccccaccgacaccatcctgtacaccgagctgcccaacgccaagcccagaagcaaggtggtgagctgcccctag

SEQ ID NO: 86136 - DNA, 1368 bp, synthetic construct
  misc_feature 1..1368: note = Description of Artificial Sequence: Synthetic coding sequence
  source 1..1368: mol_type = other DNA
atgagcctgaccgtggtgagcatggcctgcgtgggcttcttcctgctgcagggcgcctggcccctgatgggcggccaggacaagcccttcctgagcgccagacccagcaccgtggtgcccagaggcggccacgtggccctgcagtgccactacagaagaggcttcaacaacttcatgctgtacaaggaggacagaagccacgtgcccatcttccacggcagaatcttccaggagagcttcatcatgggccccgtgacccccgcccacgccggcacctacagatgcagaggcagcagaccccacagcctgaccggctggagcgcccccagcaaccccctggtgatcatggtgaccggcaaccacagaaagcccagcctgctggcccaccccggccccctgctgaagagcggcgagaccgtgatcctgcagtgctggagcgacgtgatgttcgagcacttcttcctgcacagagagggcatcagcgaggaccccagcagactggtgggccagatccacgacggcgtgagcaaggccaacttcagcatcggccccctgatgcccgtgctggccggcacctacagatgctacggcagcgtgccccacagcccctaccagctgagcgcccccagcgaccccctggacatcgtgatcaccggcctgtacgagaagcccagcctgagcgcccagcccggccccaccgtgcaggccggcgagaacgtgaccctgagctgcagcagctggagcagctacgacatctaccacctgagcagagagggcgaggcccacgagagaagactgagagccgtgcccaaggtgaacagaaccttccaggccgacttccccctgggccccgccacccacggcggcacctacagatgcttcggcagcttcagagccctgccctgcgtgtggagcaacagcagcgaccccctgctggtgagcgtgaccggcaaccccagcagcagctggcccagccccaccgagcccagcagcaagagcggcatctgcagacacctgcacgtgctgatcggcaccagcgtggtgatcttcctgttcatcctgctgctgttcttcctgctgtacagatggtgcagcaacaagaagaacgccgccgtgatggaccaggagcccgccggcgacagaaccgtgaacagacaggacagcgacgagcaggacccccaggaggtgacctacgcccagctggaccactgcgtgttcatccagagaaagatcagcagacccagccagagacccaagacccccctgaccgacaccagcgtgtacaccgagctgcccaacgccgagcccagaagcaaggtggtgagctgccccagagccccccagagcggcctggagggcgtgttctag

SEQ ID NO: 86137 - DNA, 1047 bp, synthetic construct
  misc_feature 1..1047: note = Description of Artificial Sequence: Synthetic coding sequence
  source 1..1047: mol_type = other DNA
atgagcctgatggtggtgagcatggcctgcgtgggcttcttcctgctgcagggcgcctggccccacgagggcgtgcacagaaagcccagcctgctggcccaccccggcagactggtgaagagcgaggagaccgtgatcctgcagtgctggagcgacgtgagattcgagcacttcctgctgcacagagagggcaagttcaaggacaccctgcacctgatcggcgagcaccacgacggcgtgagcaaggccaacttcagcatcggccccatgatgcaggacctggccggcacctacagatgctacggcagcgtgacccacagcccctaccagctgagcgcccccagcgaccccctggacatcgtgatcaccggcctgtacgagaagcccagcctgagcgcccagcccggccccaccgtgctggccggcgagagcgtgaccctgagctgcagcagcagaagcagctacgacatgtaccacctgagcagagagggcgaggcccacgagtgcagattcagcgccggccccaaggtgaacggcaccttccaggccgacttccccctgggccccgccacccacggcggcacctacagatgcttcggcagcttcagagacagcccctacgagtggagcaacagcagcgaccccctgctggtgagcgtgaccggcaaccccagcaacagctggcccagccccaccgagcccagcagcaagaccggcaaccccagacacctgcacatcctgatcggcaccagcgtggtgatcatcctgttcatcctgctgttcttcctgctgcacagatggtgcagcaacaagaagaacgccgccgtgatggaccaggagagcgccggcaacagaaccgccaacagcgaggacagcgacgagcaggacccccaggaggtgacctacacccagctgaaccactgcgtgttcacccagagaaagatcaccagacccagccagagacccaagaccccccccaccgacatcatcgtgtacaccgagctgcccaacgccgagagcagaagcaaggtggtgagctgcccctag

SEQ ID NO: 86138 - DNA, 1128 bp, synthetic construct
  misc_feature 1..1128: note = Description of Artificial Sequence: Synthetic coding sequence
  source 1..1128: mol_type = other DNA
atgagcctgatggtggtgagcatggcctgcgtgggcttcttcctgctgcagggcgcctggccccacgagggcggccaggacaagcccctgctgagcgcctggcccagcgccgtggtgcccagaggcggccacgtgaccctgctgtgcagaagcagactgggcttcaccatcttcagcctgtacaaggaggacggcgtgcccgtgcccgagctgtacaacaagatcttctggaagagcatcctgatgggccccgtgacccccgcccacgccggcacctacagatgcagaggcagccaccccagaagccccatcgagtggagcgcccccagcaaccccctggtgatcgtggtgaccggcctgttcggcaagcccagcctgagcgcccagcccggccccaccgtgagaaccggcgagaacgtgaccctgagctgcagcagcagaagcagcttcgacatgtaccacctgagcagagagggcagagcccacgagcccagactgcccgccgtgcccagcgtgaacggcaccttccaggccgacttccccctgggccccgccacccacggcggcacctacacctgcttcggcagcctgcacgacagcccctacgagtggagcgaccccagcgaccccctgctggtgagcgtgaccggcaacagcagcagcagcagcagcagccccaccgagcccagcagcaagaccggcatcagaagacacctgcacatcctgatcggcaccagcgtggccatcatcctgttcatcatcctgttcttcttcctgctgcactgctgctgcagcaacaagaagaacgccgccgtgatggaccaggagcccgccggcgacagaaccgtgaacagagaggacagcgacgaccaggacccccaggaggtgacctacgcccagctggaccactgcgtgttcacccagaccaagatcaccagccccagccagagacccaagaccccccccaccgacaccaccatgtacatggagctgcccaacgccaagcccagaagcctgagccccgcccacaagcaccacagccaggccctgagaggcagcagcagagagaccaccgccctgagccagaacagagtggccagcagccacgtgcccgccgccggcatctag

SEQ ID NO: 86139 - DNA, 1128 bp, synthetic construct
  misc_feature 1..1128: note = Description of Artificial Sequence: Synthetic coding sequence
  source 1..1128: mol_type = other DNA
atgagcctgatggtgatcagcatggcctgcgtgggcttcttcctgctgcagggcgcctggacccacgagggcggccaggacaagcccctgctgagcgcctggcccagcgccgtggtgcccagaggcggccacgtgaccctgctgtgcagaagcagactgggcttcaccatcttcagcctgtacaaggaggacggcgtgcccgtgcccgagctgtacaacaagatcttctggaagagcatcctgatgggccccgtgacccccgcccacgccggcacctacagatgcagaggcagccaccccagaagccccatcgagtggagcgcccccagcaaccccctggtgatcgtggtgaccggcctgttcggcaagcccagcctgagcgcccagcccggccccaccgtgagaaccggcgagaacgtgaccctgagctgcagcagcagaagcagcttcgacatgtaccacctgagcagagagggcagagcccacgagcccagactgcccgccgtgcccagcgtgaacggcaccttccaggccgacttccccctgggccccgccacccacggcggcacctacacctgcttcggcagcctgcacgacagcccctacgagtggagcgaccccagcgaccccctgctggtgagcgtgaccggcaacagcagcagcagcagcagcagccccaccgagcccagcagcaagaccggcatcagaagacacctgcacatcctgatcggcaccagcgtggccatcatcctgttcatcatcctgttcttcttcctgctgcactgctgctgcagcaacaagaagaacgccgccgtgatggaccaggagcccgccggcgacagaaccgtgaacagagaggacagcgacgaccaggacccccaggaggtgacctacgcccagctggaccactgcgtgttcacccagaccaagatcaccagccccagccagagacccaagaccccccccaccgacaccaccatgtacatggagctgcccaacgccaagcccagaagcctgagccccgcccacaagcaccacagccaggccctgagaggcagcagcagagagaccaccgccctgagccagaacagagtggccagcagccacgtgcccgccgccggcatctag

SEQ ID NO: 86140 - DNA, 1164 bp, synthetic construct
  misc_feature 1..1164: note = Description of Artificial Sequence: Synthetic coding sequence
  source 1..1164: mol_type = other DNA
atgagcctgatggtggtgagcatggcctgcgtgggcctgttcctggtgcagagagccggcccccacatgggcggccaggacaagcccttcctgagcgcctggcccagcgccgtggtgcccagaggcggccacgtgaccctgagatgccactacagacacagattcaacaacttcatgctgtacaaggaggacagaatccacgtgcccatcttccacggcagaatcttccaggagggcttcaacatgagccccgtgaccaccgcccacgccggcaactacacctgcagaggcagccacccccacagccccaccggctggagcgcccccagcaaccccatggtgatcatggtgaccggcaaccacagaaagcccagcctgctggcccaccccggccccctggtgaagagcggcgagagagtgatcctgcagtgctggagcgacatcatgttcgagcacttcttcctgcacaaggagtggatcagcaaggaccccagcagactggtgggccagatccacgacggcgtgagcaaggccaacttcagcatcggcagcatgatgagagccctggccggcacctacagatgctacggcagcgtgacccacaccccctaccagctgagcgcccccagcgaccccctggacatcgtggtgaccggcctgtacgagaagcccagcctgagcgcccagcccggccccaaggtgcaggccggcgagagcgtgaccctgagctgcagcagcagaagcagctacgacatgtaccacctgagcagagagggcggcgcccacgagagaagactgcccgccgtgagaaaggtgaacagaaccttccaggccgacttccccctgggccccgccacccacggcggcacctacagatgcttcggcagcttcagacacagcccctacgagtggagcgaccccagcgaccccctgctggtgagcgtgaccggcaaccccagcagcagctggcccagccccaccgagcccagcagcaagagcggcaacctgagacacctgcacatcctgatcggcaccagcgtggtgaagatccccttcaccatcctgctgttcttcctgctgcacagatggtgcagcaacaagaagaacgccgccgtgatggaccaggagcccgccggcaacagaagcgagcagagaggcttctag

SEQ ID NO: 86141 - DNA, 1149 bp, synthetic construct
  misc_feature 1..1149: note = Description of Artificial Sequence: Synthetic coding sequence
  source 1..1149: mol_type = other DNA
atgctgctgatggtggtgagcatggcctgcgtgggcctgttcctggtgcagagagccggcccccacatgggcggccaggacaagcccttcctgagcgcctggcccagcgccgtggtgcccagaggcggccacgtgaccctgagatgccactacagacacagattcaacaacttcatgctgtacaaggaggacagaatccacgtgcccatcttccacggcagaatcttccaggagggcttcaacatgagccccgtgaccaccgcccacgccggcaactacacctgcagaggcagccacccccacagccccaccggctggagcgcccccagcaaccccatggtgatcatggtgaccggcaaccacagaaagcccagcctgctggcccaccccggccccctggtgaagagcggcgagagagtgatcctgcagtgctggagcgacatcatgttcgagcacttcttcctgcacaaggagtggatcagcaaggaccccagcagactggtgggccagatccacgacggcgtgagcaaggccaacttcagcatcggcagcatgatgagagccctggccggcacctacagatgctacggcagcgtgacccacaccccctaccagctgagcgcccccagcgaccccctggacatcgtggtgaccggcctgtacgagaagcccagcctgagcgcccagcccggccccaaggtgcaggccggcgagagcgtgaccctgagctgcagcagcagaagcagctacgacatgtaccacctgagcagagagggcggcgcccacgagagaagactgcccgccgtgagaaaggtgaacagaaccttccaggccgacttccccctgggccccgccacccacggcggcacctacagatgcttcggcagcttcagacacagcccctacgagtggagcgaccccagcgaccccctgctggtgagcgtgaccggcaaccccagcagcagctggcccagccccaccgagcccagcagcaagagcggcaacctgagacacctgcacatcctgatcggcaccagcgtggtgaagatccccttcaccatcctgctgttcttcctgctgcacagatggtgcagcaacaagaagaagtgctgctgcaacggccccagagcctgcagagagcagaagtag

SEQ ID NO: 86142 - DNA, 1194 bp, synthetic construct
  misc_feature 1..1194: note = Description of Artificial Sequence: Synthetic coding sequence
  source 1..1194: mol_type = other DNA
atgagcctgatggtggtgagcatggcctgcgtgggcttcttcctggaccagagcgtgtgggcccacgtgggcggccaggacaagcccttctgcagcgcctggcccagcgccgtggtgccccagggcggccacgtgaccctgagatgccactgcagaagaggcttcaacatcttcaccctgtacaagaaggacggcgtgcccgtgcccgagctgtacaacagaatcttctggaacagcttcctgatcagccccgtgacccccgcccacgccggcacctacagatgcagaggcttccacccccacagccccaccgagtggagcgcccccagcaaccccctggtgatcatggtgaccggcctgtacgagaagcccagcctgaccgccagacccggccccaccgtgagagccggcgagaacgtgaccctgagctgcagcagccagagcagcttcgacatctaccacctgagcagagagggcgaggcccacgagctgagactgcccgccgtgcccagcatcaacggcaccttccaggccgacttccccctgggccccgccacccacggcgagacctacagatgcttcggcagcttccacggcagcccctacgagtggagcgaccccagcgaccccctgcccgtgagcgtgaccggcaaccccagcagcagctggcccagccccaccgagcccagcttcaagaccggcatcgccagacacctgcacgccgtgatcagatacagcgtggccatcatcctgttcaccatcctgcccttcttcctgctgcacagatggtgcagcaagaagaaggtgagcctgaccaagcagagacccgagaacagcggcccctgcgccgaggccggctgggagcacgccgacgccgccgtgatgaaccaggagcccgccggccacagaaccgtgaacagagaggacagcgacgagcaggacccccaggaggtgacctacgcccagctggaccactgcatcttcacccagagaaagatcaccggccccagccagagaagcaagagacccagcaccgacaccagcgtgtgcatcgagctgcccaacgccgagcccagagccctgagccccgcccacgagcaccacagccaggccctgatgggcagcagcagagagaccaccgccctgagccagacccagctggccagcagcaacgtgcccgccgccggcatctag

SEQ ID NO: 86143 - DNA, 1029 bp, synthetic construct
  misc_feature 1..1029: note = Description of Artificial Sequence: Synthetic coding sequence
  source 1..1029: mol_type = other DNA
atgagcatgagccccaccgtgatcatcctggcctgcctgggcttcttcctggaccagagcgtgtgggcccacgtgggcggccaggacaagcccttctgcagcgcctggcccagcgccgtggtgccccagggcggccacgtgaccctgagatgccactgcagaagaggcttcaacatcttcaccctgtacaagaaggacggcgtgcccgtgcccgagctgtacaacagaatcttctggaacagcttcctgatcagccccgtgacccccgcccacgccggcacctacagatgcagaggcttccacccccacagccccaccgagtggagcgcccccagcaaccccctggtgatcatggtgaccggcctgtacgagaagcccagcctgaccgccagacccggccccaccgtgagagccggcgagaacgtgaccctgagctgcagcagccagagcagcttcgacatctaccacctgagcagagagggcgaggcccacgagctgagactgcccgccgtgcccagcatcaacggcaccttccaggccgacttccccctgggccccgccacccacggcgagacctacagatgcttcggcagcttccacggcagcccctacgagtggagcgaccccagcgaccccctgcccgtgagcgtgaccggcaaccccagcagcagctggcccagccccaccgagcccagcttcaagaccgacgccgccgtgatgaaccaggagcccgccggccacagaaccgtgaacagagaggacagcgacgagcaggacccccaggaggtgacctacgcccagctggaccactgcatcttcacccagagaaagatcaccggccccagccagagaagcaagagacccagcaccgacaccagcgtgtgcatcgagctgcccaacgccgagcccagagccctgagccccgcccacgagcaccacagccaggccctgatgggcagcagcagagagaccaccgccctgagccagacccagctggccagcagcaacgtgcccgccgccggcatctag

SEQ ID NO: 86144 - DNA, 1083 bp, synthetic construct
  misc_feature 1..1083: note = Description of Artificial Sequence: Synthetic coding sequence
  source 1..1083: mol_type = other DNA
atgagcatgagccccaccgtgatcatcctggcctgcctgggcttcttcctggaccagagcgtgtgggcccacgtgggcggccaggacaagcccttctgcagcgcctggcccagcgccgtggtgccccagggcggccacgtgaccctgagatgccactgcagaagaggcttcaacatcttcaccctgtacaagaaggacggcgtgcccgtgcccgagctgtacaacagaatcttctggaacagcttcctgatcagccccgtgacccccgcccacgccggcacctacagatgcagaggcttccacccccacagccccaccgagtggagcgcccccagcaaccccctggtgatcatggtgaccggcctgtacgagaagcccagcctgaccgccagacccggccccaccgtgagagccggcgagaacgtgaccctgagctgcagcagccagagcagcttcgacatctaccacctgagcagagagggcgaggcccacgagctgagactgcccgccgtgcccagcatcaacggcaccttccaggccgacttccccctgggccccgccacccacggcgagacctacagatgcttcggcagcttccacggcagcccctacgagtggagcgaccccagcgaccccctgcccgtgagcgtgaccggcatcgccagacacctgcacgccgtgatcagatacagcgtggccatcatcctgttcaccatcctgcccttcttcctgctgcacagatggtgcagcaagaagaagaacgccgccgtgatgaaccaggagcccgccggccacagaaccgtgaacagagaggacagcgacgagcaggacccccaggaggtgacctacgcccagctggaccactgcatcttcacccagagaaagatcaccggccccagccagagaagcaagagacccagcaccgacaccagcgtgtgcatcgagctgcccaacgccgagcccagagccctgagccccgcccacgagcaccacagccaggccctgatgggcagcagcagagagaccaccgccctgagccagacccagctggccagcagcaacgtgcccgccgccggcatctag

SEQ ID NO: 86145 - DNA, 1134 bp, synthetic construct
  misc_feature 1..1134: note = Description of Artificial Sequence: Synthetic coding sequence
  source 1..1134: mol_type = other DNA
atgagcatgagccccaccgtgatcatcctggcctgcctgggcttcttcctggaccagagcgtgtgggcccacgtgggcggccaggacaagcccttctgcagcgcctggcccagcgccgtggtgccccagggcggccacgtgaccctgagatgccactgcagaagaggcttcaacatcttcaccctgtacaagaaggacggcgtgcccgtgcccgagctgtacaacagaatcttctggaacagcttcctgatcagccccgtgacccccgcccacgccggcacctacagatgcagaggcttccacccccacagccccaccgagtggagcgcccccagcaaccccctggtgatcatggtgaccggcctgtacgagaagcccagcctgaccgccagacccggccccaccgtgagagccggcgagaacgtgaccctgagctgcagcagccagagcagcttcgacatctaccacctgagcagagagggcgaggcccacgagctgagactgcccgccgtgcccagcatcaacggcaccttccaggccgacttccccctgggccccgccacccacggcgagacctacagatgcttcggcagcttccacggcagcccctacgagtggagcgaccccagcgaccccctgcccgtgagcgtgaccggcaaccccagcagcagctggcccagccccaccgagcccagcttcaagaccggcatcgccagacacctgcacgccgtgatcagatacagcgtggccatcatcctgttcaccatcctgcccttcttcctgctgcacagatggtgcagcaagaagaagaacgccgccgtgatgaaccaggagcccgccggccacagaaccgtgaacagagaggacagcgacgagcaggacccccaggaggtgacctacgcccagctggaccactgcatcttcacccagagaaagatcaccggccccagccagagaagcaagagacccagcaccgacaccagcgtgtgcatcgagctgcccaacgccgagcccagagccctgagccccgcccacgagcaccacagccaggccctgatgggcagcagcagagagaccaccgccctgagccagacccagctggccagcagcaacgtgcccgccgccggcatctag

SEQ ID NO: 86146 - DNA, 1233 bp, synthetic construct
  misc_feature 1..1233: note = Description of Artificial Sequence: Synthetic coding sequence
  source 1..1233: mol_type = other DNA
atgagcctgatggtggtgagcatggcctgcgtgggcttcttcctgctggagggcccctggccccacgtgggcggccaggacaagcccttcctgagcgcctggcccggcaccgtggtgagcgagggccagcacgtgaccctgcagtgcagaagcagactgggcttcaacgagttcagcctgagcaaggaggacggcatgcccgtgcccgagctgtacaacagaatcttcagaaacagcttcctgatgggccccgtgacccccgcccacgccggcacctacagatgctgcagcagccacccccacagccccaccggctggagcgcccccagcaaccccgtggtgatcatggtgaccggcgtgcacagaaagcccagcctgctggcccaccccggccccctggtgaagagcggcgagaccgtgatcctgcagtgctggagcgacgtgagattcgagagattcctgctgcacagagagggcatcaccgaggaccccctgagactgatcggccagctgcacgacgccggcagccaggtgaactacagcatgggccccatgacccccgccctggccggcacctacagatgcttcggcagcgtgacccacctgccctacgagctgagcgcccccagcgaccccctggacatcgtggtggtgggcctgtacggcaagcccagcctgagcgcccagcccggccccaccgtgcaggccggcgagaacgtgaccctgagctgcagcagcagaagcctgttcgacatctaccacctgagcagagaggccgaggccggcgagctgagactgaccgccgtgctgagagtgaacggcaccttccaggccaacttccccctgggccccgtgacccacggcggcaactacagatgcttcggcagcttcagagccctgccccacgcctggagcgaccccagcgaccccctgcccgtgagcgtgaccggcaacagcagatacctgcacgccctgatcggcaccagcgtggtgatcatccccttcgccatcctgctgttcttcctgctgcacagatggtgcgccaacaagaagaacgccgtggtgatggaccaggagcccgccggcaacagaaccgtgaacagagaggacagcgacgagcaggacccccaggaggtgacctacgcccagctgaaccactgcgtgttcacccagagaaagatcaccagacccagccagagacccaagaccccccccaccgacaccagcgtgtag

SEQ ID NO: 86147 - DNA, 1047 bp, synthetic construct
  misc_feature 1..1047: note = Description of Artificial Sequence: Synthetic coding sequence
  source 1..1047: mol_type = other DNA
atgagcctgctggtggtgagcatggcctgcgtgggcttcttcctgctgcagggcgcctggccccacgagggcgtgcacagaaagcccagcctgctggcccaccccggcagactggtgaagagcgaggagaccgtgatcctgcagtgctggagcgacgtgatgttcgagcacttcctgctgcacagagagggcatgttcaacgacaccctgagactgatcggcgagcaccacgacggcgtgagcaaggccaacttcagcatcagcagaatgacccaggacctggccggcacctacagatgctacggcagcgtgacccacagcccctaccaggtgagcgcccccagcgaccccctggacatcgtgatcatcggcctgtacgagaagcccagcctgagcgcccagctgggccccaccgtgctggccggcgagaacgtgaccctgagctgcagcagcagaagcagctacgacatgtaccacctgagcagagagggcgaggcccacgagagaagactgcccgccggccccaaggtgaacggcaccttccaggccgacttccccctgggccccgccacccacggcggcacctacagatgcttcggcagcttccacgacagcccctacgagtggagcaagagcagcgaccccctgctggtgagcgtgaccggcaaccccagcaacagctggcccagccccaccgagcccagcagcaagaccggcaaccccagacacctgcacatcctgatcggcaccagcgtggtgatcatcctgttcatcctgctgttcttcctgctgcacagatggtgcagcaacaagaagaacgccgccgtgatggaccaggagagcgccggcaacagaaccgccaacagcgaggacagcgacgagcaggacccccaggaggtgacctacacccagctgaaccactgcgtgttcacccagagaaagatcaccagacccagccagagacccaagaccccccccaccgacatcatcgtgtacaccgagctgcccaacgccgagagcagaagcaaggtggtgagctgcccctag

SEQ ID NO: 86148 - DNA, 1026 bp, synthetic construct
  misc_feature 1..1026: note = Description of Artificial Sequence: Synthetic coding sequence
  source 1..1026: mol_type = other DNA
atgagcctgatggtggtgagcatggtgtgcgtgggcttcttcctgctgcagggcgcctggccccacgagggcgtgcacagaaagcccagcctgctggcccaccccggccccctggtgaagagcgaggagaccgtgatcctgcagtgctggagcgacgtgagattccagcacttcctgctgcacagagagggcaagttcaaggacaccctgcacctgatcggcgagcaccacgacggcgtgagcaaggccaacttcagcatcggccccatgatgcaggacctggccggcacctacagatgctacggcagcgtgacccacagcccctaccagctgagcgcccccagcgaccccctggacatcgtgatcaccggcctgtacgagaagcccagcctgagcgcccagcccggccccaccgtgctggccggcgagagcgtgaccctgagctgcagcagcagaagcagctacgacatgtaccacctgagcagagagggcgaggcccacgagagaagattcagcgccggccccaaggtgaacggcaccttccaggccgacttccccctgggccccgccacccacggcggcacctacagatgcttcggcagcttcagagacagcccctacgagtggagcaacagcagcgaccccctgctggtgagcgtgaccggcaaccccagcaacagctggcccagccccaccgagcccagcagcgagaccggcaaccccagacacctgcacgtgctgatcggcaccagcgtggtgatcatcctgttcatcctgctgctgttcttcctgctgcacagatggtgctgcaacaagaagaacgccgtggtgatggaccaggagcccgccggcaacagaaccgtgaacagagaggacagcgacgagcaggacccccaggaggtgacctacgcccagctgaaccactgcgtgttcacccagagaaagatcaccagacccagccagagacccaagaccccccccaccgacatcatcgtgtacaccgagctgcccaacgccgagccctag

SEQ ID NO: 86149 - DNA, 1047 bp, synthetic construct
  misc_feature 1..1047: note = Description of Artificial Sequence: Synthetic coding sequence
  source 1..1047: mol_type = other DNA
atgagcctgatggtggtgagcatggtgtgcgtgggcttcttcctgctgcagggcgcctggccccacgagggcgtgcacagaaagcccagcctgctggcccaccccggccccctggtgaagagcgaggagaccgtgatcctgcagtgctggagcgacgtgagattccagcacttcctgctgcacagagagggcaagttcaaggacaccctgcacctgatcggcgagcaccacgacggcgtgagcaaggccaacttcagcatcggccccatgatgcaggacctggccggcacctacagatgctacggcagcgtgacccacagcccctaccagctgagcgcccccagcgaccccctggacatcgtgatcaccggcctgtacgagaagcccagcctgagcgcccagcccggccccaccgtgctggccggcgagagcgtgaccctgagctgcagcagcagaagcagctacgacatgtaccacctgagcagagagggcgaggcccacgagagaagattcagcgccggccccaaggtgaacggcaccttccaggccgacttccccctgggccccgccacccacggcggcacctacagatgcttcggcagcttcagagacagcccctacgagtggagcaacagcagcgaccccctgctggtgagcgtgaccggcaaccccagcaacagctggcccagccccaccgagcccagcagcaagaccggcaaccccagacacctgcacatcctgatcggcaccagcgtggtgatcatcctgttcatcctgctgttcttcctgctgcacagatggtgcagcaacaagaagaacgccgccgtgatggaccaggagagcgccggcaacagaaccgccaacagcgaggacagcgacgagcaggacccccaggaggtgacctacacccagctgaaccactgcgtgttcacccagagaaagatcaccagacccagccagagacccaagaccccccccaccgacatcatcgtgtacaccgagctgcccaacgccgagagcagaagcaaggtggtgagctgcccctag

SEQ ID NO: 86150 - DNA, 1029 bp, synthetic construct
  misc_feature 1..1029: note = Description of Artificial Sequence: Synthetic coding sequence
  source 1..1029: mol_type = other DNA
atgagcatgagccccaccgtgatcatcctggcctgcctgggcttcttcctggaccagagcgtgtgggcccacgtgggcggccaggacaagcccttctgcagcgcctggcccagcgccgtggtgccccagggcggccacgtgaccctgagatgccactacagaagaggcttcaacatcttcaccctgtacaagaaggacggcgtgcccgtgcccgagctgtacaacagaatcttctggaacagcttcctgatcagccccgtgacccccgcccacgccggcacctacagatgcagaggcttccacccccacagccccaccgagtggagcgcccccagcaaccccctggtgatcatggtgaccggcctgtacgagaagcccagcctgaccgccagacccggccccaccgtgagagccggcgagaacgtgaccctgagctgcagcagccagagcagcttcgacatctaccacctgagcagagagggcgaggcccacgagctgagactgcccgccgtgcccagcatcaacggcaccttccaggccgacttccccctgggccccgccacccacggcgagacctacagatgcttcggcagcttccacggcagcccctacgagtggagcgaccccagcgaccccctgcccgtgagcgtgaccggcaaccccagcagcagctggcccagccccaccgagcccagcttcaagaccgacgccgccgtgatgaaccaggagcccgccggccacagaaccgtgaacagagaggacagcgacgagcaggacccccaggaggtgacctacgcccagctggaccactgcatcttcacccagagaaagatcaccggccccagccagagaagcaagagacccagcaccgacaccagcgtgtgcatcgagctgcccaacgccgagcccagagccctgagccccgcccacgagcaccacagccaggccctgatgggcagcagcagagagaccaccgccctgagccagacccagctggccagcagcaacgtgcccgccgccggcatctag

SEQ ID NO: 86151 - DNA, 978 bp, synthetic construct
  misc_feature 1..978: note = Description of Artificial Sequence: Synthetic coding sequence
  source 1..978: mol_type = other DNA
atgagcatgagccccaccgtgatcatcctggcctgcctgggcttcttcctggaccagagcgtgtgggcccacgtgggcggccaggacaagcccttctgcagcgcctggcccagcgccgtggtgccccagggcggccacgtgaccctgagatgccactacagaagaggcttcaacatcttcaccctgtacaagaaggacggcgtgcccgtgcccgagctgtacaacagaatcttctggaacagcttcctgatcagccccgtgacccccgcccacgccggcacctacagatgcagaggcttccacccccacagccccaccgagtggagcgcccccagcaaccccctggtgatcatggtgaccggcctgtacgagaagcccagcctgaccgccagacccggccccaccgtgagagccggcgagaacgtgaccctgagctgcagcagccagagcagcttcgacatctaccacctgagcagagagggcgaggcccacgagctgagactgcccgccgtgcccagcatcaacggcaccttccaggccgacttccccctgggccccgccacccacggcgagacctacagatgcttcggcagcttccacggcagcccctacgagtggagcgaccccagcgaccccctgcccgtgagcgtgaccgacgccgccgtgatgaaccaggagcccgccggccacagaaccgtgaacagagaggacagcgacgagcaggacccccaggaggtgacctacgcccagctggaccactgcatcttcacccagagaaagatcaccggccccagccagagaagcaagagacccagcaccgacaccagcgtgtgcatcgagctgcccaacgccgagcccagagccctgagccccgcccacgagcaccacagccaggccctgatgggcagcagcagagagaccaccgccctgagccagacccagctggccagcagcaacgtgcccgccgccggcatctag

SEQ ID NO: 86152 - DNA, 1194 bp, synthetic construct
  misc_feature 1..1194: note = Description of Artificial Sequence: Synthetic coding sequence
  source 1..1194: mol_type = other DNA
atgagcctgatggtggtgagcatggcctgcgtgggcttcttcctggaccagagcgtgtgggcccacgtgggcggccaggacaagcccttctgcagcgcctggcccagcgccgtggtgccccagggcggccacgtgaccctgagatgccactacagaagaggcttcaacatcttcaccctgtacaagaaggacggcgtgcccgtgcccgagctgtacaacagaatcttctggaacagcttcctgatcagccccgtgacccccgcccacgccggcacctacagatgcagaggcttccacccccacagccccaccgagtggagcgcccccagcaaccccctggtgatcatggtgaccggcctgtacgagaagcccagcctgaccgccagacccggccccaccgtgagagccggcgagaacgtgaccctgagctgcagcagccagagcagcttcgacatctaccacctgagcagagagggcgaggcccacgagctgagactgcccgccgtgcccagcatcaacggcaccttccaggccgacttccccctgggccccgccacccacggcgagacctacagatgcttcggcagcttccacggcagcccctacgagtggagcgaccccagcgaccccctgcccgtgagcgtgaccggcaaccccagcagcagctggcccagccccaccgagcccagcttcaagaccggcatcgccagacacctgcacgccgtgatcagatacagcgtggccatcatcctgttcaccatcctgcccttcttcctgctgcacagatggtgcagcaagaagaaggtgagcctgaccaagcagagacccgagaacagcggcccctgcgccgaggccggctgggagcacgccgacgccgccgtgatgaaccaggagcccgccggccacagaaccgtgaacagagaggacagcgacgagcaggacccccaggaggtgacctacgcccagctggaccactgcatcttcacccagagaaagatcaccggccccagccagagaagcaagagacccagcaccgacaccagcgtgtgcatcgagctgcccaacgccgagcccagagccctgagccccgcccacgagcaccacagccaggccctgatgggcagcagcagagagaccaccgccctgagccagacccagctggccagcagcaacgtgcccgccgccggcatctag

SEQ ID NO: 86153 - DNA, 693 bp, synthetic construct
  misc_feature 1..693: note = Description of Artificial Sequence: Synthetic coding sequence
  source 1..693: mol_type = other DNA
atgagcatgagccccaccgtgatcatcctggcctgcctgggcttcttcctggaccagagcgtgtgggcccacgtgggcctgtacgagaagcccagcctgaccgccagacccggccccaccgtgagagccggcgagaacgtgaccctgagctgcagcagccagagcagcttcgacatctaccacctgagcagagagggcgaggcccacgagctgagactgcccgccgtgcccagcatcaacggcaccttccaggccgacttccccctgggccccgccacccacggcgagacctacagatgcttcggcagcttccacggcagcccctacgagtggagcgaccccagcgaccccctgcccgtgagcgtgaccgacgccgccgtgatgaaccaggagcccgccggccacagaaccgtgaacagagaggacagcgacgagcaggacccccaggaggtgacctacgcccagctggaccactgcatcttcacccagagaaagatcaccggccccagccagagaagcaagagacccagcaccgacaccagcgtgtgcatcgagctgcccaacgccgagcccagagccctgagccccgcccacgagcaccacagccaggccctgatgggcagcagcagagagaccaccgccctgagccagacccagctggccagcagcaacgtgcccgccgccggcatctag

SEQ ID NO: 86154 - DNA, 762 bp, synthetic construct
  misc_feature 1..762: note = Description of Artificial Sequence: Synthetic coding sequence
  source 1..762: mol_type = other DNA
atgagctgcaccatcgagaaggccctggccgacgccaaggccctggtggagagactgagagaccacgacgacgccgccgagagcctgatcgagcagaccaccgccctgaacaagagagtggaggccatgaagcagtaccaggaggagatccaggagctgaacgaggtggccagacacagacccagaagcaccctggtgatgggcatccagcaggagaacagacagatcagagagctgcagcaggagaacaaggagctgagaaccagcctggaggagcaccagagcgccctggagctgatcatgagcaagtacagagagcagatgttcagactgctgatggccagcaagaaggacgaccccggcatcatcatgaagctgaaggagcagcacagcaagatcgacatggtgcacagaaacaagagcgagggcttcttcctggacgccagcagacacatcctggaggccccccagcacggcctggagagaagacacctggaggccaaccagaacgagctgcaggcccacgtggaccagatcaccgagatggccgccgtgatgagaaaggccatcgagatcgacgagcagcagggctgcaaggagcaggagagaatcttccagctggagcaggagaacaagggcctgagagagatcctgcagatcaccagagagagcttcctgaacctgagaaaggacgacgccagcgagagcaccagcctgagcgccctggtgaccaacagcgacctgagcctgagaaagagctag

SEQ ID NO: 86155 - DNA, 648 bp, synthetic construct
  misc_feature 1..648: note = Description of Artificial Sequence: Synthetic coding sequence
  source 1..648: mol_type = other DNA
atggacaaccagggcgtgatctacagcgacctgaacctgccccccaaccccaagagacagcagagaaagcccaagggcaacaagaacagcatcctggccaccgagcaggagatcacctacgccgagctgaacctgcagaaggccagccaggacttccagggcaacgacaagacctaccactgcaaggacctgcccagcgcccccgagaagctgatcgtgggcatcctgggcatcatctgcctgatcctgatggccagcgtggtgaccatcgtggtgatccccagcagacactgcggccactgccccgaggagtggatcacctacagcaacagctgctactacatcggcaaggagagaagaacctgggaggagagcctgctggcctgcaccagcaagaacagcagcctgctgagcatcgacaacgaggaggagatgaagttcctgagcatcatcagccccagcagctggatcggcgtgttcagaaacagcagccaccacccctgggtgaccatgaacggcctggccttcaagcacgagatcaaggacagcgacaacgccgagctgaactgcgccgtgctgcaggtgaacagactgaagagcgcccagtgcggcagcagcatcatctaccactgcaagcacaagctgtag

SEQ ID NO: 86156 - DNA, 702 bp, synthetic construct
  misc_feature 1..702: note = Description of Artificial Sequence: Synthetic coding sequence
  source 1..702: mol_type = other DNA
atggacaaccagggcgtgatctacagcgacctgaacctgccccccaaccccaagagacagcagagaaagcccaagggcaacaagaacagcatcctggccaccgagcaggagatcacctacgccgagctgaacctgcagaaggccagccaggacttccagggcaacgacaagacctaccactgcaaggacctgcccagcgcccccgagaagctgatcgtgggcatcctgggcatcatctgcctgatcctgatggccagcgtggtgaccatcgtggtgatccccagcaccctgatccagagacacaacaacagcagcctgaacaccagaacccagaaggccagacactgcggccactgccccgaggagtggatcacctacagcaacagctgctactacatcggcaaggagagaagaacctgggaggagagcctgctggcctgcaccagcaagaacagcagcctgctgagcatcgacaacgaggaggagatgaagttcctgagcatcatcagccccagcagctggatcggcgtgttcagaaacagcagccaccacccctgggtgaccatgaacggcctggccttcaagcacgagatcaaggacagcgacaacgccgagctgaactgcgccgtgctgcaggtgaacagactgaagagcgcccagtgcggcagcagcatcatctaccactgcaagcacaagctgtag

SEQ ID NO: 86157 - DNA, 648 bp, synthetic construct; identical to SEQ ID NO: 86155
  misc_feature 1..648: note = Description of Artificial Sequence: Synthetic coding sequence
  source 1..648: mol_type = other DNA

SEQ ID NO: 86158 - DNA, 702 bp, synthetic construct; identical to SEQ ID NO: 86156
  misc_feature 1..702: note = Description of Artificial Sequence: Synthetic coding sequence
  source 1..702: mol_type = other DNA

SEQ ID NO: 86159 - DNA, 696 bp, synthetic construct
  misc_feature 1..696: note = Description of Artificial Sequence: Synthetic coding sequence
  source 1..696: mol_type = other DNA
atgaacaagcagagaggcaccttcagcgaggtgagcctggcccaggaccccaagagacagcagagaaagcccaagggcaacaagagcagcatcagcggcaccgagcaggagatcttccaggtggagctgaacctgcagaaccccagcctgaaccaccagggcatcgacaagatctacgactgccagggcctgctgcccccccccgagaagctgaccgccgaggtgctgggcatcatctgcatcgtgctgatggccaccgtgctgaagaccatcgtgctgatccccttcctggagcagaacaacagcagccccaacaccagaacccagaagaccagacactgcggccactgccccgaggagtggatcacctacagcaacagctgctactacatcggcaaggagagaagaacctgggaggagagcctgctggcctgcaccagcaagaacagcagcctgctgagcatcgacaacgaggaggagatgaagttcctggccagcatcctgcccagcagctggatcggcgtgttcagaaacagcagccaccacccctgggtgaccatcaacggcctggccttcaagcacaagatcaaggacagcgacaacgccgagctgaactgcgccgtgctgcaggtgaacagactgaagagcgcccagtgcggcagcagcatgatctaccactgcaagcacaagctgtag

SEQ ID NO: 86160 - DNA, 696 bp, synthetic construct
  misc_feature 1..696: note = Description of Artificial Sequence: Synthetic coding sequence
  source 1..696: mol_type = other DNA
atgaacaagcagagaggcaccttcagcgaggtgagcctggcccaggaccccaagagacagcagagaaagcccaagggcaacaagagcagcatcagcggcaccgagcaggagatcttccaggtggagctgaacctgcagaaccccagcctgaaccaccagggcatcgacaagatctacgactgccagggcctgctgcccccccccgagaagctgaccgccgaggtgctgggcatcatctgcatcgtgctgatggccaccgtgctgaagaccatcgtgctgatccccttcctggagcagaacaacttcagccccaacaccagaacccagaaggccagacactgcggccactgccccgaggagtggatcacctacagcaacagctgctactacatcggcaaggagagaagaacctgggaggagagcctgctggcctgcaccagcaagaacagcagcctgctgagcatcgacaacgaggaggagatgaagttcctggccagcatcctgcccagcagctggatcggcgtgttcagaaacagcagccaccacccctgggtgaccatcaacggcctggccttcaagcacaagatcaaggacagcgacaacgccgagctgaactgcgccgtgctgcaggtgaacagactgaagagcgcccagtgcggcagcagcatgatctaccactgcaagcacaagctgtag

SEQ ID NO: 86161 - DNA, 375 bp, synthetic construct
  misc_feature 1..375: note = Description of Artificial Sequence: Synthetic coding sequence
  source 1..375: mol_type = other DNA
atgatccccaccagacactgcggccactgccccgaggagtggatcacctacagcaacagctgctactacatcggcaaggagagaagaacctgggaggagagcctgctggcctgcaccagcaagaacagcagcctgctgagcatcgacaacgaggaggagatgaagttcctggccagcatcctgcccagcagctggatcggcgtgttcagaaacagcagccaccacccctgggtgaccatcaacggcctggccttcaagcacaagatcaaggacagcgacaacgccgagctgaactgcgccgtgctgcaggtgaacagactgaagagcgcccagtgcggcagcagcatgatctaccactgcaagcacaagctgtag

SEQ ID NO: 86162 - DNA, 774 bp, synthetic construct
  misc_feature 1..774: note = Description of Artificial Sequence: Synthetic coding sequence
  source 1..774: mol_type = other DNA
atgagcaagcagagaggcaccttcagcgaggtgagcctggcccaggaccccaagtggcagcagagaaagcccaagggcaacaagagcagcatcagcggcaccgagcaggagatcttccaggtggagctgaacctgcagaacgccagcctgaaccaccagggcatcgacaagatctacgactgccagggcctgctgcccccccccgagaagctgaccgccgaggtgctgggcatcatctgcatcgtgctgatggccaccgtgctgaagaccatcgtgctgatccccttcctggagcagaacaacagcagccccaacgccagaacccagaaggccagacactgcggccactgccccgaggagtggatcacctacagcaacagctgctactacatcggcaaggagagaagaacctgggaggagagcctgcaggcctgcgccagcaagaacagcagcagcctgctgtgcatcgacaacgaggaggagatgaagttcctggccagcatcctgcccagcagctggatcggcgtgttcagaaacagcagccaccacccctgggtgaccatcaacggcctggccttcaagcacgagatcaaggacagcgaccacgccgagagaaactgcgccatgctgcacgtgagaggcctgatcagcgaccagtgcggcagcagcagaatcatcgtgagcatcagcttcagaatcaaggccctggagctggccgtgcaccagatcaagttctacatctgcagcaacagaaacgacatcatgatcgcctag

SEQ ID NO: 86163 - DNA, 723 bp, synthetic construct
  misc_feature 1..723: note = Description of Artificial Sequence: Synthetic coding sequence
  source 1..723: mol_type = other DNA
atgagcaagcagagaggcaccttcagcgaggtgagcctggcccaggaccccaagtggcagcagagaaagcccaagggcaacaagagcagcatcagcggcaccgagcaggagatcttccaggtggagctgaacctgcagaacgccagcctgaaccaccagggcatcgacaagatctacgactgccagggcctgctgcccccccccgagaagctgaccgccgaggtgctgggcatcatctgcatcgtgctgatggccaccgtgctgaagaccatcgtgctgatccccttcctggagcagaacaacagcagccccaacaccagaacccagaagaccagacactgcggccactgccccgaggagtggatcacctacagcaacagctgctactacatcggcaaggagagaagaacctgggaggagagcctgcaggcctgcgccagcaagaacagcagcagcctgctgtgcatcgacaacgaggaggagatgaagttcctggccagcatcctgcccagcagctggatcggcgtgttcagaaacagcagccaccacccctgggtgaccatcaacggcctggccttcaagcacgagatcaaggacagcgaccacgccgagagaaactgcgccatgctgcacgtgagaggcctgatcagcgaccagtgcggcagcagcagaatcatcagaagaggcttcatcatgctgaccagactggtgctgaacagctag

SEQ ID NO: 86164 - DNA, 723 bp, synthetic construct
  misc_feature 1..723: note = Description of Artificial Sequence: Synthetic coding sequence
  source 1..723: mol_type = other DNA
atgagcaagcagagaggcaccttcagcgaggtgagcctggcccaggaccccaagtggcagcagagaaagcccaagggcaacaagagcagcatcagcggcaccgagcaggagatcttccaggtggagctgaacctgcagaacgccagcctgaaccaccagggcatcgacaagatctacgactgccagggcctgctgcccccccccgagaagctgaccgccgaggtgctgggcatcatctgcatcgtgctgatggccaccgtgctgaagaccatcgtgctgatccccttcctggagcagaacaacagcagccccaacgccagaacccagaaggccagacactgcggccactgccccgaggagtggatcacctacagcaacagctgctactacatcggcaaggagagaagaacctgggaggagagcctgcaggcctgcgccagcaagaacagcagcagcctgctgtgcatcgacaacgaggaggagatgaagttcctggccagcatcctgcccagcagctggatcggcgtgttcagaaacagcagccaccacccctgggtgaccatcaacggcctggccttcaagcacgagatcaaggacagcgaccacgccgagagaaactgcgccatgctgcacgtgagaggcctgatcagcgaccagtgcggcagcagcagaatcatcagaagaggcttcatcatgctgaccagactggtgctgaacagctag

SEQ ID NO: 86165 - DNA, 477 bp, synthetic construct
  misc_feature 1..477: note = Description of Artificial Sequence: Synthetic coding sequence
  source 1..477: mol_type = other DNA
atgaacaagcagagaggcacctacagcgaggtgagcctggcccaggaccccaagagacagcagagaaagctgaagggcaacaagatcagcatcagcggcaccaagcaggagatcttccaggtggagctgaacctgcagaacgccagcagcgaccaccagggcaacgacaagacctaccactgcaagggcctgctgcccccccccgagaagctgaccgccgaggtgctgggcatcatctgcatcgtgctgatggccaccgtgctgaagaccatcgtgctgatcccctgcatcggcgtgctggagcagaacaacttcagcctgaacagaagaatgcagaaggccagacactgcggccactgccccgaggagtggatcacctacagcaacagctgctactacatcggcaaggagagaagaacctgggaggagagagtgtgctggcccgtgctgagaagaaccctgatctgcttcctgtag

SEQ ID NO: 86166 - DNA, 540 bp, synthetic construct
  misc_feature 1..540: note = Description of Artificial Sequence: Synthetic coding sequence
  source 1..540: mol_type = other DNA
atggccgtgttcaagaccaccctgtggagactgatcagcggcaccctgggcatcatctgcctgagcctgatgagcaccctgggcatcctgctgaagaacagcttcaccaagctgagcatcgagcccgccttcacccccggccccaacatcgagctgcagaaggacagcgactgctgcagctgccaggagaagtgggtgggctacagatgcaactgctacttcatcagcagcgagcagaagacctggaacgagagcagacacctgtgcgccagccagaagagcagcctgctgcagctgcagaacaccgacgagctggacttcatgagcagcagccagcagttctactggatcggcctgagctacagcgaggagcacaccgcctggctgtgggagaacggcagcgccctgagccagtacctgttccccagcttcgagaccttcaacaccaagaactgcatcgcctacaaccccaacggcaacgccctggacgagagctgcgaggacaagaacagatacatctgcaagcagcagctgatctag

SEQ ID NO: 86167 - DNA, 447 bp, synthetic construct
  misc_feature 1..447: note = Description of Artificial Sequence: Synthetic coding sequence
  source 1..447: mol_type = other DNA
atggccgccttcaccaagctgagcatcgagcccgccttcacccccggccccaacatcgagctgcagaaggacagcgactgctgcagctgccaggagaagtgggtgggctacagatgcaactgctacttcatcagcagcgagcagaagacctggaacgagagcagacacctgtgcgccagccagaagagcagcctgctgcagctgcagaacaccgacgagctggacttcatgagcagcagccagcagttctactggatcggcctgagctacagcgaggagcacaccgcctggctgtgggagaacggcagcgccctgagccagtacctgttccccagcttcgagaccttcaacaccaagaactgcatcgcctacaaccccaacggcaacgccctggacgagagctgcgaggacaagaacagatacatctgcaagcagcagctgatctag

SEQ ID NO: 86168 - DNA, 540 bp, synthetic construct; identical to SEQ ID NO: 86166
  misc_feature 1..540: note = Description of Artificial Sequence: Synthetic coding sequence
  source 1..540: mol_type = other DNA

SEQ ID NO: 86169 - DNA, 543 bp, synthetic construct
  misc_feature 1..543: note = Description of Artificial Sequence: Synthetic coding sequence
  source 1..543: mol_type = other DNA
atggccgtgttcaagaccaccctgtggagactgatcagcggcaccctgggcatcatctgcctgagcctgatgagcaccctgggcatcctgctgaagaacagcttcaccaagctgagcatcgagcccgccttcacccccggccccaacatcgagctgcagaaggacagcgactgctgcagctgccaggagaagtgggtgggctacagatgcaactgctacttcatcagcagcgagcagaagacctggaacgagagcagacacctgtgcgccagccagaagagcagcctgctgcagctgcagaacaccgacgagctgcaggacttcatgagcagcagccagcagttctactggatcggcctgagctacagcgaggagcacaccgcctggctgtgggagaacggcagcgccctgagccagtacctgttccccagcttcgagaccttcaacaccaagaactgcatcgcctacaaccccaacggcaacgccctggacgagagctgcgaggacaagaacagatacatctgcaagcagcagctgatctag

SEQ ID NO: 86170 - DNA, 156 bp, synthetic construct
  misc_feature 1..156: note = Description of Artificial Sequence: Synthetic coding sequence
  source 1..156: mol_type = other DNA
agcgccctgagccagtacctgttccccagcttcgagaccttcaacaccaagaactgcatcgcctacaaccccaacggcaacgccctggacgagagctgcgaggacaagaacagatacatctacaaggtgctgctgtgctgccccggctggagctag

SEQ ID NO: 86171 - DNA, 420 bp, synthetic construct
  misc_feature 1..420: note = Description of Artificial Sequence: Synthetic coding sequence
  source 1..420: mol_type = other DNA
atggccgccttcaccaagctgagcatcgagcccgccttcacccccggccccaacatcgagctgcagaaggacagcgactgctgcagctgccaggagaagtgggtgggctacagatgcaactgctacttcatcagcagcgagcagaagacctggaacgagagcagacacctgtgcgccagccagaagagcagcctgctgcagctgcagaacaccgacgagctggacttcatgagcagcagccagcagttctactggatcggcctgagctacagcgaggagcacaccgcctggctgtgggagaacggcagcgccctgagccagtacctgttccccagcttcgagaccttcaacaccaagaactgcatcgcctacaaccccaacggcaacgccctggacgagagctgcgaggacaagaactag

SEQ ID NO: 86172 - DNA, 699 bp, synthetic construct
  misc_feature 1..699: note = Description of Artificial Sequence: Synthetic coding sequence
  source 1..699: mol_type = other DNA
atgcaggacgaggagagatacatgaccctgaacgtgcagagcaagaagagaagcagcgcccagaccagccagctgaccttcaaggactacagcgtgaccctgcactggtacaagatcctgctgggcatcagcggcaccgtgaacggcatcctgaccctgaccctgatcagcctgatcctgctggtgagccagggcgtgctgctgaagtgccagaagggcagctgcagcaacgccacccagtacgaggacaccggcgacctgaaggtgaacaacggcaccagaagaaacatcagcaacaaggacctgtgcgccagcagaagcgccgaccagaccgtgctgtgccagagcgagtggctgaagtaccagggcaagtgctgctactggttcagcaacgagatgaagagctggagcgacagctacgtgtactgcctggagagaaagagccacctgctgatcatccacgaccagctggagatggccttcatccagaagaacctgagacagctgaactacgtgtggatcggcctgaacttcaccagcctgaagatgacctggacctgggtggacggcagccccatcgacagcaagatcttcttcatcaagggccccgccaaggagaacagctgcgccgccatcaaggagagcaagatcttcagcgagacctgcagcagcgtgttcaagtggatctgccagtactag

SEQ ID NO: 86173 - DNA, 549 bp, synthetic construct
  misc_feature 1..549: note = Description of Artificial Sequence: Synthetic coding sequence
  source 1..549: mol_type = other DNA
atgcaggacgaggagagatacatgaccctgaacgtgcagagcaagaagagaagcagcgcccagaccagccagctgaccttcaaggactacagcgtgaccctgcactggtacaagatcctgctgggcatcagcggcaccgtgaacggcatcctgaccctgaccctgatcagcctgatcctgctggtgctgtgccagagcgagtggctgaagtaccagggcaagtgctgctactggttcagcaacgagatgaagagctggagcgacagctacgtgtactgcctggagagaaagagccacctgctgatcatccacgaccagctggagatggccttcatccagaagaacctgagacagctgaactacgtgtggatcggcctgaacttcaccagcctgaagatgacctggacctgggtggacggcagccccatcgacagcaagatcttcttcatcaagggccccgccaaggagaacagctgcgccgccatcaaggagagcaagatcttcagcgagacctgcagcagcgtgttcaagtggatctgccagtactag

SEQ ID NO: 86174 - DNA, 195 bp, synthetic construct
  misc_feature 1..195: note = Description of Artificial Sequence: Synthetic coding sequence
  source 1..195: mol_type = other DNA
atgcaggacgaggagagatacatgaccctgaacgtgcagagcaagaagagaagcagcgcccagaccagccagctgaccttcaaggactacagcgtgaccctgcactggtacaagatcctgctgggcatcagcggcaccgtgaacggcatcctgaccctgaccctgatcagcctgatcctgctggacagcagctag

SEQ ID NO: 86175 - DNA, 588 bp, synthetic construct
  misc_feature 1..588: note = Description of Artificial Sequence: Synthetic coding sequence
  source 1..588: mol_type = other DNA
atgaccgacagcgtgatctacagcatgctggagctgcccaccgccacccaggcccagaacgactacggcccccagcagaagagcagcagcagcagacccagctgcagctgcctggtggccatcgccctgggcctgctgaccgccgtgctgctgagcgtgctgctgtaccagtggatcctgtgccagggcagcaactacagcacctgcgccagctgccccagctgccccgacagatggatgaagtacggcaaccactgctactacttcagcgtggaggagaaggactggaacagcagcctggagttctgcctggccagagacagccacctgctggtgatcaccgacaaccaggagatgagcctgctgcaggtgttcctgagcgaggccttctgctggatcggcctgagaaacaacagcggctggagatgggaggacggcagccccctgaacttcagcagaatcagcagcaacagcttcgtgcagacctgcggcgccatcaacaagaacggcctgcaggccagcagctgcgaggtgcccctgcactgggtgtgcaagaagtgccccttcgccgaccaggccctgttctag

SEQ ID NO: 86176 - DNA, 570 bp, synthetic construct
  misc_feature 1..570: note = Description of Artificial Sequence: Synthetic coding sequence
  source 1..570: mol_type = other DNA
atgaccgacagcgtgatctacagcatgctggagctgcccaccgccacccaggcccagaacgactacggcccccagcagaagagcagcagcagcagacccagctgcagctgcctggtggccatcgccctgggcctgctgaccgccgtgctgctgagcgtgctgctgtaccagtggatcctgtgccagggcagcaactacagcacctgcgccagctgccccagctgccccgacagatggatgaagtacggcaaccactgctactacttcagcgtggaggagaaggactggaacagcagcctggagttctgcctggccagagacagccacctgctggtgatcaccgacaaccaggagatgagcctgctgcaggtgttcctgagcgaggccttctgctggatcggcctgagaaacaacagcggctggagatgggaggacggcagccccctgaacttcagcagaatcagcagcaacagcttcgtgcagacctgcggcgccatcaacaagaacggcctgcaggccagcagctgcgaggtgcccctgcactgggtgtgcaagaaggtgagactgtag

SEQ ID NO: 86177 - DNA, 651 bp, synthetic construct
  misc_feature 1..651: note = Description of Artificial Sequence: Synthetic coding sequence
  source 1..651: mol_type = other DNA
atgggctggatcagaggcagaagaagcagacacagctgggagatgagcgagttccacaactacaacctggacctgaagaagagcgacttcagcaccagatggcagaagcagagatgccccgtggtgaagagcaagtgcagagagaacgccagccccttcttcttctgctgcttcatcgccgtggccatgggcatcagattcatcatcatggtgaccatctggagcgccgtgttcctgaacagcctgttcaaccaggaggtgcagatccccctgaccgagagctactgcggcccctgccccaagaactggatctgctacaagaacaactgctaccagttcttcgacgagagcaagaactggtacgagagccaggccagctgcatgagccagaacgccagcctgctgaaggtgtacagcaaggaggaccaggacctgctgaagctggtgaagagctaccactggatgggcctggtgcacatccccaccaacggcagctggcagtgggaggacggcagcatcctgagccccaacctgctgaccatcatcgagatgcagaagggcgactgcgccctgtacgccagcagcttcaagggctacatcgagaactgcagcacccccaacacctacatctgcatgcagagaaccgtgtag

SEQ ID NO: 86178 - DNA, 243 bp, synthetic construct
  misc_feature 1..243: note = Description of Artificial Sequence: Synthetic coding sequence
  source 1..243: mol_type = other DNA
atgggctggatcagaggcagaagaagcagacacagctgggagatgagcgagttccacaactacaacctggacctgaagaagagcgacttcagcaccagatggcagaagcagagatgccccgtggtgaagagcaagtgcagagagaacgccagccccttcttcttctgctgcttcatcgccgtggccatgggcatcagattcatcatcatggtgaccatctggagcgccgtgttcctgaactag

SEQ ID NO: 86179 - DNA, 651 bp, synthetic construct; identical to SEQ ID NO: 86177
  misc_feature 1..651: note = Description of Artificial Sequence: Synthetic coding sequence
  source 1..651: mol_type = other DNA

SEQ ID NO: 86180 - DNA, 537 bp, synthetic construct
  misc_feature 1..537: note = Description of Artificial Sequence: Synthetic coding sequence
  source 1..537: mol_type = other DNA
atggacagacccggccccggcagcgccagacccggcagaaccgtgcacgtgtggggctacagagtggagtggaaggtgagaaacggcagaaagctgcagcccagcgagtgggccggcagaggcgacctgggcggcttcaagagaagatggaaggacaccagagccaccgtgggcaccaccttcagaagaagaagcagagtgagcctggtgggcgagctgagcaagttccccctgcccagcgacagcagcggcggcaagagcagcagcagcttcgccagaggcgccctggcctggtgcagacagagaaaccccaaccccagctgcgccgccgccgagaccggcgccagaaccagcctgcccaaggagagatgcagaggctggagactgggcaactggctgcacaagcacccccaccccaacacctgccccagactgcccgcctgctggctgccccccatcctgaccgagagaggcgagagagtgcccaagctggtgcccctgctggcctgctaccccaagagcaagcccaaggactag

SEQ ID NO: 86181 - DNA, 1902 bp, synthetic construct
  misc_feature 1..1902: note = Description of Artificial Sequence: Synthetic coding sequence
  source 1..1902: mol_type = other DNA
atgctgagaatgagagtgcccgccctgctggtgctgctgttctgcttcagaggcagagccggccccagcccccacttcctgcagcagcccgaggacctggtggtgctgctgggcgaggaggccagactgccctgcgccctgggcgcctactggggcctggtgcagtggaccaagagcggcctggccctgggcggccagagagacctgcccggctggagcagatactggatcagcggcaacgccgccaacggccagcacgacctgcacatcagacccgtggagctggaggacgaggccagctacgagtgccaggccacccaggccggcctgagaagcagacccgcccagctgcacgtgctggtgccccccgaggccccccaggtgctgggcggccccagcgtgagcctggtggccggcgtgcccgccaacctgacctgcagaagcagaggcgacgccagacccacccccgagctgctgtggttcagagacggcgtgctgctggacggcgccaccttccaccagaccctgctgaaggagggcacccccggcagcgtggagagcaccctgaccctgacccccttcagccacgacgacggcgccaccttcgtgtgcagagccagaagccaggccctgcccaccggcagagacaccgccatcaccctgagcctgcagtacccccccgaggtgaccctgagcgccagcccccacaccgtgcaggagggcgagaaggtgatcttcctgtgccaggccaccgcccagccccccgtgaccggctacagatgggccaagggcggcagccccgtgctgggcgccagaggccccagactggaggtggtggccgacgccagcttcctgaccgagcccgtgagctgcgaggtgagcaacgccgtgggcagcgccaacagaagcaccgccctggacgtgctgttcggccccatcctgcaggccaagcccgagcccgtgagcgtggacgtgggcgaggacgccagcttcagctgcgcctggagaggcaaccccctgcccagagtgacctggaccagaagaggcggcgcccaggtgctgggcagcggcgccaccctgagactgcccagcgtgggccccgaggacgccggcgactacgtgtgcagagccgaggccggcctgagcggcctgagaggcggcgccgccgaggccagactgaccgtgaacgccccccccgtggtgaccgccctgcacagcgcccccgccttcctgagaggccccgccagactgcagtgcctggtgttcgccagccccgcccccgacgccgtggtgtggagctgggacgagggcttcctggaggccggcagccagggcagattcctggtggagaccttccccgcccccgagagcagaggcggcctgggccccggcctgatcagcgtgctgcacatcagcggcacccaggagagcgacttcagcagaagcttcaactgcagcgccagaaacagactgggcgagggcggcgcccaggccagcctgggcagaagagacctgctgcccaccgtgagaatcgtggccggcgtggccgccgccaccaccaccctgctgatggtgatcaccggcgtggccctgtgctgctggagacacagcaaggccagcgccagcttcagcgagcagaagaacctgatgagaatccccggcagcagcgacggcagcagcagcagaggccccgaggaggaggagaccggcagcagagaggacagaggccccatcgtgcacaccgaccacagcgacctggtgctggaggagaagggcaccctggagaccaaggaccccaccaacggctactacaaggtgagaggcgtgagcccccccgccagccccgacagcagagtgaccagcttccagtggaagagccccggcatcagcaacctgccctag

SEQ ID NO: 86182 - DNA, 660 bp, synthetic construct
  misc_feature 1..660: note = Description of Artificial Sequence: Synthetic coding sequence
  source 1..660: mol_type = other DNA
atgctgagaatgagagtgcccgccctgctggtgctgctgttctgcttcagaggcagagccggccccagcccccacttcctgcagcagcccgaggacctggtggtgctgctgggcgagggcggcgcccaggccagcctgggcagaagagccagcgccagcttcagcgagcagaagaacctgatgagaatccccggcagcagcgacggcagcagcagcagaggccccgaggaggaggagaccggcagcagagaggacagaggccccatcgtgcacaccgaccacagcgacctggtgctggaggagaagggcaccctggagaccaaggaccccaccaacggctactacaaggtgagaggcgtgagcgtgagcctgagcctgggcgaggcccccggcggcggcctgttcctgcccccccccagccccctgggcccccccggcacccccaccttctacgacttcaacccccacctgggcatggtgcccccctgcagactgtacagagccagagccggctacctgaccaccccccaccccagagccttcaccagctacatcaagcccaccagcttcggcccccccgacctggcccccggcaccccccccttcccctacgccgccttccccacccccagccaccccagactgcagacccacgtgtag

SEQ ID NO: 86183 - DNA, 2067 bp, synthetic construct
  misc_feature 1..2067: note = Description of Artificial Sequence: Synthetic coding sequence
  source 1..2067: mol_type = other DNA
atgctgagaatgagagtgcccgccctgctggtgctgctgttctgcttcagaggcagagccggccccagcccccacttcctgcagcagcccgaggacctggtggtgctgctgggcgaggaggccagactgccctgcgccctgggcgcctactggggcctggtgcagtggaccaagagcggcctggccctgggcggccagagagacctgcccggctggagcagatactggatcagcggcaacgccgccaacggccagcacgacctgcacatcagacccgtggagctggaggacgaggccagctacgagtgccaggccacccaggccggcctgagaagcagacccgcccagctgcacgtgctggtgccccccgaggccccccaggtgctgggcggccccagcgtgagcctggtggccggcgtgcccgccaacctgacctgcagaagcagaggcgacgccagacccacccccgagctgctgtggttcagagacggcgtgctgctggacggcgccaccttccaccagaccctgctgaaggagggcacccccggcagcgtggagagcaccctgaccctgcccaccggcagagacaccgccatcaccctgagcctgcagtacccccccgaggtgaccctgagcgccagcccccacaccgtgcaggagggcgagaaggtgatcttcctgtgccaggccaccgcccagccccccgtgaccggctacagatgggccaagggcggcagccccgtgctgggcgccagaggccccagactggaggtggtggccgacgccagcttcctgaccgagcccgtgagctgcgaggtgagcaacgccgtgggcagcgccaacagaagcaccgccctggacgtgctgttcggccccatcctgcaggccaagcccgagcccgtgagcgtggacgtgggcgaggacgccagcttcagctgcgcctggagaggcaaccccctgcccagagtgacctggaccagaagaggcggcgcccaggtgctgggcagcggcgccaccctgagactgcccagcgtgggccccgaggacgccggcgactacgtgtgcagagccgaggccggcctgagcggcctgagaggcggcgccgccgaggccagactgaccgtgaacgccccccccgtggtgaccgccctgcacagcgcccccgccttcctgagaggccccgccagactgcagtgcctggtgttcgccagccccgcccccgacgccgtggtgtggagctgggacgagggcttcctggaggccggcagccagggcagattcctggtggagaccttccccgcccccgagagcagaggcggcctgggccccggcctgatcagcgtgctgcacatcagcggcacccaggagagcgacttcagcagaagcttcaactgcagcgccagaaacagactgggcgagggcggcgcccaggccagcctgggcagaagagacctgctgcccaccgtgagaatcgtggccggcgtggccgccgccaccaccaccctgctgatggtgatcaccggcgtggccctgtgctgctggagacacagcaaggccagcgccagcttcagcgagcagaagaacctgatgagaatccccggcagcagcgacggcagcagcagcagaggccccgaggaggaggagaccggcagcagagaggacagaggccccatcgtgcacaccgaccacagcgacctggtgctggaggagaagggcaccctggagaccaaggaccccaccaacggctactacaaggtgagaggcgtgagcgtgagcctgagcctgggcgaggcccccggcggcggcctgttcctgcccccccccagccccctgggcccccccggcacccccaccttctacgacttcaacccccacctgggcatggtgcccccctgcagactgtacagagccagagccggctacctgaccaccccccaccccagagccttcaccagctacatcaagcccaccagcttcggcccccccgacctggcccccggcaccccccccttcccctacgccgccttccccacccccagccaccccagactgcagacccacgtgtag

SEQ ID NO: 86184 - DNA, 1752 bp, synthetic construct
  misc_feature 1..1752: note = Description of Artificial Sequence: Synthetic coding sequence
  source 1..1752: mol_type = other DNA
atgctgagaatgagagtgcccgccctgctggtgctgctgttctgcttcagaggcagagccggctggagcagatactggatcagcggcaacgccgccaacggccagcacgacctgcacatcagacccgtggagctggaggacgaggccagctacgagtgccaggccacccaggccggcctgagaagcagacccgcccagctgcacgtgctggtgccccccgaggccccccaggtgctgggcggccccagcgtgagcctggtggccggcgtgcccgccaacctgacctgcagaagcagaggcgacgccagacccacccccgagctgctgtggttcagagacggcgtgctgctggacggcgccaccttccaccagaccctgctgaaggagggcacccccggcagcgtggagagcaccctgaccctgacccccttcagccacgacgacggcgccaccttcgtgtgcagagccagaagccaggccctgcccaccggcagagacaccgccatcaccctgagcctgcagtacccccccgaggtgaccctgagcgccagcccccacaccgtgcaggagggcgagaaggtgatcttcctgtgccaggccaccgcccagccccccgtgaccggctacagatgggccaagggcggcagccccgtgctgggcgccagaggccccagactggaggtggtggccgacgccagcttcctgaccgagcccgtgagctgcgaggtgagcaacgccgtgggcagcgccaacagaagcaccgccctggacgtgctgttcggccccatcctgcaggccaagcccgagcccgtgagcgtggacgtgggcgaggacgccagcttcagctgcgcctggagaggcaaccccctgcccagagtgacctggaccagaagaggcggcgcccaggtgctgggcagcggcgccaccctgagactgcccagcgtgggccccgaggacgccggcgactacgtgtgcagagccgaggccggcctgagcggcctgagaggcggcgccgccgaggccagactgaccgtgaacgccccccccgtggtgaccgccctgcacagcgcccccgccttcctgagaggccccgccagactgcagtgcctggtgttcgccagccccgcccccgacgccgtggtgtggagctgggacgagggcttcctggaggccggcagccagggcagattcctggtggagaccttccccgcccccgagagcagaggcggcctgggccccggcctgatcagcgtgctgcacatcagcggcacccaggagagcgacttcagcagaagcttcaactgcagcgccagaaacagactgggcgagggcggcgcccaggccagcctgggcagaagagacctgctgcccaccgtgagaatcgtggccggcgtggccgccgccaccaccaccctgctgatggtgatcaccggcgtggccctgtgctgctggagacacagcaaggccagcgccagcttcagcgagcagaagaacctgatgagaatccccggcagcagcgacggcagcagcagcagaggccccgaggaggaggagaccggcagcagagaggacagaggccccatcgtgcacaccgaccacagcgacctggtgctggaggagaagggcaccctggagaccaaggaccccaccaacggctactacaaggtgagaggcgtgagcccccccgccagccccgacagcagagtgaccagcttccagtggaagagccccggcatcagcaacctgccctag

SEQ ID NO: 86185 - DNA, 2127 bp, synthetic construct
  misc_feature 1..2127: note = Description of Artificial Sequence: Synthetic coding sequence
  source 1..2127: mol_type = other DNA
atgctgagaatgagagtgcccgccctgctggtgctgctgttctgcttcagaggcagagccggccccagcccccacttcctgcagcagcccgaggacctggtggtgctgctgggcgaggaggccagactgccctgcgccctgggcgcctactggggcctggtgcagtggaccaagagcggcctggccctgggcggccagagagacctgcccggctggagcagatactggatcagcggcaacgccgccaacggccagcacgacctgcacatcagacccgtggagctggaggacgaggccagctacgagtgccaggccacccaggccggcctgagaagcagacccgcccagctgcacgtgctggtgccccccgaggccccccaggtgctgggcggccccagcgtgagcctggtggccggcgtgcccgccaacctgacctgcagaagcagaggcgacgccagacccacccccgagctgctgtggttcagagacggcgtgctgctggacggcgccaccttccaccagaccctgctgaaggagggcacccccggcagcgtggagagcaccctgaccctgacccccttcagccacgacgacggcgccaccttcgtgtgcagagccagaagccaggccctgcccaccggcagagacaccgccatcaccctgagcctgcagtacccccccgaggtgaccctgagcgccagcccccacaccgtgcaggagggcgagaaggtgatcttcctgtgccaggccaccgcccagccccccgtgaccggctacagatgggccaagggcggcagccccgtgctgggcgccagaggccccagactggaggtggtggccgacgccagcttcctgaccgagcccgtgagctgcgaggtgagcaacgccgtgggcagcgccaacagaagcaccgccctggacgtgctgttcggccccatcctgcaggccaagcccgagcccgtgagcgtggacgtgggcgaggacgccagcttcagctgcgcctggagaggcaaccccctgcccagagtgacctggaccagaagaggcggcgcccaggtgctgggcagcggcgccaccctgagactgcccagcgtgggccccgaggacgccggcgactacgtgtgcagagccgaggccggcctgagcggcctgagaggcggcgccgccgaggccagactgaccgtgaacgccccccccgtggtgaccgccctgcacagcgcccccgccttcctgagaggccccgccagactgcagtgcctggtgttcgccagccccgcccccgacgccgtggtgtggagctgggacgagggcttcctggaggccggcagccagggcagattcctggtggagaccttccccgcccccgagagcagaggcggcctgggccccggcctgatcagcgtgctgcacatcagcggcacccaggagagcgacttcagcagaagcttcaactgcagcgccagaaacagactgggcgagggcggcgcccaggccagcctgggcagaagagacctgctgcccaccgtgagaatcgtggccggcgtggccgccgccaccaccaccctgctgatggtgatcaccggcgtggccctgtgctgctggagacacagcaaggccagcgccagcttcagcgagcagaagaacctgatgagaatccccggcagcagcgacggcagcagcagcagaggccccgaggaggaggagaccggcagcagagaggacagaggccccatcgtgcacaccgaccacagcgacctggtgctggaggagaagggcaccctggagaccaaggaccccaccaacggctactacaaggtgagaggcgtgagcgtgagcctgagcctgggcgaggcccccggcggcggcctgttcctgcccccccccagccccctgggcccccccggcacccccaccttctacgacttcaacccccacctgggcatggtgcccccctgcagactgtacagagccagagccggctacctgaccaccccccaccccagagccttcaccagctacatcaagcccaccagcttcggcccccccgacctggcccccggcaccccccccttcccctacgccgccttccccacccccagccaccccagactgcagacccacgtgtag

SEQ ID NO: 86186 - DNA, 738 bp, synthetic construct
  misc_feature 1..738: note = Description of Artificial Sequence: Synthetic coding sequence
  source 1..738: mol_type = other DNA
atggccgtgatcatcggcgtggccgtgggcgccggcgtggccttcctggtgctgatggccaccatcgtggccttctgctgcgccagaagccagagaaacctgaagggcgtggtgagcgccaagaacgacatcagagtggagatcgtgcacaaggagcccgccagcggcagagagggcgaggagcacagcaccatcaagcagctgatgatggacagaggcgagttccagcaggacagcgtgctgaagcagctggaggtgctgaaggaggaggagaaggagttccagaacctgaaggaccccaccaacggctactacagcgtgaacaccttcaaggagcaccacagcacccccaccatcagcctgagcagctgccagcccgacctgagacccgccggcaagcagagagtgcccaccggcatgagcttcaccaacatctacagcaccctgagcggccagggcagactgtacgactacggccagagattcgtgctgggcatgggcagcagcagcatcgagctgtgcgagagagagttccagagaggcagcctgagcgacagcagcagcttcctggacacccagtgcgacagcagcgtgagcagcagcggcaagcaggacggctacgtgcagttcgacaaggccagcaaggccagcgccagcagcagccaccacagccagagcagcagccagaacagcgaccccagcagacccctgcagagaagaatgcagacccacgtgtag

SEQ ID NO: 86187 - DNA, 2337 bp, synthetic construct
  misc_feature 1..2337: note = Description of Artificial Sequence: Synthetic coding sequence
  source 1..2337: mol_type = other DNA
atgaagcccttccagctggacctgctgttcgtgtgcttcttcctgttcagccaggagctgggcctgcagaagagaggctgctgcctggtgctgggctacatggccaaggacaagttcagaagaatgaacgagggccaggtgtacagcttcagccagcagccccaggaccaggtggtggtgagcggccagcccgtgaccctgctgtgcgccatccccgagtacgacggcttcgtgctgtggatcaaggacggcctggccctgggcgtgggcagagacctgagcagctacccccagtacctggtggtgggcaaccacctgagcggcgagcaccacctgaagatcctgagagccgagctgcaggacgacgccgtgtacgagtgccaggccatccaggccgccatcagaagcagacccgccagactgaccgtgctggtgccccccgacgaccccgtgatcctgggcggccccgtgatcagcctgagagccggcgaccccctgaacctgacctgccacgccgacaacgccaagcccgccgccagcatcatctggctgagaaagggcgaggtgatcaacggcgccacctacagcaagaccctgctgagagacggcaagagagagagcatcgtgagcaccctgttcatcagccccggcgacgtggagaacggccagagcatcgtgtgcagagccaccaacaaggccatccccggcggcaaggagaccagcgtgaccatcgacatccagcacccccccctggtgaacctgagcgtggagccccagcccgtgctggaggacaacgtggtgaccttccactgcagcgccaaggccaaccccgccgtgacccagtacagatgggccaagagaggccagatcatcaaggaggccagcggcgaggtgtacagaaccaccgtggactacacctacttcagcgagcccgtgagctgcgaggtgaccaacgccctgggcagcaccaacctgagcagaaccgtggacgtgtacttcggccccagaatgaccaccgagccccagagcctgctggtggacctgggcagcgacgccatcttcagctgcgcctggaccggcaaccccagcctgaccatcgtgtggatgaagagaggcagcggcgtggtgctgagcaacgagaagaccctgaccctgaagagcgtgagacaggaggacgccggcaagtacgtgtgcagagccgtggtgcccagagtgggcgccggcgagagagaggtgaccctgaccgtgaacggcccccccatcatcagcagcacccagacccagcacgccctgcacggcgagaagggccagatcaagtgcttcatcagaagcacccccccccccgacagaatcgcctggagctggaaggagaacgtgctggagagcggcaccagcggcagatacaccgtggagaccatcagcaccgaggagggcgtgatcagcaccctgaccatcagcaacatcgtgagagccgacttccagaccatctacaactgcaccgcctggaacagcttcggcagcgacaccgagatcatcagactgaaggagcagggcagcgagatgaagagcggcgccggcctggaggccgagagcgtgcccatggccgtgatcatcggcgtggccgtgggcgccggcgtggccttcctggtgctgatggccaccatcgtggccttctgctgcgccagaagccagagaaacctgaagggcgtggtgagcgccaagaacgacatcagagtggagatcgtgcacaaggagcccgccagcggcagagagggcgaggagcacagcaccatcaagcagctgatgatggacagaggcgagttccagcaggacagcgtgctgaagcagctggaggtgctgaaggaggaggagaaggagttccagaacctgaaggaccccaccaacggctactacagcgtgaacaccttcaaggagcaccacagcacccccaccatcagcctgagcagctgccagcccgacctgagacccgccggcaagcagagagtgcccaccggcatgagcttcaccaacatctacagcaccctgagcggccagggcagactgtacgactacggccagagattcgtgctgggcatgggcagcagcagcatcgagctgtgcgagagagagttccagagaggcagcctgagcgacagcagcagcttcctggacacccagtgcgacagcagcgtgagcagcagcggcaagcaggacggctacgtgcagttcgacaaggccagcaaggccagcgccagcagcagccaccacagccagagcagcagccagaacagcgaccccagcagacccctgcagagaagaatgcagacccacgtgtag

SEQ ID NO: 86188 - DNA, 1803 bp, synthetic construct
  misc_feature 1..1803: note = Description of Artificial Sequence: Synthetic coding sequence
  source 1..1803: mol_type = other DNA
atgaagcccttccagctggacctgctgttcgtgtgcttcttcctgttcagccaggagctgggcctgcagaagagaggctgctgcctggtgctgggctacatggccaaggacaagttcagaagaatgaacgagggccaggtgtacagcttcagccagcagccccaggaccaggtggtggtgagcggccagcccgtgaccctgctgtgcgccatccccgagtacgacggcttcgtgctgtggatcaaggacggcctggccctgggcgtgggcagagacctgagcagctacccccagtacctggtggtgggcaaccacctgagcggcgagcaccacctgaagatcctgagagccgagctgcaggacgacgccgtgtacgagtgccaggccatccaggccgccatcagaagcagacccgccagactgaccgtgctggtgccccccgacgaccccgtgatcctgggcggccccgtgatcagcctgagagccggcgaccccctgaacctgacctgccacgccgacaacgccaagcccgccgccagcatcatctggctgagaaagggcgaggtgatcaacggcgccacctacagcaagaccctgctgagagacggcaagagagagagcatcgtgagcaccctgttcatcagccccggcgacgtggagaacggccagagcatcgtgtgcagagccaccaacaaggccatccccggcggcaaggagaccagcgtgaccatcgacatccagcacccccccctggtgaacctgagcgtggagccccagcccgtgctggaggacaacgtggtgaccttccactgcagcgccaaggccaaccccgccgtgacccagtacagatgggccaagagaggccagatcatcaaggaggccagcggcgaggtgtacagaaccaccgtggactacacctacttcagcgagcccgtgagctgcgaggtgaccaacgccctgggcagcaccaacctgagcagaaccgtggacgtgtacttcggccccagaatgaccaccgagccccagagcctgctggtggacctgggcagcgacgccatcttcagctgcgcctggaccggcaaccccagcctgaccatcgtgtggatgaagagaggcagcggcgtggtgctgagcaacgagaagaccctgaccctgaagagcgtgagacaggaggacgccggcaagtacgtgtgcagagccgtggtgcccagagtgggcgccggcgagagagaggtgaccctgaccgtgaacggcccccccatcatcagcagcacccagacccagcacgccctgcacggcgagaagggccagatcaagtgcttcatcagaagcacccccccccccgacagaatcgcctggagctggaaggagaacgtgctggagagcggcaccagcggcagatacaccgtggagaccatcagcaccgaggagggcgtgatcagcaccctgaccatcagcaacatcgtgagagccgacttccagaccatctacaactgcaccgcctggaacagcttcggcagcgacaccgagatcatcagactgaaggagcagggcagcgagatgaagagcggcgccggcctggaggccgagagcgtgcccatggccgtgatcatcggcgtggccgtgggcgccggcgtggccttcctggtgctgatggccaccatcgtggccttctgctgcgccagaagccagagaagcaccggcggcagaagcggcatcagcggcagaggcaccgagaagaaggccagactgagactgcccagaagagccagcaagcaggagtgcaacgagcagggcagctag

SEQ ID NO: 86189 - DNA, 2301 bp, synthetic construct
  misc_feature 1..2301: note = Description of Artificial Sequence: Synthetic coding sequence
  source 1..2301: mol_type = other DNA
atgaagcccttccagctggacctgctgttcgtgtgcttcttcctgttcagccaggagctgggcctgcagaagagaggctgctgcctggtgctgggctacatggccaaggacaagttcagaagaatgaacgagggccaggtgtacagcttcagccagcagccccaggaccaggtggtggtgagcggccagcccgtgaccctgctgtgcgccatccccgagtacgacggcttcgtgctgtggatcaaggacggcctggccctgggcgtgggcagagacctgagcagctacccccagtacctggtggtgggcaaccacctgagcggcgagcaccacctgaagatcctgagagccgagctgcaggacgacgccgtgtacgagtgccaggccatccaggccgccatcagaagcagacccgccagactgaccgtgctggtgccccccgacgaccccgtgatcctgggcggccccgtgatcagcctgagagccggcgaccccctgaacctgacctgccacgccgacaacgccaagcccgccgccagcatcatctggctgagaaagggcgaggtgatcaacggcgccacctacagcaagaccctgctgagagacggcaagagagagagcatcgtgagcaccctgttcatcagccccggcgacgtggagaacggccagagcatcgtgtgcagagccaccaacaaggccatccccggcggcaaggagaccagcgtgaccatcgacatccagcacccccccctggtgaacctgagcgtggagccccagcccgtgctggaggacaacgtggtgaccttccactgcagcgccaaggccaaccccgccgtgacccagtacagatgggccaagagaggccagatcatcaaggaggccagcggcgaggtgtacagaaccaccgtggactacacctacttcagcgagcccgtgagctgcgaggtgaccaacgccctgggcagcaccaacctgagcagaaccgtggacgtgtacttcggccccagaatgaccaccgagccccagagcctgctggtggacctgggcagcgacgccatcttcagctgcgcctggaccggcaaccccagcctgaccatcgtgtggatgaagagaggcagcggcgtggtgctgagcaacgagaagaccctgaccctgaagagcgtgagacaggaggacgccggcaagtacgtgtgcagagccgtggtgcccagagtgggcgccggcgagagagaggtgaccctgaccgtgaacggcccccccatcatcagcagcacccagacccagcacgccctgcacggcgagaagggccagatcaagtgcttcatcagaagcacccccccccccgacagaatcgcctggagctggaaggagaacgtgctggagagcggcaccagcggcagatacaccgtggagaccatcagcaccgaggagggcgtgatcagcaccctgaccatcagcaacatcgtgagagccgacttccagaccatctacaactgcaccgcctggaacagcttcggcagcgacaccgagatcatcagactgaaggagcaggagagcgtgcccatggccgtgatcatcggcgtggccgtgggcgccggcgtggccttcctggtgctgatggccaccatcgtggccttctgctgcgccagaagccagagaaacctgaagggcgtggtgagcgccaagaacgacatcagagtggagatcgtgcacaaggagcccgccagcggcagagagggcgaggagcacagcaccatcaagcagctgatgatggacagaggcgagttccagcaggacagcgtgctgaagcagctggaggtgctgaaggaggaggagaaggagttccagaacctgaaggaccccaccaacggctactacagcgtgaacaccttcaaggagcaccacagcacccccaccatcagcctgagcagctgccagcccgacctgagacccgccggcaagcagagagtgcccaccggcatgagcttcaccaacatctacagcaccctgagcggccagggcagactgtacgactacggccagagattcgtgctgggcatgggcagcagcagcatcgagctgtgcgagagagagttccagagaggcagcctgagcgacagcagcagcttcctggacacccagtgcgacagcagcgtgagcagcagcggcaagcaggacggctacgtgcagttcgacaaggccagcaaggccagcgccagcagcagccaccacagccagagcagcagccagaacagcgaccccagcagacccctgcagagaagaatgcagacccacgtgtag

SEQ ID NO: 86190 - DNA, 1182 bp, synthetic construct
  misc_feature 1..1182: note = Description of Artificial Sequence: Synthetic coding sequence
  source 1..1182: mol_type = other DNA
atgggcaagagcgacttcctgacccccaaggccatcgccaacagaatcaagagcaagggcctgcagaagctgagatggtactgccagatgtgccagaagcagtgcagagacgagaacggcttcaagtgccactgcatgagcgagagccaccagagacagctgctgctggccagcgagaacccccagcagttcatggactacttcagcgaggagttcagaaacgacttcctggagctgctgagaagaagattcggcaccaagagagtgcacaacaacatcgtgtacaacgagtacatcagccacagagagcacatccacatgaacgccacccagtgggagaccctgaccgacttcaccaagtggctgggcagagagggcctgtgcaaggtggacgagacccccaagggctggtacatccagtacatcgacagagaccccgagaccatcagaagacagctggagctggagaagaagaagaagcaggacctggacgacgaggagaagaccgccaagttcatcgaggagcaggtgagaagaggcctggagggcaaggagcaggaggtgcccaccttcaccgagctgagcagagagaacgacgaggagaaggtgaccttcaacctgagcaagggcgcctgcagcagcagcggcgccaccagcagcaagagcagcaccctgggccccagcgccctgaagaccatcggcagcagcgccagcgtgaagagaaaggagagcagccagagcagcacccagagcaaggagaagaagaagaagaagagcgccctggacgagatcatggagatcgaggaggagaagaagagaaccgccagaaccgactactggctgcagcccgagatcatcgtgaagatcatcaccaagaagctgggcgagaagtaccacaagaagaaggccatcgtgaaggaggtgatcgacaagtacaccgccgtggtgaagatgatcgacagcggcgacaagctgaagctggaccagacccacctggagaccgtgatccccgcccccggcaagagaatcctggtgctgaacggcggctacagaggcaacgagggcaccctggagagcatcaacgagaagaccttcagcgccaccatcgtgatcgagaccggccccctgaagggcagaagagtggagggcatccagtacgaggacatcagcaagctggcctag

SEQ ID NO: 86191 - DNA, 1125 bp, synthetic construct
  misc_feature 1..1125: note = Description of Artificial Sequence: Synthetic coding sequence
  source 1..1125: mol_type = other DNA
atgggcaagagcgacttcctgacccccaaggccatcgccaacagaatcaagagcaagggcctgcagaagctgagatggtactgccagatgtgccagaagcagtgcagagacgagaacggcttcaagtgccactgcatgagcgagagccaccagagacagctgctgctggccagcgagaacccccagcagttcatggactacttcagcgaggagttcagaaacgacttcctggagctgctgagaagaagattcggcaccaagagagtgcacaacaacatcgtgtacaacgagtacatcagccacagagagcacatccacatgaacgccacccagtgggagaccctgaccgacttcaccaagtggctgggcagagagggcctgtgcaaggtggacgagacccccaagggctggtacatccagtacatcgacagagaccccgagaccatcagaagacagctggagctggagaagaagaagaagcaggacctggacgacgaggagaagaccgccaagttcatcgaggagcaggtgagaagaggcctggagggcaaggagcaggaggtgcccaccttcaccgagctgagcagagagaacgacgaggagaaggtgaccttcaacctgagcaagggcgcctgcagcagcagcggcgccaccagcagcaagagcagcaccctgggccccagcgccctgaagaccatcggcagcagcgccagcgtgaagagaaaggagagcagccagagcagcacccagagcaaggagaagaagaagaagaagagcgccctggacgagatcatggagatcgaggaggagaagaagagaaccgccagaaccgactactggctgcagcccgagatcatcgtgaagatcatcaccaagaagctgggcgagaagtaccacaagaagaaggccatcgtgaaggaggtgatcgacaagtacaccgccgtggtgaagatgatcgacagcggcgacaagctgaagctggaccagacccacctggagaccgtgatccccgcccccggcaagagaatcctggtgctgaacggcggctacagaggcaacgagggcaccctggagagcatcaacgagaagaccttcagcgccaccatcgtgatcgagaccgtgtag

SEQ ID NO: 86192 - DNA, 867 bp, synthetic construct
  misc_feature 1..867: note = Description of Artificial Sequence: Synthetic coding sequence
  source 1..867: mol_type = other DNA
atgaacgccacccagtgggagaccctgaccgacttcaccaagtggctgggcagagagggcctgtgcaaggtggacgagacccccaagggctggtacatccagtacatcgacagagaccccgagaccatcagaagacagctggagctggagaagaagaagaagcaggacctggacgacgaggagaagaccgccaagttcatcgaggagcaggtgagaagaggcctggagggcaaggagcaggaggtgcccaccttcaccgagctgagcagagagaacgacgaggagaaggtgaccttcaacctgagcaagggcgcctgcagcagcagcggcgccaccagcagcaagagcagcaccctgggccccagcgccctgaagaccatcggcagcagcgccagcgtgaagagaaaggagagcagccagagcagcacccagagcaaggagaagaagaagaagaagagcgccctggacgagatcatggagatcgaggaggagaagaagagaaccgccagaaccgactactggctgcagcccgagatcatcgtgaagatcatcaccaagaagctgggcgagaagtaccacaagaagaaggccatcgtgaaggaggtgatcgacaagtacaccgccgtggtgaagatgatcgacagcggcgacaagctgaagctggaccagacccacctggagaccgtgatccccgcccccggcaagagaatcctggtgctgaacggcggctacagaggcaacgagggcaccctggagagcatcaacgagaagaccttcagcgccaccatcgtgatcgagaccgtgagcctgttcacccagagacagaagttccagaacgccctgaagatgtgccacagcttcttctag

SEQ ID NO: 86193 - DNA, 2361 bp, synthetic construct
  misc_feature 1..2361: note = Description of Artificial Sequence: Synthetic coding sequence
  source 1..2361: mol_type = other DNA
atgaacgaggccaaggtgaaggagaccctgagaagatgcggcgccagcggcgacgagtgcggcagactgcagtacgccctgacctgcctgagaaaggtgaccggcctgggcggcgagcacaaggaggacagcagctggagcagcctggacgccagaagagagagcggcagcggccccagcaccgacaccctgagcgccgccagcctgccctggccccccggcagcagccagctgggcagagccggcaacagcgcccagggccccagaagcatcagcgtgagcgccctgcccgccagcgacagccccacccccagcttcagcgagggcctgagcgacacctgcatccccctgcacgccagcggcagactgacccccagagccctgcacagcttcatcaccccccccaccaccccccagctgagaagacacaccaagctgaagccccccagaaccccccccccccccagcagaaaggtgttccagctgctgcccagcttccccaccctgaccagaagcaagagccacgagagccagctgggcaacagaatcgacgacgtgagcagcatgagattcgacctgagccacggcagcccccagatggtgagaagagacatcggcctgagcgtgacccacagattcagcaccaagagctggctgagccaggtgtgccacgtgtgccagaagagcatgatcttcggcgtgaagtgcaagcactgcagactgaagtgccacaacaagtgcaccaaggaggcccccgcctgcagaatcagcttcctgcccctgaccagactgagaagaaccgagagcgtgcccagcgacatcaacaaccccgtggacagagccgccgagccccacttcggcaccctgcccaaggccctgaccaagaaggagcacccccccgccatgaaccacctggacagcagcagcaaccccagcagcaccaccagcagcacccccagcagccccgcccccttccccaccagcagcaaccccagcagcgccaccaccccccccaaccccagccccggccagagagacagcagattcaacttccccgccgcctacttcatccaccacagacagcagttcatcttccccgtgcccagcgccggccactgctggaagtgcctgctgatcgccgagagcctgaaggagaacgccttcaacatcagcgccttcgcccacgccgcccccctgcccgaggccgccgacggcaccagactggacgaccagcccaaggccgacgtgctggaggcccacgaggccgaggccgaggagcccgaggccggcaagagcgaggccgaggacgacgaggacgaggtggacgacctgcccagcagcagaagaccctggagaggccccatcagcagaaaggccagccagaccagcgtgtacctgcaggagtgggacatccccttcgagcaggtggagctgggcgagcccatcggccagggcagatggggcagagtgcacagaggcagatggcacggcgaggtggccatcagactgctggagatggacggccacaaccaggaccacctgaagctgttcaagaaggaggtgatgaactacagacagaccagacacgagaacgtggtgctgttcatgggcgcctgcatgaaccccccccacctggccatcatcaccagcttctgcaagggcagaaccctgcacagcttcgtgagagaccccaagaccagcctggacatcaacaagaccagacagatcgcccaggagatcatcaagggcatgggctacctgcacgccaagggcatcgtgcacaaggacctgaagagcaagaacgtgttctacgacaacggcaaggtggtgatcaccgacttcggcctgttcggcatcagcggcgtggtgagagagggcagaagagagaaccagctgaagctgagccacgactggctgtgctacctggcccccgagatcgtgagagagatgacccccggcaaggacgaggaccagctgcccttcagcaaggccgccgacgtgtacgccttcggcaccgtgtggtacgagctgcaggccagagactggcccctgaagaaccaggccgccgaggccagcatctggcagatcggcagcggcgagggcatgaagagagtgctgaccagcgtgagcctgggcaaggaggtgagcgagatcctgagcgcctgctgggccttcgacctgcaggagagacccagcttcagcctgctgatggacatgctggagaagctgcccaagctgaacagaagactgagccaccccggccacttctggaagagcgccgacatcaacagcagcaaggtggtgcccagattcgagagattcggcctgggcgtgctggagagcagcaaccccaagatgtag

SEQ ID NO: 86194 - DNA, 2772 bp, synthetic construct
  misc_feature 1..2772: note = Description of Artificial Sequence: Synthetic coding sequence
  source 1..2772: mol_type = other DNA
atggacagagccgccctgagagccgccgccatgggcgagaagaaggagggcggcggcggcggcgacgccgccgccgccgagggcggcgccggcgccgccgccagcagagccctgcagcagtgcggccagctgcagaagctgatcgacatcagcatcggcagcctgagaggcctgagaaccaagtgcgccgtgagcaacgacctgacccagcaggagatcagaaccctggaggccaagctggtgagatacatctgcaagcagagacagtgcaagctgagcgtggcccccggcgagagaacccccgagctgaacagctaccccagattcagcgactggctgtacaccttcaacgtgagacccgaggtggtgcaggagatccccagagacctgaccctggacgccctgctggagatgaacgaggccaaggtgaaggagaccctgagaagatgcggcgccagcggcgacgagtgcggcagactgcagtacgccctgacctgcctgagaaaggtgaccggcctgggcggcgagcacaaggaggacagcagctggagcagcctggacgccagaagagagagcggcagcggccccagcaccgacaccctgagcgccgccagcctgccctggccccccggcagcagccagctgggcagagccggcaacagcgcccagggccccagaagcatcagcgtgagcgccctgcccgccagcgacagccccacccccagcttcagcgagggcctgagcgacacctgcatccccctgcacgccagcggcagactgacccccagagccctgcacagcttcatcaccccccccaccaccccccagctgagaagacacaccaagctgaagccccccagaaccccccccccccccagcagaaaggtgttccagctgctgcccagcttccccaccctgaccagaagcaagagccacgagagccagctgggcaacagaatcgacgacgtgagcagcatgagattcgacctgagccacggcagcccccagatggtgagaagagacatcggcctgagcgtgacccacagattcagcaccaagagctggctgagccaggtgtgccacgtgtgccagaagagcatgatcttcggcgtgaagtgcaagcactgcagactgaagtgccacaacaagtgcaccaaggaggcccccgcctgcagaatcagcttcctgcccctgaccagactgagaagaaccgagagcgtgcccagcgacatcaacaaccccgtggacagagccgccgagccccacttcggcaccctgcccaaggccctgaccaagaaggagcacccccccgccatgaaccacctggacagcagcagcaaccccagcagcaccaccagcagcacccccagcagccccgcccccttccccaccagcagcaaccccagcagcgccaccaccccccccaaccccagccccggccagagagacagcagattcaacttccccgccgcctacttcatccaccacagacagcagttcatcttccccgtgcccagcgccggccactgctggaagtgcctgctgatcgccgagagcctgaaggagaacgccttcaacatcagcgccttcgcccacgccgcccccctgcccgaggccgccgacggcaccagactggacgaccagcccaaggccgacgtgctggaggcccacgaggccgaggccgaggagcccgaggccggcaagagcgaggccgaggacgacgaggacgaggtggacgacctgcccagcagcagaagaccctggagaggccccatcagcagaaaggccagccagaccagcgtgtacctgcaggagtgggacatccccttcgagcaggtggagctgggcgagcccatcggccagggcagatggggcagagtgcacagaggcagatggcacggcgaggtggccatcagactgctggagatggacggccacaaccaggaccacctgaagctgttcaagaaggaggtgatgaactacagacagaccagacacgagaacgtggtgctgttcatgggcgcctgcatgaaccccccccacctggccatcatcaccagcttctgcaagggcagaaccctgcacagcttcgtgagagaccccaagaccagcctggacatcaacaagaccagacagatcgcccaggagatcatcaagggcatgggctacctgcacgccaagggcatcgtgcacaaggacctgaagagcaagaacgtgttctacgacaacggcaaggtggtgatcaccgacttcggcctgttcggcatcagcggcgtggtgagagagggcagaagagagaaccagctgaagctgagccacgactggctgtgctacctggcccccgagatcgtgagagagatgacccccggcaaggacgaggaccagctgcccttcagcaaggccgccgacgtgtacgccttcggcaccgtgtggtacgagctgcaggccagagactggcccctgaagaaccaggccgccgaggccagcatctggcagatcggcagcggcgagggcatgaagagagtgctgaccagcgtgagcctgggcaaggaggtgagcgagatcctgagcgcctgctgggccttcgacctgcaggagagacccagcttcagcctgctgatggacatgctggagaagctgcccaagctgaacagaagactgagccaccccggccacttctggaagagcgccgacatcaacagcagcaaggtggtgcccagattcgagagattcggcctgggcgtgctggagagcagcaaccccaagatgtag

SEQ ID NO: 86195 - DNA, 2289 bp, synthetic construct
  misc_feature 1..2289: note = Description of Artificial Sequence: Synthetic coding sequence
  source 1..2289: mol_type = other DNA
atgaacgaggccaaggtgaaggagaccctgagaagatgcggcgccagcggcgacgagtgcggcagactgcagtacgccctgacctgcctgagaaaggtgaccggcctgggcggcgagcacaaggaggacagcagctggagcagcctggacgccagaagagagagcggcagcggccccagcaccgacaccctgagcgccgccagcctgccctggccccccggcagcagccagctgggcagagccggcaacagcgcccagggccccagaagcatcagcgtgagcgccctgcccgccagcgacagccccacccccagcttcagcgagggcctgagcgacacctgcatccccctgcacgccagcggcagactgacccccagagccctgcacagcttcatcaccccccccaccaccccccagctgagaagacacaccaagctgaagccccccagaaccccccccccccccagcagaaaggtgttccagctgctgcccagcttccccaccctgaccagaagcaagagccacgagagccagctgggcaacagaatcgacgacgtgagcagcatgagattcgacctgagccacggcagcccccagatggtgagaagagacatcggcctgagcgtgacccacagattcagcaccaagagctggctgagccaggtgtgccacgtgtgccagaagagcatgatcttcggcgtgaagtgcaagcactgcagactgaagtgccacaacaagtgcaccaaggaggcccccgcctgcagaatcagcttcctgcccctgaccagactgagaagaaccgagagcgtgcccagcgacatcaacaaccccgtggacagagccgccgagccccacttcggcaccctgcccaaggccctgaccaagaaggagcacccccccgccatgaaccacctggacagcagcagcaaccccagcagcaccaccagcagcacccccagcagccccgcccccttccccaccagcagcaaccccagcagcgccaccaccccccccaaccccagccccggccagagagacagcagattcaacttccccgccgcctacttcatccaccacagacagcagttcatcttccccgtgcccagcgccggccactgctggaagtgcctgctgatcgccgagagcctgaaggagaacgccttcaacatcagcgccttcgcccacgccgcccccctgcccgaggccgccgacggcaccagactggacgaccagcccaaggccgacgtgctggaggcccacgaggccgaggccgaggagcccgaggccggcaagagcgaggccgaggacgacgaggacgaggtggacgacctgcccagcagcagaagaccctggagaggccccatcagcagaaaggccagccagaccagcgtgtacctgcaggagtgggacatccccttcgagcaggtggagctgggcgagcccatcggccagggcagatggggcagagtgcacagaggcagatggcacggcgaggtggccatcagactgctggagatggacggccacaaccaggaccacctgaagctgttcaagaaggaggtgatgaactacagacagaccagacacgagaacgtggtgctgttcatgggcgcctgcatgaaccccccccacctggccatcatcaccagcttctgcaagggcagaaccctgcacagcttcgtgagagaccccaagaccagcctggacatcaacaagaccagacagatcgcccaggagatcatcaagggcatgggctacctgcacgccaagggcatcgtgcacaaggacctgaagagcaagaacgtgttctacgacaacggcaaggtggtgatcaccgacttcggcctgttcggcatcagcggcgtggtgagagagggcagaagagagaaccagctgaagctgagccacgactggctgtgctacctggcccccgagatcgtgagagagatgacccccggcaaggacgaggaccagctgcccttcagcaaggccgccgacgtgtacgccttcggcaccgtgtggtacgagctgcaggccagagactggcccctgaagaaccaggccgccgaggccagcatctggcagatcggcagcggcgagggcatgaagagagtgctgaccagcgtgagcctgggcaaggaggtgagcgagatcctgagcgcctgctgggccttcgacctgcaggagagacccagcttcagcctgctgatggacatgctggagaagctgcccaagctgaacagaagactgagccaccccggccacttctggaagagcgccgagctgtag

SEQ ID NO: 86196 - DNA, 375 bp, synthetic construct
  misc_feature 1..375: note = Description of Artificial Sequence: Synthetic coding sequence
  source 1..375: mol_type = other DNA
atgcaggccgacctggagatccccagagacctgaccctggacgccctgctggagatgaacgaggccaaggtgaaggagaccctgagaagatgcggcgccagcggcgacgagtgcggcagactgcagtacgccctgacctgcctgagaaaggtgaccggcctgggcacctggggcctgccccccagccccctgcccggcctggtgcccctgggcctgtggcccagcctgtggtgggtgatggagagaggcaagagaggccccggcttcctgggccagcccggcaaggccagagtgggctgcagccagccccccgagaagctgagccagggcccccagggcagcggcagctggtgggtgtggcccggcagaatctag

SEQ ID NO: 86197 - DNA, 1842 bp, synthetic construct
  misc_feature 1..1842: note = Description of Artificial Sequence: Synthetic coding sequence
  source 1..1842: mol_type = other DNA
tgacacagcttcatcaccccccccaccaccccccagctgagaagacacaccaagctgaagccccccagaaccccccccccccccagcagaaaggtgttccagctgctgcccagcttccccaccctgaccagaagcaagagccacgagagccagctgggcaacagaatcgacgacgtgagcagcatgagattcgacctgagccacggcagcccccagatggtgagaagagacatcggcctgagcgtgacccacagattcagcaccaagagctggctgagccaggtgtgccacgtgtgccagaagagcatgatcttcggcgtgaagtgcaagcactgcagactgaagtgccacaacaagtgcaccaaggaggcccccgcctgcagaatcagcttcctgcccctgaccagactgagaagaaccgagagcgtgcccagcgacatcaacaaccccgtggacagagccgccgagccccacttcggcaccctgcccaaggccctgaccaagaaggagcacccccccgccatgaaccacctggacagcagcagcaaccccagcagcaccaccagcagcacccccagcagccccgcccccttccccaccagcagcaaccccagcagcgccaccaccccccccaaccccagccccggccagagagacagcagattcaacttccccgccgcctacttcatccaccacagacagcagttcatcttccccgacatcagcgccttcgcccacgccgcccccctgcccgaggccgccgacggcaccagactggacgaccagcccaaggccgacgtgctggaggcccacgaggccgaggccgaggagcccgaggccggcaagagcgaggccgaggacgacgaggacgaggtggacgacctgcccagcagcagaagaccctggagaggccccatcagcagaaaggccagccagaccagcgtgtacctgcaggagtgggacatccccttcgagcaggtggagctgggcgagcccatcggccagggcagatggggcagagtgcacagaggcagatggcacggcgaggtggccatcagactgctggagatggacggccacaaccaggaccacctgaagctgttcaagaaggaggtgatgaactacagacagaccagacacgagaacgtggtgctgttcatgggcgcctgcatgaaccccccccacctggccatcatcaccagcttctgcaagggcagaaccctgcacagcttcgtgagagaccccaagaccagcctggacatcaacaagaccagacagatcgcccaggagatcatcaagggcatgggctacctgcacgccaagggcatcgtgcacaaggacctgaagagcaagaacgtgttctacgacaacggcaaggtggtgatcaccgacttcggcctgttcggcatcagcggcgtggtgagagagggcagaagagagaaccagctgaagctgagccacgactggctgtgctacctggcccccgagatcgtgagagagatgacccccggcaaggacgaggaccagctgcccttcagcaaggccgccgacgtgtacgccttcggcaccgtgtggtacgagctgcaggccagagactggcccctgaagaaccaggccgccgaggccagcatctggcagatcggcagcggcgagggcatgaagagagtgctgaccagcgtgagcctgggcaaggaggtgagcgagatcctgagcgcctgctgggccttcgacctgcaggagagacccagcttcagcctgctgatggacatgctggagaagctgcccaagctgaacagaagactgagccaccccggccacttctggaagagcgccgagctgtag

SEQ ID NO: 86198 - DNA, 2634 bp, synthetic construct
  misc_feature 1..2634: note = Description of Artificial Sequence: Synthetic coding sequence
  source 1..2634: mol_type = other DNA
atggacagagccgccctgagagccgccgccatgggcgagaagaaggagggcggcggcggcggcgacgccgccgccgccgagggcggcgccggcgccgccgccagcagagccctgcagcagtgcggccagctgcagaagctgatcgacatcagcatcggcagcctgagaggcctgagaaccaagtgcgccgtgagcaacgacctgacccagcaggagatcagaaccctggaggccaagctggtgagatacatctgcaagcagagacagtgcaagctgagcgtggcccccggcgagagaacccccgagctgaacagctaccccagattcagcgactggctgtacaccttcaacgtgagacccgaggtggtgcaggagatccccagagacctgaccctggacgccctgctggagatgaacgaggccaaggtgaaggagaccctgagaagatgcggcgccagcggcgacgagtgcggcagactgcagtacgccctgacctgcctgagaaaggtgaccggcctgggcggcgagcacaaggaggacagcagctggagcagcctggacgccagaagagagagcggcagcggccccagcaccgacaccctgagcgccgccagcctgccctggccccccggcagcagccagctgggcagagccggcaacagcgcccagggccccagaagcatcagcgtgagcgccctgcccgccagcgacagccccacccccagcttcagcgagggcctgagcgacacctgcatccccctgcacgccagcggcagactgacccccagagccctgcacagcttcatcaccccccccaccaccccccagctgagaagacacaccaagctgaagccccccagaaccccccccccccccagcagaaaggtgttccagctgctgcccagcttccccaccctgaccagaagcaagagccacgagagccagctgggcaacagaatcgacgacgtgagcagcatgagattcgacctgagccacggcagcccccagatggtgagaagagacatcggcctgagcgtgacccacagattcagcaccaagagctggctgagccaggtgtgccacgtgtgccagaagagcatgatcttcggcgtgaagtgcaagcactgcagactgaagtgccacaacaagtgcaccaaggaggcccccgcctgcagaatcagcttcctgcccctgaccagactgagaagaaccgagagcgtgcccagcgacatcaacaaccccgtggacagagccgccgagccccacttcggcaccctgcccaaggccctgaccaagaaggagcacccccccgccatgaaccacctggacagcagcagcaaccccagcagcaccaccagcagcacccccagcagccccgcccccttccccaccagcagcaaccccagcagcgccaccaccccccccaaccccagccccggccagagagacagcagattcaacttccccgccgcctacttcatccaccacagacagcagttcatcttccccgacatcagcgccttcgcccacgccgcccccctgcccgaggccgccgacggcaccagactggacgaccagcccaaggccgacgtgctggaggcccacgaggccgaggccgaggagcccgaggccggcaagagcgaggccgaggacgacgaggacgaggtggacgacctgcccagcagcagaagaccctggagaggccccatcagcagaaaggccagccagaccagcgtgtacctgcaggagtgggacatccccttcgagcaggtggagctgggcgagcccatcggccagggcagatggggcagagtgcacagaggcagatggcacggcgaggtggccatcagactgctggagatggacggccacaaccaggaccacctgaagctgttcaagaaggaggtgatgaactacagacagaccagacacgagaacgtggtgctgttcatgggcgcctgcatgaaccccccccacctggccatcatcaccagcttctgcaagggcagaaccctgcacagcttcgtgagagaccccaagaccagcctggacatcaacaagaccagacagatcgcccaggagatcatcaagggcatgggctacctgcacgccaagggcatcgtgcacaaggacctgaagagcaagaacgtgttctacgacaacggcaaggtggtgatcaccgacttcggcctgttcggcatcagcggcgtggtgagagagggcagaagagagaaccagctgaagctgagccacgactggctgtgctacctggcccccgagatcgtgagagagatgacccccggcaaggacgaggaccagctgcccttcagcaaggccgccgacgtgtacgccttcggcaccgtgtggtacgagctgcaggccagagactggcccctgaagaaccaggccgccgaggccagcatctggcagatcggcagcggcgagggcatgaagagagtgctgaccagcgtgagcctgggcaaggaggtgagcgagatcctgagcgcctgctgggccttcgacctgcaggagagacccagcttcagcctgctgatggacatgctggagaagctgcccaagctgaacagaagactgagccaccccggccacttctggaagagcgccgagctgtag

SEQ ID NO: 86199 - DNA, 1311 bp, synthetic construct
  misc_feature 1..1311: note = Description of Artificial Sequence: Synthetic coding sequence
  source 1..1311: mol_type = other DNA
atgtacaacaagaaggccaagatggagcccaacgccagcgagagcgccatccccgccagaagacagagacagcccagagccaagaagaagagcaagcccctgaacctgaagatccacagcagcgtgggcagctgcgagaacatccccagccagcagagaagccccctgctgagcgagagaagcctgagaagcttcttcgtgggccacgcccccttcctgcccagcaccccccccgtgcacaccgaggccaacttcagcgccaacaccctgagcgtgcccagatggagcccccagatccccagaagagacctgggcaacagcatcaagcacagattcagcaccaagtactggatgagccagacctgcaccgtgtgcggcaagggcatgctgttcggcctgaagtgcaagaactgcaagctgaagtgccacaacaagtgcaccaaggaggcccccccctgccacctgctgatcatccacagaggcgaccccgccagactggtgagaaccgagagcgtgccctgcgacatcaacaaccccctgagaaagccccccagatacagcgacctgcacatcagccagaccctgcccaagaccaacaagatcaacaaggaccacatccccgtgccctaccagcccgacagcagcagcaaccccagcagcaccaccagcagcacccccagcagccccgccccccccctgccccccagcgccaccccccccagccccctgcaccccagcccccagtgcaccagacagcagaagaacttcaacctgcccgccagccactactacaagtacaagcagcagttcatcttccccgacgtggtgcccgtgcccgagacccccaccagagccccccaggtgatcctgcaccccgtgaccagcaaccccatcctggagggcaaccccctgctgcagatcgaggtggagcccaccagcgagaacgaggaggtgcacgacgaggccgaggagagcgaggacgacttcgaggagatgaacctgagcctgctgagcgccagaagcttccccagaaaggccagccagaccagcatcttcctgcaggagtgggacatccccttcgagcagctggagatcggcgagctgatcggcaagggcagattcggccaggtgtaccacggcagatggcacggcgaggtggccatcagactgatcgacatcgagagagacaacgaggaccagctgaaggccttcaagagagaggtgatggcctacagacagaccagacacgagaacgtggtgctgttcatgggcgcctgcatgagccccccccacctggccatcatcacctag

SEQ ID NO: 86200 - DNA, 2853 bp, synthetic construct
  misc_feature 1..2853: note = Description of Artificial Sequence: Synthetic coding sequence
  source 1..2853: mol_type = other DNA
atggacgaggagaacatgaccaagagcgaggagcagcagcccctgagcctgcagaaggccctgcagcagtgcgagctggtgcagaacatgatcgacctgagcatcagcaacctggagggcctgagaaccaagtgcgccaccagcaacgacctgacccagaaggagatcagaaccctggagagcaagctggtgaagtacttcagcagacagctgagctgcaagaagaaggtggccctgcaggagagaaacgccgagctggacggcttcccccagctgagacactggttcagaatcgtggacgtgagaaaggaggtgctggaggagatcagccccggccagctgagcctggaggacctgctggagatgaccgacgagcaggtgtgcgagaccgtggagaagtacggcgccaacagagaggagtgcgccagactgaacgccagcctgagctgcctgagaaacgtgcacatgagcggcggcaacctgagcaagcaggactggaccatccagtggcccaccaccgagaccggcaaggagaacaaccccgtgtgcccccccgagcccaccccctggatcagaacccacctgagccagagccccagagtgcccagcaagtgcgtgcagcactactgccacaccagccccacccccggcgcccccgtgtacacccacgtggacagactgaccgtggacgcctaccccggcctgtgcccccccccccccctggagagcggccacagaagcctgccccccagccccagacagagacacgccgtgagaaccccccccagaacccccaacatcgtgaccaccgtgaccccccccggcaccccccccatgagaaagaagaacaagctgaagccccccggcacccccccccccagcagcagaaagctgatccacctgatccccggcttcaccgccctgcacagaagcaagagccacgagttccagctgggccacagagtggacgaggcccacacccccaaggccaagaagaagagcaagcccctgaacctgaagatccacagcagcgtgggcagctgcgagaacatccccagccagcagagaagccccctgctgagcgagagaagcctgagaagcttcttcgtgggccacgcccccttcctgcccagcaccccccccgtgcacaccgaggccaacttcagcgccaacaccctgagcgtgcccagatggagcccccagatccccagaagagacctgggcaacagcatcaagcacagattcagcaccaagtactggatgagccagacctgcaccgtgtgcggcaagggcatgctgttcggcctgaagtgcaagaactgcaagctgaagtgccacaacaagtgcaccaaggaggcccccccctgccacctgctgatcatccacagaggcgaccccgccagactggtgagaaccgagagcgtgccctgcgacatcaacaaccccctgagaaagccccccagatacagcgacctgcacatcagccagaccctgcccaagaccaacaagatcaacaaggaccacatccccgtgccctaccagcccgacagcagcagcaaccccagcagcaccaccagcagcacccccagcagccccgccccccccctgccccccagcgccaccccccccagccccctgcaccccagcccccagtgcaccagacagcagaagaacttcaacctgcccgccagccactactacaagtacaagcagcagttcatcttccccgacgtggtgcccgtgcccgagacccccaccagagccccccaggtgatcctgcaccccgtgaccagcaaccccatcctggagggcaaccccctgctgcagatcgaggtggagcccaccagcgagaacgaggaggtgcacgacgaggccgaggagagcgaggacgacttcgaggagatgaacctgagcctgctgagcgccagaagcttccccagaaaggccagccagaccagcatcttcctgcaggagtgggacatccccttcgagcagctggagatcggcgagctgatcggcaagggcagattcggccaggtgtaccacggcagatggcacggcgaggtggccatcagactgatcgacatcgagagagacaacgaggaccagctgaaggccttcaagagagaggtgatggcctacagacagaccagacacgagaacgtggtgctgttcatgggcgcctgcatgagccccccccacctggccatcatcaccagcctgtgcaagggcagaaccctgtacagcgtggtgagagacgccaagatcgtgctggacgtgaacaagaccagacagatcgcccaggagatcgtgaagggcatgggctacctgcacgccaagggcatcctgcacaaggacctgaagagcaagaacgtgttctacgacaacggcaaggtggtgatcaccgacttcggcctgttcagcatcagcggcgtgctgcaggccggcagaagagaggacaagctgagaatccagaacggctggctgtgccacctggcccccgagatcatcagacagctgagccccgacaccgaggaggacaagctgcccttcagcaagcacagcgacgtgttcgccctgggcaccatctggtacgagctgcacgccagagagtggcccttcaagacccagcccgccgaggccatcatctggcagatgggcaccggcatgaagcccaacctgagccagatcggcatgggcaaggagatcagcgacatcctgctgttctgctgggccttcgagcaggaggagagacccaccttcaccaagctgatggacatgctggagaagctgcccaagagaaacagaagactgagccaccccggccacttctggaagagcgccgagctgtag

SEQ ID NO: 86201 - DNA, 2766 bp, synthetic construct
  misc_feature 1..2766: note = Description of Artificial Sequence: Synthetic coding sequence
  source 1..2766: mol_type = other DNA
atgatcgacctgagcatcagcaacctggagggcctgagaaccaagtgcgccaccagcaacgacctgacccagaaggagatcagaaccctggagagcaagctggtgaagtacttcagcagacagctgagctgcaagaagaaggtggccctgcaggagagaaacgccgagctggacggcttcccccagctgagacactggttcagaatcgtggacgtgagaaaggaggtgctggaggagatcagccccggccagctgagcctggaggacctgctggagatgaccgacgagcaggtgtgcgagaccgtggagaagtacggcgccaacagagaggagtgcgccagactgaacgccagcctgagctgcctgagaaacgtgcacatgagcggcggcaacctgagcaagcaggactggaccatccagtggcccaccaccgagaccggcaaggagaacaaccccgtgtgcccccccgagcccaccccctggatcagaacccacctgagccagagccccagagtgcccagcaagtgcgtgcagcactactgccacaccagccccacccccggcgcccccgtgtacacccacgtggacagactgaccgtggacgcctaccccggcctgtgcccccccccccccctggagagcggccacagaagcctgccccccagccccagacagagacacgccgtgagaaccccccccagaacccccaacatcgtgaccaccgtgaccccccccggcaccccccccatgagaaagaagaacaagctgaagccccccggcacccccccccccagcagcagaaagctgatccacctgatccccggcttcaccgccctgcacagaagcaagagccacgagttccagctgggccacagagtggacgaggcccacacccccaaggccaagaagaagagcaagcccctgaacctgaagatccacagcagcgtgggcagctgcgagaacatccccagccagcagagaagccccctgctgagcgagagaagcctgagaagcttcttcgtgggccacgcccccttcctgcccagcaccccccccgtgcacaccgaggccaacttcagcgccaacaccctgagcgtgcccagatggagcccccagatccccagaagagacctgggcaacagcatcaagcacagattcagcaccaagtactggatgagccagacctgcaccgtgtgcggcaagggcatgctgttcggcctgaagtgcaagaactgcaagctgaagtgccacaacaagtgcaccaaggaggcccccccctgccacctgctgatcatccacagaggcgaccccgccagactggtgagaaccgagagcgtgccctgcgacatcaacaaccccctgagaaagccccccagatacagcgacctgcacatcagccagaccctgcccaagaccaacaagatcaacaaggaccacatccccgtgccctaccagcccgacagcagcagcaaccccagcagcaccaccagcagcacccccagcagccccgccccccccctgccccccagcgccaccccccccagccccctgcaccccagcccccagtgcaccagacagcagaagaacttcaacctgcccgccagccactactacaagtacaagcagcagttcatcttccccgacgtggtgcccgtgcccgagacccccaccagagccccccaggtgatcctgcaccccgtgaccagcaaccccatcctggagggcaaccccctgctgcagatcgaggtggagcccaccagcgagaacgaggaggtgcacgacgaggccgaggagagcgaggacgacttcgaggagatgaacctgagcctgctgagcgccagaagcttccccagaaaggccagccagaccagcatcttcctgcaggagtgggacatccccttcgagcagctggagatcggcgagctgatcggcaagggcagattcggccaggtgtaccacggcagatggcacggcgaggtggccatcagactgatcgacatcgagagagacaacgaggaccagctgaaggccttcaagagagaggtgatggcctacagacagaccagacacgagaacgtggtgctgttcatgggcgcctgcatgagccccccccacctggccatcatcaccagcctgtgcaagggcagaaccctgtacagcgtggtgagagacgccaagatcgtgctggacgtgaacaagaccagacagatcgcccaggagatcgtgaagggcatgggctacctgcacgccaagggcatcctgcacaaggacctgaagagcaagaacgtgttctacgacaacggcaaggtggtgatcaccgacttcggcctgttcagcatcagcggcgtgctgcaggccggcagaagagaggacaagctgagaatccagaacggctggctgtgccacctggcccccgagatcatcagacagctgagccccgacaccgaggaggacaagctgcccttcagcaagcacagcgacgtgttcgccctgggcaccatctggtacgagctgcacgccagagagtggcccttcaagacccagcccgccgaggccatcatctggcagatgggcaccggcatgaagcccaacctgagccagatcggcatgggcaaggagatcagcgacatcctgctgttctgctgggccttcgagcaggaggagagacccaccttcaccaagctgatggacatgctggagaagctgcccaagagaaacagaagactgagccaccccggccacttctggaagagcgccgagctgtag

SEQ ID NO: 86202 - DNA, 1245 bp, synthetic construct
  misc_feature 1..1245: note = Description of Artificial Sequence: Synthetic coding sequence
  source 1..1245: mol_type = other DNA
agagccaagaagaagagcaagcccctgaacctgaagatccacagcagcgtgggcagctgcgagaacatccccagccagcagagaagccccctgctgagcgagagaagcctgagaagcttcttcgtgggccacgcccccttcctgcccagcaccccccccgtgcacaccgaggccaacttcagcgccaacaccctgagcgtgcccagatggagcccccagatccccagaagagacctgggcaacagcatcaagcacagattcagcaccaagtactggatgagccagacctgcaccgtgtgcggcaagggcatgctgttcggcctgaagtgcaagaactgcaagctgaagtgccacaacaagtgcaccaaggaggcccccccctgccacctgctgatcatccacagaggcgaccccgccagactggtgagaaccgagagcgtgccctgcgacatcaacaaccccctgagaaagccccccagatacagcgacctgcacatcagccagaccctgcccaagaccaacaagatcaacaaggaccacatccccgtgccctaccagcccgacagcagcagcaaccccagcagcaccaccagcagcacccccagcagccccgccccccccctgccccccagcgccaccccccccagccccctgcaccccagcccccagtgcaccagacagcagaagaacttcaacctgcccgccagccactactacaagtacaagcagcagttcatcttccccgacgtggtgcccgtgcccgagacccccaccagagccccccaggtgatcctgcaccccgtgaccagcaaccccatcctggagggcaaccccctgctgcagatcgaggtggagcccaccagcgagaacgaggaggtgcacgacgaggccgaggagagcgaggacgacttcgaggagatgaacctgagcctgctgagcgccagaagcttccccagaaaggccagccagaccagcatcttcctgcaggagtgggacatccccttcgagcagctggagatcggcgagctgatcggcaagggcagattcggccaggtgtaccacggcagatggcacggcgaggtggccatcagactgatcgacatcgagagagacaacgaggaccagctgaaggccttcaagagagaggtgatggcctacagacagaccagacacgagaacgtggtgctgttcatgggcgcctgcatgagccccccccacctggccatcatcaccagacccgtgtag

SEQ ID NO: 86203 - DNA, 3921 bp, synthetic construct
  misc_feature 1..3921: note = Description of Artificial Sequence: Synthetic coding sequence
  source 1..3921: mol_type = other DNA
atggagttctacgagagcgcctacttcatcgtgctgatccccagcatcgtgatcaccgtgatcttcctgttcttctggctgttcatgaaggagaccctgtacgacgaggtgctggccaagcagaagagagagcagaagctgatccccaccaagaccgacaagaagaaggccgagaagaagaagaacaagaagaaggagatccagaacggcaacctgcacgagagcgacagcgagagcgtgcccagagacttcaagctgagcgacgccctggccgtggaggacgaccaggtggcccccgtgcccctgaacgtggtggagaccagcagcagcgtgagagagagaaagaagaaggagaagaagcagaagcccgtgctggaggagcaggtgatcaaggagagcgacgccagcaagatccccggcaagaaggtggagcccgtgcccgtgaccaagcagcccaccccccccagcgaggccgccgccagcaagaagaagcccggccagaagaagagcaagaacggcagcgacgaccaggacaagaaggtggagaccctgatggtgcccagcaagagacaggaggccctgcccctgcaccaggagaccaagcaggagagcggcagcggcaagaagaaggccagcagcaagaagcagaagaccgagaacgtgttcgtggacgagcccctgatccacgccaccacctacatccccctgatggacaacgccgacagcagccccgtggtggacaagagagaggtgatcgacctgctgaagcccgaccaggtggagggcatccagaagagcggcaccaagaagctgaagaccgagaccgacaaggagaacgccgaggtgaagttcaaggacttcctgctgagcctgaagaccatgatgttcagcgaggacgaggccctgtgcgtggtggacctgctgaaggagaagagcggcgtgatccaggacgccctgaagaagagcagcaagggcgagctgaccaccctgatccaccagctgcaggagaaggacaagctgctggccgccgtgaaggaggacgccgccgccaccaaggacagatgcaagcagctgacccaggagatgatgaccgagaaggagagaagcaacgtggtgatcaccagaatgaaggacagaatcggcaccctggagaaggagcacaacgtgttccagaacaagatccacgtgagctaccaggagacccagcagatgcagatgaagttccagcaggtgagagagcagatggaggccgagatcgcccacctgaagcaggagaacggcatcctgagagacgccgtgagcaacaccaccaaccagctggagagcaagcagagcgccgagctgaacaagctgagacaggactacgccagactggtgaacgagctgaccgagaagaccggcaagctgcagcaggaggaggtgcagaagaagaacgccgagcaggccgccacccagctgaaggtgcagctgcaggaggccgagagaagatgggaggaggtgcagagctacatcagaaagagaaccgccgagcacgaggccgcccagcaggacctgcagagcaagttcgtggccaaggagaacgaggtgcagagcctgcacagcaagctgaccgacaccctggtgagcaagcagcagctggagcagagactgatgcagctgatggagagcgagcagaagagagtgaacaaggaggagagcctgcagatgcaggtgcaggacatcctggagcagaacgaggccctgaaggcccagatccagcagttccacagccagatcgccgcccagaccagcgccagcgtgctggccgaggagctgcacaaggtgatcgccgagaaggacaagcagatcaagcagaccgaggacagcctggccagcgagagagacagactgaccagcaaggaggaggagctgaaggacatccagaacatgaacttcctgctgaaggccgaggtgcagaagctgcaggccctggccaacgagcaggccgccgccgcccacgagctggagaagatgcagcagagcgtgtacgtgaaggacgacaagatcagactgctggaggagcagctgcagcacgagatcagcaacaagatggaggagttcaagatcctgaacgaccagaacaaggccctgaagagcgaggtgcagaagctgcagaccctggtgagcgagcagcccaacaaggacgtggtggagcagatggagaagtgcatccaggagaaggacgagaagctgaagaccgtggaggagctgctggagaccggcctgatccaggtggccaccaaggaggaggagctgaacgccatcagaaccgagaacagcagcctgaccaaggaggtgcaggacctgaaggccaagcagaacgaccaggtgagcttcgccagcctggtggaggagctgaagaaggtgatccacgagaaggacggcaagatcaagagcgtggaggagctgctggaggccgagctgctgaaggtggccaacaaggagaagaccgtgcagctgagcatcaccagcaaggtgcaggagctgcagaacctgctgaagggcaaggaggagcagatgaacaccatgaaggccgtgctggaggagaaggagaaggacctggccaacaccggcaagtggctgcaggacctgcaggaggagaacgagagcctgaaggcccacgtgcaggaggtggcccagcacaacctgaaggaggccagcagcgccagccagttcgaggagctggagatcgtgctgaaggagaaggagaacgagctgaagagactggaggccatgctgaaggagagagagagcgacctgagcagcaagacccagctgctgcaggacgtgcaggacgagaacaagctgttcaagagccagatcgagcagctgaagcagcagaactaccagcaggccagcagcttccccccccacgaggagctgctgaaggtgatcagcgagagagagaaggagatcagcggcctgtggaacgagctggacagcctgaaggacgccgtggagcaccagagaaagaagaacaacgacctgagagagaagaactgggaggccatggaggccctggccagcaccgagaagatgctgcaggacaaggtgaacaagaccagcaaggagagacagcagcaggtggaggccgtggagctggaggccaaggaggtgctgaagaagctgttccccaaggtgagcgtgcccagcaacctgagctacggcgagtggctgcacggcttcgagaagaaggccaaggagtgcatggccggcaccagcggcagcgaggaggtgaaggtgctggagcacaagctgaaggaggccgacgagatgcacaccctgctgcagctggagtgcgagaagtacaagagcgtgctggccgagaccgagggcatcctgcagaagctgcagagaagcgtggagcaggaggagaacaagtggaaggtgaaggtggacgagagccacaagaccatcaagcagatgcagagcagcttcaccagcagcgagcaggagctggagagactgagaagcgagaacaaggacatcgagaacctgagaagagagagagagcacctggagatggagctggagaaggccgagatggagagaagcacctacgtgaccgaggtgagagagctgaaggcccagctgaacgagaccctgaccaagctgagaaccgagcagaacgagagacagaaggtggccggcgacctgcacaaggcccagcagagcctggagctgatccagagcaagatcgtgaaggccgccggcgacaccaccgtgatcgagaacagcgacgtgagccccgagaccgagagcagcgagaaggagaccatgagcgtgagcctgaaccagaccgtgacccagctgcagcagctgctgcaggccgtgaaccagcagctgaccaaggagaaggagcactaccaggtgctggagtag

SEQ ID NO: 86204 - DNA, 4074 bp, synthetic construct
  misc_feature 1..4074: note = Description of Artificial Sequence: Synthetic coding sequence
  source 1..4074: mol_type = other DNA
atggagttctacgagagcgcctacttcatcgtgctgatccccagcatcgtgatcaccgtgatcttcctgttcttctggctgttcatgaaggagaccctgtacgacgaggtgctggccaagcagaagagagagcagaagctgatccccaccaagaccgacaagaagaaggccgagaagaagaagaacaagaagaaggagatccagaacggcaacctgcacgagagcgacagcgagagcgtgcccagagacttcaagctgagcgacgccctggccgtggaggacgaccaggtggcccccgtgcccctgaacgtggtggagaccagcagcagcgtgagagagagaaagaagaaggagaagaagcagaagcccgtgctggaggagcaggtgatcaaggagagcgacgccagcaagatccccggcaagaaggtggagcccgtgcccgtgaccaagcagcccaccccccccagcgaggccgccgccagcaagaagaagcccggccagaagaagagcaagaacggcagcgacgaccaggacaagaaggtggagaccctgatggtgcccagcaagagacaggaggccctgcccctgcaccaggagaccaagcaggagagcggcagcggcaagaagaaggccagcagcaagaagcagaagaccgagaacgtgttcgtggacgagcccctgatccacgccaccacctacatccccctgatggacaacgccgacagcagccccgtggtggacaagagagaggtgatcgacctgctgaagcccgaccaggtggagggcatccagaagagcggcaccaagaagctgaagaccgagaccgacaaggagaacgccgaggtgaagttcaaggacttcctgctgagcctgaagaccatgatgttcagcgaggacgaggccctgtgcgtggtggacctgctgaaggagaagagcggcgtgatccaggacgccctgaagaagagcagcaagggcgagctgaccaccctgatccaccagctgcaggagaaggacaagctgctggccgccgtgaaggaggacgccgccgccaccaaggacagatgcaagcagctgacccaggagatgatgaccgagaaggagagaagcaacgtggtgatcaccagaatgaaggacagaatcggcaccctggagaaggagcacaacgtgttccagaacaagatccacgtgagctaccaggagacccagcagatgcagatgaagttccagcaggtgagagagcagatggaggccgagatcgcccacctgaagcaggagaacggcatcctgagagacgccgtgagcaacaccaccaaccagctggagagcaagcagagcgccgagctgaacaagctgagacaggactacgccagactggtgaacgagctgaccgagaagaccggcaagctgcagcaggaggaggtgcagaagaagaacgccgagcaggccgccacccagctgaaggtgcagctgcaggaggccgagagaagatgggaggaggtgcagagctacatcagaaagagaaccgccgagcacgaggccgcccagcaggacctgcagagcaagttcgtggccaaggagaacgaggtgcagagcctgcacagcaagctgaccgacaccctggtgagcaagcagcagctggagcagagactgatgcagctgatggagagcgagcagaagagagtgaacaaggaggagagcctgcagatgcaggtgcaggacatcctggagcagaacgaggccctgaaggcccagatccagcagttccacagccagatcgccgcccagaccagcgccagcgtgctggccgaggagctgcacaaggtgatcgccgagaaggacaagcagatcaagcagaccgaggacagcctggccagcgagagagacagactgaccagcaaggaggaggagctgaaggacatccagaacatgaacttcctgctgaaggccgaggtgcagaagctgcaggccctggccaacgagcaggccgccgccgcccacgagctggagaagatgcagcagagcgtgtacgtgaaggacgacaagatcagactgctggaggagcagctgcagcacgagatcagcaacaagatggaggagttcaagatcctgaacgaccagaacaaggccctgaagagcgaggtgcagaagctgcagaccctggtgagcgagcagcccaacaaggacgtggtggagcagatggagaagtgcatccaggagaaggacgagaagctgaagaccgtggaggagctgctggagaccggcctgatccaggtggccaccaaggaggaggagctgaacgccatcagaaccgagaacagcagcctgaccaaggaggtgcaggacctgaaggccaagcagaacgaccaggtgagcttcgccagcctggtggaggagctgaagaaggtgatccacgagaaggacggcaagatcaagagcgtggaggagctgctggaggccgagctgctgaaggtggccaacaaggagaagaccgtgcaggacctgaagcaggagatcaaggccctgaaggaggagatcggcaacgtgcagctggagaaggcccagcagctgagcatcaccagcaaggtgcaggagctgcagaacctgctgaagggcaaggaggagcagatgaacaccatgaaggccgtgctggaggagaaggagaaggacctggccaacaccggcaagtggctgcaggacctgcaggaggagaacgagagcctgaaggcccacgtgcaggaggtggcccagcacaacctgaaggaggccagcagcgccagccagttcgaggagctggagatcgtgctgaaggagaaggagaacgagctgaagagactggaggccatgctgaaggagagagagagcgacctgagcagcaagacccagctgctgcaggacgtgcaggacgagaacaagctgttcaagagccagatcgagcagctgaagcagcagaactaccagcaggccagcagcttccccccccacgaggagctgctgaaggtgatcagcgagagagagaaggagatcagcggcctgtggaacgagctggacagcctgaaggacgccgtggagcaccagagaaagaagaacaacgacctgagagagaagaactgggaggccatggaggccctggccagcaccgagaagatgctgcaggacaaggtgaacaagaccagcaaggagagacagcagcaggtggaggccgtggagctggaggccaaggaggtgctgaagaagctgttccccaaggtgagcgtgcccagcaacctgagctacggcgagtggctgcacggcttcgagaagaaggccaaggagtgcatggccggcaccagcggcagcgaggaggtgaaggtgctggagcacaagctgaaggaggccgacgagatgcacaccctgctgcagctggagtgcgagaagtacaagagcgtgctggccgagaccgagggcatcctgcagaagctgcagagaagcgtggagcaggaggagaacaagtggaaggtgaaggtggacgagagccacaagaccatcaagcagatgcagagcagcttcaccagcagcgagcaggagctggagagactgagaagcgagaacaaggacatcgagaacctgagaagagagagagagcacctggagatggagctggagaaggccgagatggagagaagcacctacgtgaccgaggtgagagagctgaaggacctgctgaccgagctgcagaagaagctggacgacagctacagcgaggccgtgagacagaacgaggagctgaacctgctgaaggcccagctgaacgagaccctgaccaagctgagaaccgagcagaacgagagacagaaggtggccggcgacctgcacaaggcccagcagagcctggagctgatccagagcaagatcgtgaaggccgccggcgacaccaccgtgatcgagaacagcgacgtgagccccgagaccgagagcagcgagaaggagaccatgagcgtgagcctgaaccagaccgtgacccagctgcagcagctgctgcaggccgtgaaccagcagctgaccaaggagaaggagcactaccaggtgctggagtag

SEQ ID NO: 86205 - DNA, 3921 bp, synthetic construct; identical to SEQ ID NO: 86203
  misc_feature 1..3921: note = Description of Artificial Sequence: Synthetic coding sequence
  source 1..3921: mol_type = other DNA

SEQ ID NO: 86206 - DNA, 4074 bp, synthetic construct; identical to SEQ ID NO: 86204
  misc_feature 1..4074: note = Description of Artificial Sequence: Synthetic coding sequence
  source 1..4074: mol_type = other DNA

SEQ ID NO: 86207 - DNA, 3921 bp, synthetic construct; identical to SEQ ID NO: 86203
  misc_feature 1..3921: note = Description of Artificial Sequence: Synthetic coding sequence
  source 1..3921: mol_type = other DNA

SEQ ID NO: 86208 - DNA, 4074 bp, synthetic construct; identical to SEQ ID NO: 86204
  misc_feature 1..4074: note = Description of Artificial Sequence: Synthetic coding sequence
  source 1..4074: mol_type = other DNA

SEQ ID NO: 86209 - DNA, 3903 bp, synthetic construct
  misc_feature 1..3903: note = Description of Artificial Sequence: Synthetic coding sequence
  source 1..3903: mol_type = other DNA
atggagttctacgagagcgcctacttcatcgtgctgatccccagcatcgtgatcaccgtgatcttcctgttcttctggctgttcatgaaggagaccctgtacgacgaggtgctggccaagcagaagagagagcagaagctgatccccaccaagaccgacaagaagaaggccgagaagaagaagaacaagaagaaggagatccagaacggcaacctgcacgagagcgacagcgagagcgtgcccagagacttcaagctgagcgacgccctggccgtggaggacgaccaggtggcccccgtgcccctgaacgtggtggagaccagcagcagcgtgagagagagaaagaagaaggagaagaagcagaagcccgtgctggaggagcaggtgatcaaggagagcgacgccagcaagatccccggcaagaaggtggagcccgtgcccgtgaccaagcagcccaccccccccagcgaggccgccgccagcaagaagaagcccggccagaagaagagcaagaacggcagcgacgaccaggacaagaaggtggagaccctgatggtgcccagcaagagacaggaggccctgcccctgcaccaggagaccaagcaggagagcggcagcggcaagaagaaggccagcagcaagaagcagaagaccgagaacgtgttcgtggacgagcccctgatccacgccaccacctacatccccctgatggacaacgccgacagcagccccgtggtggacaagagagaggtgatcgacctgctgaagcccgaccaggtggagggcatccagaagagcggcaccaagaagctgaagaccgagaccgacaaggagaacgccgaggtgaagttcaaggacttcctgctgagcctgaagaccatgatgttcagcgaggacgaggccctgtgcgtggtggacctgctgaaggagaagagcggcgtgatccaggacgccctgaagaagagcagcaagggcgagctgaccaccctgatccaccagctgcaggagaaggacaagctgctggccgccgtgaaggaggacgccgccgccaccaaggacagatgcaagcagctgacccaggagatgatgaccgagaaggagagaagcaacgtggtgatcaccagaatgaaggacagaatcggcaccctggagaaggagcacaacgtgttccagaacaagatccacgtgagctaccaggagacccagcagatgcagatgaagttccagcaggtgagagagcagatggaggccgagatcgcccacctgaagcaggagaacggcatcctgagagacgccgtgagcaacaccaccaaccagctggagagcaagcagagcgccgagctgaacaagctgagacaggactacgccagactggtgaacgagctgaccgagaagaccggcaagctgcagcaggaggaggtgcagaagaagaacgccgagcaggccgccacccagctgaaggtgcagctgcaggaggccgagagaagatgggaggaggtgcagagctacatcagaaagagaaccgccgagcacgaggccgcccagcaggacctgcagagcaagttcgtggccaaggagaacgaggtgcagagcctgcacagcaagctgaccgacaccctggtgagcaagcagcagctggagcagagactgatgcagctgatggagagcgagcagaagagagtgaacaaggaggagagcctgcagatgcaggtgcaggacatcctggagcagaacgaggccctgaaggcccagatccagcagttccacagccagatcgccgcccagaccagcgccagcgtgctggccgaggagctgcacaaggtgatcgccgagaaggacaagcagatcaagcagaccgaggacagcctggccagcgagagagacagactgaccagcaaggaggaggagctgaaggacatccagaacatgaacttcctgctgaaggccgaggtgcagaagctgcaggccctggccaacgagcaggccgccgccgcccacgagctggagaagatgcagcagagcgtgtacgtgaaggacgacaagatcagactgctggaggagcagctgcagcacgagatcagcaacaagatggaggagttcaagatcctgaacgaccagaacaaggccctgaagagcgaggtgcagaagctgcagaccctggtgagcgagcagcccaacaaggacgtggtggagcagatggagaagtgcatccaggagaaggacgagaagctgaagaccgtggaggagctgctggagaccggcctgatccaggtggccaccaaggaggaggagctgaacgccatcagaaccgagaacagcagcctgaccaaggaggtgcaggacctgaaggccaagcagaacgaccaggtgagcttcgccagcctggtggaggagctgaagaaggtgatccacgagaaggacggcaagatcaagagcgtggaggagctgctggaggccgagctgctgaaggtggccaacaaggagaagaccgtgcaggacctgaagcaggagatcaaggccctgaaggaggagatcggcaacgtgcagctggagaaggcccagcagctgagcatcaccagcaaggtgcaggagctgcagaacctgctgaagggcaaggaggagcagatgaacaccatgaaggccgtgctggaggagaaggagaaggacctggccaacaccggcaagtggctgcaggacctgcaggaggagaacgagagcctgaaggcccacgtgcaggaggtggcccagcacaacctgaaggaggccagcagcgccagccagttcgaggagctggagatcgtgctgaaggagaaggagaacgagctgaagagactggaggccatgctgaaggagagagagagcgacctgagcagcaagacccagctgctgcaggacgtgcaggacgagaacaagctgttcaagagccagatcgagcagctgaagcagcagaactaccagcaggccagcagcttccccccccacgaggagctgctgaaggtgatcagcgagagagagaaggagatcagcggcctgtggaacgagctggacagcctgaaggacgccgtggagcaccagagaaagaagaacaacgagagacagcagcaggtggaggccgtggagctggaggccaaggaggtgctgaagaagctgttccccaaggtgagcgtgcccagcaacctgagctacggcgagtggctgcacggcttcgagaagaaggccaaggagtgcatggccggcaccagcggcagcgaggaggtgaaggtgctggagcacaagctgaaggaggccgacgagatgcacaccctgctgcagctggagtgcgagaagtacaagagcgtgctggccgagaccgagggcatcctgcagaagctgcagagaagcgtggagcaggaggagaacaagtggaaggtgaaggtggacgagagccacaagaccatcaagcagatgcagagcagcttcaccagcagcgagcaggagctggagagactgagaagcgagaacaaggacatcgagaacctgagaagagagagagagcacctggagatggagctggagaaggccgagatggagagaagcacctacgtgaccgaggtgagagagctgaaggcccagctgaacgagaccctgaccaagctgagaaccgagcagaacgagagacagaaggtggccggcgacctgcacaaggcccagcagagcctggagctgatccagagcaagatcgtgaaggccgccggcgacaccaccgtgatcgagaacagcgacgtgagccccgagaccgagagcagcgagaaggagaccatgagcgtgagcctgaaccagaccgtgacccagctgcagcagctgctgcaggccgtgaaccagcagctgaccaaggagaaggagcactaccaggtgctggagtag

SEQ ID NO: 86210 - DNA, 4074 bp, synthetic construct; identical to SEQ ID NO: 86204
  misc_feature 1..4074: note = Description of Artificial Sequence: Synthetic coding sequence
  source 1..4074: mol_type = other DNA

SEQ ID NO: 86211 - DNA, 228 bp, synthetic construct
  misc_feature 1..228: note = Description of Artificial Sequence: Synthetic coding sequence
  source 1..228: mol_type = other DNA
atggagttctacgagagcgcctacttcatcgtgctgatccccagcatcgtgatcaccgtgatcttcctgttcttctggctgttcatgaaggagaccctgtacgacgaggtgctggccaagcagaagagagagcagaagctgatccccaccaagaccgacaagaagaaggccgagaagaagaagaacaagaagaaggagatccagaacggcaacctgcacgagagctag

SEQ ID NO: 86212 - DNA, 183 bp, synthetic construct
  misc_feature 1..183: note = Description of Artificial Sequence: Synthetic coding sequence
  source 1..183: mol_type = other DNA
atggagttctacgagagcgcctacttcatcgtgctgatccccagcatcgtgatcaccgtgatcttcctgttcttctggctgttcatgaaggagaccctgtacgacgaggtgctggccaagcagaagagagagcagaagctgatccccaccaagaccgacaagaagaaggccgagaagaagtag

SEQ ID NO: 86213 - DNA, 3171 bp, synthetic construct
  misc_feature 1..3171: note = Description of Artificial Sequence: Synthetic coding sequence
  source 1..3171: mol_type = other DNA
atggccagccagcccaacagcagcgccaagaagaaggaggagaagggcaagaacatccaggtggtggtgagatgcagacccttcaacctggccgagagaaaggccagcgcccacagcatcgtggagtgcgaccccgtgagaaaggaggtgagcgtgagaaccggcggcctggccgacaagagcagcagaaagacctacaccttcgacatggtgttcggcgccagcaccaagcagatcgacgtgtacagaagcgtggtgtgccccatcctggacgaggtgatcatgggctacaactgcaccatcttcgcctacggccagaccggcaccggcaagaccttcaccatggagggcgagagaagccccaacgaggagtacacctgggaggaggaccccctggccggcatcatccccagaaccctgcaccagatcttcgagaagctgaccgacaacggcaccgagttcagcgtgaaggtgagcctgctggagatctacaacgaggagctgttcgacctgctgaaccccagcagcgacgtgagcgagagactgcagatgttcgacgaccccagaaacaagagaggcgtgatcatcaagggcctggaggagatcaccgtgcacaacaaggacgaggtgtaccagatcctggagaagggcgccgccaagagaaccaccgccgccaccctgatgaacgcctacagcagcagaagccacagcgtgttcagcgtgaccatccacatgaaggagaccaccatcgacggcgaggagctggtgaagatcggcaagctgaacctggtggacctggccggcagcgagaacatcggcagaagcggcgccgtggacaagagagccagagaggccggcaacatcaaccagagcctgctgaccctgggcagagtgatcaccgccctggtggagagaaccccccacgtgccctacagagagagcaagctgaccagaatcctgcaggacagcctgggcggcagaaccagaaccagcatcatcgccaccatcagccccgccagcctgaacctggaggagaccctgagcaccctggagtacgcccacagagccaagaacatcctgaacaagcccgaggtgaaccagaagctgaccaagaaggccctgatcaaggagtacaccgaggagatcgagagactgaagagagacctggccgccgccagagagaagaacggcgtgtacatcagcgaggagaacttcagagtgatgagcggcaagctgaccgtgcaggaggagcagatcgtggagctgatcgagaagatcggcgccgtggaggaggagctgaacagagtgaccgagctgttcatggacaacaagaacgagctggaccagtgcaagagcgacctgcagaacaagacccaggagctggagaccacccagaagcacctgcaggagaccaagctgcagctggtgaaggaggagtacatcaccagcgccctggagagcaccgaggagaagctgcacgacgccgccagcaagctgctgaacaccgtggaggagaccaccaaggacgtgagcggcctgcacagcaagctggacagaaagaaggccgtggaccagcacaacgccgaggcccaggacatcttcggcaagaacctgaacagcctgttcaacaacatggaggagctgatcaaggacggcagcagcaagcagaaggccatgctggaggtgcacaagaccctgttcggcaacctgctgagcagcagcgtgagcgccctggacaccatcaccaccgtggccctgggcagcctgaccagcatccccgagaacgtgagcacccacgtgagccagatcttcaacatgatcctgaaggagcagagcctggccgccgagagcaagaccgtgctgcaggagctgatcaacgtgctgaagaccgacctgctgagcagcctggagatgatcctgagccccaccgtggtgagcatcctgaagatcaacagccagctgaagcacatcttcaagaccagcctgaccgtggccgacaagatcgaggaccagaagaaggagctggacggcttcctgagcatcctgtgcaacaacctgcacgagctgcaggagaacaccatctgcagcctggtggagagccagaagcagtgcggcaacctgaccgaggacctgaagaccatcaagcagacccacagccaggagctgtgcaagctgatgaacctgtggaccgagagattctgcgccctggaggagaagtgcgagaacatccagaagcccctgagcagcgtgcaggagaacatccagcagaagagcaaggacatcgtgaacaagatgaccttccacagccagaagttctgcgccgacagcgacggcttcagccaggagctgagaaacttcaaccaggagggcaccaagctggtggaggagagcgtgaagcacagcgacaagctgaacggcaacctggagaagatcagccaggagaccgagcagagatgcgagagcctgaacaccagaaccgtgtacttcagcgagcagtgggtgagcagcctgaacgagagagagcaggagctgcacaacctgctggaggtggtgagccagtgctgcgaggccagcagcagcgacatcaccgagaagagcgacggcagaaaggccgcccacgagaagcagcacaacatcttcctggaccagatgaccatcgacgaggacaagctgatcgcccagaacctggagctgaacgagaccatcaagatcggcctgaccaagctgaactgcttcctggagcaggacctgaagctggacatccccaccggcaccaccccccagagaaagagctacctgtaccccagcaccctggtgagaaccgagcccagagagcacctgctggaccagctgaagagaaagcagcccgagctgctgatgatgctgaactgcagcgagaacaacaaggaggagaccatccccgacgtggacgtggaggaggccgtgctgggccagtacaccgaggagcccctgagccaggagcccagcgtggacgccggcgtggactgcagcagcatcggcggcgtgcccttcttccagcacaagaagagccacggcaaggacaaggagaacagaggcatcaacaccctggagagaagcaaggtggaggagaccaccgagcacctggtgaccaagagcagactgcccctgagagcccagatcaacctgtag

SEQ ID NO: 86214 - DNA, 5418 bp, synthetic construct
  misc_feature 1..5418: note = Description of Artificial Sequence: Synthetic coding sequence
  source 1..5418: mol_type = other DNA
atgagcgacaccaaggtgaaggtggccgtgagagtgagacccatgaacagaagagagctggagctgaacaccaagtgcgtggtggagatggagggcaaccagaccgtgctgcaccccccccccagcaacaccaagcagggcgagagaaagccccccaaggtgttcgccttcgactactgcttctggagcatggacgagagcaacaccaccaagtacgccggccaggaggtggtgttcaagtgcctgggcgagggcatcctggagaaggccttccagggctacaacgcctgcatcttcgcctacggccagaccggcagcggcaagagcttcagcatgatgggccacgccgagcagctgggcctgatccccagactgtgctgcgccctgttcaagagaatcagcctggagcagaacgagagccagaccttcaaggtggaggtgagctacatggagatctacaacgagaaggtgagagacctgctggaccccaagggcagcagacagagcctgaaggtgagagagcacaaggtgctgggcccctacgtggacggcctgagccagctggccgtgaccagcttcgaggacatcgagagcctgatgagcgagggcaacaagagcagaaccgtggccgccaccaacatgaacgaggagagcagcagaagccacgccgtgttcaacatcatcatcacccagaccctgtacgacctgcagagcggcaacagcggcgagaaggtgagcaaggtgagcctggtggacctggccggcagcgagagagtgagcaagaccggcgccgccggcgagagactgaaggagggcagcaacatcaacaagagcctgaccaccctgggcctggtgatcagcagcctggccgaccaggccgccggcaagggcaagagcaagttcgtgccctacagagacagcgtgctgacctggctgctgaaggacaacctgggcggcaacagccagaccagcatgatcgccaccatcagccccgccgccgacaactacgaggagaccctgagcaccctgagatacgccgacagagccaagagaatcgtgaaccacgccgtggtgaacgaggaccccaacgccaaggtgatcagagagctgagagaggaggtggagaagctgagagagcagctgagccaggccgaggccatgaaggcccccgagctgaaggagaagctggaggagagcgagaagctgatcaaggagctgaccgtgacctgggaggagaagctgagaaagaccgaggagatcgcccaggagagacagagacagctggagagcatgggcatcagcctggagatgagcggcatcaaggtgggcgacgacaagtgctacctggtgaacctgaacgccgaccccgccctgaacgagctgctggtgtactacctgaaggaccacaccagagtgggcgccgacaccagccaggacatccagctgttcggcatcggcatccagccccagcactgcgagatcgacatcgccagcgacggcgacgtgaccctgacccccaaggagaacgccagaagctgcgtgaacggcaccctggtgtgcagcaccacccagctgtggcacggcgacagaatcctgtggggcaacaaccacttcttcagaatcaacctgcccaagagaaagagaagagactggctgaaggacttcgagaaggagaccggcccccccgagcacgacctggacgccgccagcgaggccagcagcgagcccgactacaactacgagttcgcccagatggaggtgatcatgaagaccctgaacagcaacgaccccgtgcagaacgtggtgcaggtgctggagaagcagtacctggaggagaagagaagcgccctggaggagcagagactgatgtacgagagagagctggagcagctgagacagcagctgagccccgacagacagccccagagcagcggccccgacagactggcctacagcagccagaccgcccagcagaaggtgacccagtgggccgaggagagagacgagctgttcagacagagcctggccaagctgagagagcagctggtgaaggccaacaccctggtgagagaggccaacttcctggccgaggagatgagcaagctgaccgactaccaggtgaccctgcagatccccgccgccaacctgagcgccaacagaaagagaggcgccatcgtgagcgagcccgccatccaggtgagaagaaagggcaagagcacccaggtgtggaccatcgagaagctggagaacaagctgatcgacatgagagacctgtaccaggagtggaaggagaaggtgcccgaggccaagagactgtacggcaagagaggcgaccccttctacgaggcccaggagaaccacaacctgatcggcgtggccaacgtgttcctggagtgcctgttctgcgacgtgaagctgcagtacgccgtgcccatcatcagccagcagggcgaggtggccggcagactgcacgtggaggtgatgagagtgaccggcgccgtgcccgagagagtggtggaggacgacagcagcgagaacagcagcgagagcggcagcctggaggtggtggacagcagcggcgagatcatccacagagtgaagaagctgacctgcagagtgaagatcaaggaggccaccggcctgcccctgaacctgagcaacttcgtgttctgccagtacaccttctgggaccagtgcgagagcaccgtggccgcccccgtggtggaccccgaggtgcccagcccccagagcaaggacgcccagtacaccgtgaccttcagccactgcaaggactacgtggtgaacgtgaccgaggagttcctggagttcatcagcgacggcgccctggccatcgaggtgtggggccacagatgcgccggcaacggcagcagcatctgggaggtggacagcctgcacgccaagaccagaaccctgcacgacagatggaacgaggtgaccagaagaatcgagatgtggatcagcatcctggagctgaacgagctgggcgagtacgccgccgtggagctgcaccaggccaaggacgtgaacaccggcggcatcttccagctgagacagggccacagcagaagagtgcaggtgaccgtgaagcccgtgcagcacagcggcaccctgcccctgatggtggaggccatcctgagcgtgagcatcggctgcgtgaccgccagaagcaccaagctgcagagaggcctggacagctaccagagagacgacgaggacggcgacgacatggacagctaccaggaggaggacctgaactgcgtgagagagagatggagcgacgccctgatcaagagaagagagtacctggacgagcagatcaagaaggtgagcaacaagaccgagaagaccgaggacgacgtggagagagaggcccagctggtggagcagtgggtgggcctgaccgaggagagaaacgccgtgctggtgcccgcccccggcagcggcatccccggcgcccccgccgactggatccccccccccggcatggagacccacatccccgtgctgttcctggacctgaacgccgacgacctgagcgccaacgagcagctggtgggcccccacgccagcggcgtgaacagcatcctgcccaaggagcacggcagccagttcttctacctgcccatcatcaagcacagcgacgacgaggtgagcgccaccgccagctgggacagcagcgtgcacgacagcgtgcacctgaacagagtgaccccccagaacgagagaatctacctgatcgtgaagaccaccgtgcagctgagccaccccgccgccatggagctggtgctgagaaagagaatcgccgccaacatctacaacaagcagagcttcacccagagcctgaagagaagaatcagcctgaagaacatcttctacagctgcggcgtgacctacgagatcgtgagcaacatccccaaggccaccgaggagatcgaggacagagagaccctggccctgctggccgccagaagcgagaacgagggcaccagcgacggcgagacctacatcgagaagtacaccagaggcgtgctgcaggtggagaacatcctgagcctggagagactgagacaggccgtgaccgtgaaggaggccctgagcaccaaggccagacacatcagaagaagcctgagcacccccaacgtgcacaacgtgagcagcagcagacccgacctgagcggcttcgacgaggacgacaagggctggcccgagaaccagctggacatgagcgactacagcagcagctaccaggacgtggcctgctacggcaccctgcccagagacagccccagaagaaacaaggagggctgcaccagcgagaccccccacgccctgaccgtgagccccttcaaggccttcagcccccagccccccaagttcttcaagcccctgatgcccgtgaaggaggagcacaagaagagaatcgccctggaggccagacccctgctgagccaggagagcatgccccccccccaggcccacaaccccggctgcatcgtgcccagcggcagcaacggcagcagcatgcccgtggagcacaacagcaagagagagaagaagatcgacagcgaggaggaggagaacgagctggaggccatcaacagaaagctgatcagcagccagccctacgtgcccgtggagttcgccgacttcagcgtgtacaacgccagcctggagaacagagagtggttcagcagcaaggtggacctgagcaacagcagagtgctggagaaggaggtgagcagaagccccaccaccagcagcatcaccagcggctacttcagccacagcgccagcaacgccaccctgagcgacatggtggtgcccagcagcgacagcagcgaccagctggccatccagaccaaggacgccgacagcaccgagcacagcacccccagcctggtgcacgacttcagacccagcagcaacaaggagctgaccgaggtggagaagggcctggtgaaggacaagatcatcgtggtgcccctgaaggagaacagcgccctggccaagggcagccccagcagccagagcatccccgagaagaacagcaagagcctgtgcagaaccggcagctgcagcgagctggacgcctgccccagcaagatcagccagcccgccagaggcttctgccccagagaggtgaccgtggagcacaccaccaacatcctggaggaccacagcttcaccgagttcatgggcgtgagcgagggcaaggacttcgacggcctgaccgacagcagcgccggcgagctgagcagcagaagaagcctgcccaacaagaccggcggcaagaccgtgagcgacggcctgcaccaccccagccagctgcacagcaagctggagaacgaccaggtgatcatccccgaggccgccttctgggtgctgtgctgccagtag

SEQ ID NO: 86215 - DNA, 5250 bp, synthetic construct
  misc_feature 1..5250: note = Description of Artificial Sequence: Synthetic coding sequence
  source 1..5250: mol_type = other DNA
atgagcgacaccaaggtgaaggtggccgtgagagtgagacccatgaacagaagagagctggagctgaacaccaagtgcgtggtggagatggagggcaaccagaccgtgctgcaccccccccccagcaacaccaagcagggcgagagaaagccccccaaggtgttcgccttcgactactgcttctggagcatggacgagagcaacaccaccaagtacgccggccaggaggtggtgttcaagtgcctgggcgagggcatcctggagaaggccttccagggctacaacgcctgcatcttcgcctacggccagaccggcagcggcaagagcttcagcatgatgggccacgccgagcagctgggcctgatccccagactgtgctgcgccctgttcaagagaatcagcctggagcagaacgagagccagaccttcaaggtggaggtgagctacatggagatctacaacgagaaggtgagagacctgctggaccccaagggcagcagacagagcctgaaggtgagagagcacaaggtgctgggcccctacgtggacggcctgagccagctggccgtgaccagcttcgaggacatcgagagcctgatgagcgagggcaacaagagcagaaccgtggccgccaccaacatgaacgaggagagcagcagaagccacgccgtgttcaacatcatcatcacccagaccctgtacgacctgcagagcggcaacagcggcgagaaggtgagcaaggtgagcctggtggacctggccggcagcgagagagtgagcaagaccggcgccgccggcgagagactgaaggagggcagcaacatcaacaagagcctgaccaccctgggcctggtgatcagcagcctggccgaccaggccgccggcaagggcaagagcaagttcgtgccctacagagacagcgtgctgacctggctgctgaaggacaacctgggcggcaacagccagaccagcatgatcgccaccatcagccccgccgccgacaactacgaggagaccctgagcaccctgagatacgccgacagagccaagagaatcgtgaaccacgccgtggtgaacgaggaccccaacgccaaggtgatcagagagctgagagaggaggtggagaagctgagagagcagctgagccaggccgaggccatgaaggcccccgagctgaaggagaagctggaggagagcgagaagctgatcaaggagctgaccgtgacctgggaggagaagctgagaaagaccgaggagatcgcccaggagagacagagacagctggagagcatgggcatcagcctggagatgagcggcatcaaggtgggcgacgacaagtgctacctggtgaacctgaacgccgaccccgccctgaacgagctgctggtgtactacctgaaggaccacaccagagtgggcgccgacaccagccaggacatccagctgttcggcatcggcatccagccccagcactgcgagatcgacatcgccagcgacggcgacgtgaccctgacccccaaggagaacgccagaagctgcgtgaacggcaccctggtgtgcagcaccacccagctgtggcacggcgacagaatcctgtggggcaacaaccacttcttcagaatcaacctgcccaagagaaagagaagagactggctgaaggacttcgagaaggagaccggcccccccgagcacgacctggacgccgccagcgaggccagcagcgagcccgactacaactacgagttcgcccagatggaggtgatcatgaagaccctgaacagcaacgaccccgtgcagaacgtggtgcaggtgctggagaagcagtacctggaggagaagagaagcgccctggaggagcagagactgatgtacgagagagagctggagcagctgagacagcagctgagccccgacagacagccccagagcagcggccccgacagactggcctacagcagccagaccgcccagcagaaggtgacccagtgggccgaggagagagacgagctgttcagacagagcctggccaagctgagagagcagctggtgaaggccaacaccctggtgagagaggccaacttcctggccgaggagatgagcaagctgaccgactaccaggtgaccctgcagatccccgccgccaacctgagcgccaacagaaagagaggcgccatcgtgagcgagcccgccatccaggtgagaagaaagggcaagagcacccaggtgtggaccatcgagaagctggagaacaagctgatcgacatgagagacctgtaccaggagtggaaggagaaggtgcccgaggccaagagactgtacggcaagagaggcgaccccttctacgaggcccaggagaaccacaacctgatcggcgtggccaacgtgttcctggagtgcctgttctgcgacgtgaagctgcagtacgccgtgcccatcatcagccagcagggcgaggtggccggcagactgcacgtggaggtgatgagagtgaccggcgccgtgcccgagagagtggtggaggacgacagcagcgagaacagcagcgagagcggcagcctggaggtggtggacagcagcggcgagatcatccacagagtgaagaagctgacctgcagagtgaagatcaaggaggccaccggcctgcccctgaacctgagcaacttcgtgttctgccagtacaccttctgggaccagtgcgagagcaccgtggccgcccccgtggtggaccccgaggtgcccagcccccagagcaaggacgcccagtacaccgtgaccttcagccactgcaaggactacgtggtgaacgtgaccgaggagttcctggagttcatcagcgacggcgccctggccatcgaggtgtggggccacagatgcgccggcaacggcagcagcatctgggaggtggacagcctgcacgccaagaccagaaccctgcacgacagatggaacgaggtgaccagaagaatcgagatgtggatcagcatcctggagctgaacgagctgggcgagtacgccgccgtggagctgcaccaggccaaggacgtgaacaccggcggcatcttccagctgagacagggccacagcagaagagtgcaggtgaccgtgaagcccgtgcagcacagcggcaccctgcccctgatggtggaggccatcctgagcgtgagcatcggctgcgtgaccgccagaagcaccaagctgcagagaggcctggacagctaccaggaggaggacctgaactgcgtgagagagagatggagcgacgccctgatcaagagaagagagtacctggacgagcagatcaagaaggtgagcaacaagaccgagaagaccgaggacgacgtggagagagaggcccagctggtggagcagtgggtgggcctgaccgaggagagaaacgccgtgctggtgcccgcccccggcagcggcatccccggcgcccccgccgactggatccccccccccggcatggagacccacatccccgtgctgttcctggacctgaacgccgacgacctgagcgccaacgagcagctggtgggcccccacgccagcggcgtgaacagcatcctgcccaaggagcacggcagccagttcttctacctgcccatcatcaagcacagcgacgacgaggtgagcgccaccgccagctgggacagcagcgtgcacgacagcgtgcacctgaacagagtgaccccccagaacgagagaatctacctgatcgtgaagaccaccgtgcagctgagccaccccgccgccatggagctggtgctgagaaagagaatcgccgccaacatctacaacaagcagagcttcacccagagcctgaagagaagaatcagcctgaagaacatcttctacagctgcggcgtgacctacgagatcgtgagcaacatccccaaggccaccgaggagatcgaggacagagagaccctggccctgctggccgccagaagcgagaacgagggcaccagcgacggcgagacctacatcgagaagtacaccagaggcgtgctgcaggtggagaacatcctgagcctggagagactgagacaggccgtgaccgtgaaggaggccctgagcaccaaggccagacacatcagaagaagcctgagcacccccaacgtgcacaacgtgagcagcagcagacccgacctgagcggcttcgacgaggacgacaagggctggcccgagaaccagctggacatgagcgactacagcagcagctaccaggacgtggcctgctacggcaccctgcccagagacagccccagaagaaacaaggagggctgcaccagcgagaccccccacgccctgaccgtgagccccttcaaggccttcagcccccagccccccaagttcttcaagcccctgatgcccgtgaaggaggagcacaagaagagaatcgccctggaggccagacccctgctgagccaggaggacagcgaggaggaggagaacgagctggaggccatcaacagaaagctgatcagcagccagccctacgtgcccgtggagttcgccgacttcagcgtgtacaacgccagcctggagaacagagagtggttcagcagcaaggtggacctgagcaacagcagagtgctggagaaggaggtgagcagaagccccaccaccagcagcatcaccagcggctacttcagccacagcgccagcaacgccaccctgagcgacatggtggtgcccagcagcgacagcagcgaccagctggccatccagaccaaggacgccgacagcaccgagcacagcacccccagcctggtgcacgacttcagacccagcagcaacaaggagctgaccgaggtggagaagggcctggtgaaggacaagatcatcgtggtgcccctgaaggagaacagcgccctggccaagggcagccccagcagccagagcatccccgagaagaacagcaagagcctgtgcagaaccggcagctgcagcgagctggacgcctgccccagcaagatcagccagcccgccagaggcttctgccccagagaggtgaccgtggagcacaccaccaacatcctggaggaccacagcttcaccgagttcatgggcgtgagcgagggcaaggacttcgacggcctgaccgacagcagcgccggcgagctgagcagcagaagaagcctgcccaacaagaccggcggcaagaccgtgagcgacggcctgcaccaccccagccagctgcacagcaagctggagaacgaccagggcggcaccaccagcagatag

SEQ ID NO: 86216 - DNA, 5313 bp, synthetic construct
  misc_feature 1..5313: note = Description of Artificial Sequence: Synthetic coding sequence
  source 1..5313: mol_type = other DNA
atgagcgacaccaaggtgaaggtggccgtgagagtgagacccatgaacagaagagagctggagctgaacaccaagtgcgtggtggagatggagggcaaccagaccgtgctgcaccccccccccagcaacaccaagcagggcgagagaagacccagccaggtgttcgccttcgactactgcttctggagcatggacgagagcaacaccaccaagtacgccggccaggaggtggtgttcaagtgcctgggcgagggcatcctggagaaggccttccagggctacaacgcctgcatcttcgcctacggccagaccggcagcggcaagagcttcagcatgatgggccacgccgagcagctgggcctgatccccagactgtgctgcgccctgttcaagagaatcagcctggagcagaacgagagccagaccttcaaggtggaggtgagctacatggagatctacaacgagaaggtgagagacctgctggaccccaagggcagcagacagagcctgaaggtgagagagcacaaggtgctgggcccctacgtggacggcctgagccagctggccgtgaccagcttcgaggacatcgagagcctgatgagcgagggcaacaagagcagaaccgtggccgccaccaacatgaacgaggagagcagcagaagccacgccgtgttcaacatcatcatcacccagaccctgtacgacctgcagagcggcaacagcggcgagaaggtgagcaaggtgagcctggtggacctggccggcagcgagagagtgagcaagaccggcgccgccggcgagagactgaaggagggcagcaacatcaacaagagcctgaccaccctgggcctggtgatcagcagcctggccgaccaggccgccggcaagggcaagagcaagttcgtgccctacagagacagcgtgctgacctggctgctgaaggacaacctgggcggcaacagccagaccagcatgatcgccaccatcagccccgccgccgacaactacgaggagaccctgagcaccctgagatacgccgacagagccaagagaatcgtgaaccacgccgtggtgaacgaggaccccaacgccaaggtgatcagagagctgagagaggaggtggagaagctgagagagcagctgagccaggccgaggccatgaaggcccccgagctgaaggagaagctggaggagagcgagaagctgatcaaggagctgaccgtgacctgggaggagaagctgagaaagaccgaggagatcgcccaggagagacagagacagctggagagcatgggcatcagcctggagatgagcggcatcaaggtgggcgacgacaagtgctacctggtgaacctgaacgccgaccccgccctgaacgagctgctggtgtactacctgaaggaccacaccagagtgggcgccgacaccagccaggacatccagctgttcggcatcggcatccagccccagcactgcgagatcgacatcgccagcgacggcgacgtgaccctgacccccaaggagaacgccagaagctgcgtgaacggcaccctggtgtgcagcaccacccagctgtggcacggcgacagaatcctgtggggcaacaaccacttcttcagaatcaacctgcccaagagaaagagaagagactggctgaaggacttcgagaaggagaccggcccccccgagcacgacctggacgccgccagcgaggccagcagcgagcccgactacaactacgagttcgcccagatggaggtgatcatgaagaccctgaacagcaacgaccccgtgcagaacgtggtgcaggtgctggagaagcagtacctggaggagaagagaagcgccctggaggagcagagactgatgtacgagagagagctggagcagctgagacagcagctgagccccgacagacagccccagagcagcggccccgacagactggcctacagcagccagaccgcccagcagaaggtgacccagtgggccgaggagagagacgagctgttcagacagagcctggccaagctgagagagcagctggtgaaggccaacaccctggtgagagaggccaacttcctggccgaggagatgagcaagctgaccgactaccaggtgaccctgcagatccccgccgccaacctgagcgccaacagaaagagaggcgccatcgtgagcgagcccgccatccaggtgagaagaaagggcaagagcacccaggtgtggaccatcgagaagctggagaacaagctgatcgacatgagagacctgtaccaggagtggaaggagaaggtgcccgaggccaagagactgtacggcaagagaggcgaccccttctacgaggcccaggagaaccacaacctgatcggcgtggccaacgtgttcctggagtgcctgttctgcgacgtgaagctgcagtacgccgtgcccatcatcagccagcagggcgaggtggccggcagactgcacgtggaggtgatgagagtgaccggcgccgtgcccgagagagtggtggaggacgacagcagcgagaacagcagcgagagcggcagcctggaggtggtggacagcagcggcgagatcatccacagagtgaagaagctgacctgcagagtgaagatcaaggaggccaccggcctgcccctgaacctgagcaacttcgtgttctgccagtacaccttctgggaccagtgcgagagcaccgtggccgcccccgtggtggaccccgaggtgcccagcccccagagcaaggacgcccagtacaccgtgaccttcagccactgcaaggactacgtggtgaacgtgaccgaggagttcctggagttcatcagcgacggcgccctggccatcgaggtgtggggccacagatgcgccggcaacggcagcagcatctgggaggtggacagcctgcacgccaagaccagaaccctgcacgacagatggaacgaggtgaccagaagaatcgagatgtggatcagcatcctggagctgaacgagctgggcgagtacgccgccgtggagctgcaccaggccaaggacgtgaacaccggcggcatcttccagctgagacagggccacagcagaagagtgcaggtgaccgtgaagcccgtgcagcacagcggcaccctgcccctgatggtggaggccatcctgagcgtgagcatcggctgcgtgaccgccagaagcaccaagctgcagagaggcctggacagctaccagagagacgacgaggacggcgacgacatggacagctaccaggaggaggacctgaactgcgtgagagagagatggagcgacgccctgatcaagagaagagagtacctggacgagcagatcaagaaggtgagcaacaagaccgagaagaccgaggacgacgtggagagagaggcccagctggtggagcagtgggtgggcctgaccgaggagagaaacgccgtgctggtgcccgcccccggcagcggcatccccggcgcccccgccgactggatccccccccccggcatggagacccacatccccgtgctgttcctggacctgaacgccgacgacctgagcgccaacgagcagctggtgggcccccacgccagcggcgtgaacagcatcctgcccaaggagcacggcagccagttcttctacctgcccatcatcaagcacagcgacgacgaggtgagcgccaccgccagctgggacagcagcgtgcacgacagcgtgcacctgaacagagtgaccccccagaacgagagaatctacctgatcgtgaagaccaccgtgcagctgagccaccccgccgccatggagctggtgctgagaaagagaatcgccgccaacatctacaacaagcagagcttcacccagagcctgaagagaagaatcagcctgaagaacatcttctacagctgcggcgtgacctacgagatcgtgagcaacatccccaaggccaccgaggagatcgaggacagagagaccctggccctgctggccgccagaagcgagaacgagggcaccagcgacggcgagacctacatcgagaagtacaccagaggcgtgctgcaggtggagaacatcctgagcctggagagactgagacaggccgtgaccgtgaaggaggccctgagcaccaaggccagacacatcagaagaagcctgagcacccccaacgtgcacaacgtgagcagcagcagacccgacctgagcggcttcgacgaggacgacaagggctggcccgagaaccagctggacatgagcgactacagcagcagctaccaggacgtggcctgctacggcaccctgcccagagacagccccagaagaaacaaggagggctgcaccagcgagaccccccacgccctgaccgtgagccccttcaaggccttcagcccccagccccccaagttcttcaagcccctgatgcccgtgaaggaggagcacaagaagagaatcgccctggaggccagacccctgctgagccaggaggacagcgaggaggaggagaacgagctggaggccatcaacagaaagctgatcagcagccagccctacgtgcccgtggagttcgccgacttcagcgtgtacaacgccagcctggagaacagagagtggttcagcagcaaggtggacctgagcaacagcagagtgctggagaaggaggtgagcagaagccccaccaccagcagcatcaccagcggctacttcagccacagcgccagcaacgccaccctgagcgacatggtggtgcccagcagcgacagcagcgaccagctggccatccagaccaaggacgccgacagcaccgagcacagcacccccagcctggtgcacgacttcagacccagcagcaacaaggagctgaccgaggtggagaagggcctggtgaaggacaagatcatcgtggtgcccctgaaggagaacagcgccctggccaagggcagccccagcagccagagcatccccgagaagaacagcaagagcctgtgcagaaccggcagctgcagcgagctggacgcctgccccagcaagatcagccagcccgccagaggcttctgccccagagaggtgaccgtggagcacaccaccaacatcctggaggaccacagcttcaccgagttcatgggcgtgagcgagggcaaggacttcgacggcctgaccgacagcagcgccggcgagctgagcagcagaagaagcctgcccaacaagaccggcggcaagaccgtgagcgacggcctgcaccaccccagccagctgcacagcaagctggagaacgaccaggtgatcatccccgaggccgccttctgggtgctgtgctgccagtag

SEQ ID NO: 86217 - DNA, 5313 bp, synthetic construct
  misc_feature 1..5313: note = Description of Artificial Sequence: Synthetic coding sequence
  source 1..5313: mol_type = other DNA
atgagcgacaccaaggtgaaggtggccgtgagagtgagacccatgaacagaagagagctggagctgaacaccaagtgcgtggtggagatggagggcaaccagaccgtgctgcaccccccccccagcaacaccaagcagggcgagagaaagccccccaaggtgttcgccttcgactactgcttctggagcatggacgagagcaacaccaccaagtacgccggccaggaggtggtgttcaagtgcctgggcgagggcatcctggagaaggccttccagggctacaacgcctgcatcttcgcctacggccagaccggcagcggcaagagcttcagcatgatgggccacgccgagcagctgggcctgatccccagactgtgctgcgccctgttcaagagaatcagcctggagcagaacgagagccagaccttcaaggtggaggtgagctacatggagatctacaacgagaaggtgagagacctgctggaccccaagggcagcagacagagcctgaaggtgagagagcacaaggtgctgggcccctacgtggacggcctgagccagctggccgtgaccagcttcgaggacatcgagagcctgatgagcgagggcaacaagagcagaaccgtggccgccaccaacatgaacgaggagagcagcagaagccacgccgtgttcaacatcatcatcacccagaccctgtacgacctgcagagcggcaacagcggcgagaaggtgagcaaggtgagcctggtggacctggccggcagcgagagagtgagcaagaccggcgccgccggcgagagactgaaggagggcagcaacatcaacaagagcctgaccaccctgggcctggtgatcagcagcctggccgaccaggccgccggcaagggcaagagcaagttcgtgccctacagagacagcgtgctgacctggctgctgaaggacaacctgggcggcaacagccagaccagcatgatcgccaccatcagccccgccgccgacaactacgaggagaccctgagcaccctgagatacgccgacagagccaagagaatcgtgaaccacgccgtggtgaacgaggaccccaacgccaaggtgatcagagagctgagagaggaggtggagaagctgagagagcagctgagccaggccgaggccatgaaggcccccgagctgaaggagaagctggaggagagcgagaagctgatcaaggagctgaccgtgacctgggaggagaagctgagaaagaccgaggagatcgcccaggagagacagagacagctggagagcatgggcatcagcctggagatgagcggcatcaaggtgggcgacgacaagtgctacctggtgaacctgaacgccgaccccgccctgaacgagctgctggtgtactacctgaaggaccacaccagagtgggcgccgacaccagccaggacatccagctgttcggcatcggcatccagccccagcactgcgagatcgacatcgccagcgacggcgacgtgaccctgacccccaaggagaacgccagaagctgcgtgaacggcaccctggtgtgcagcaccacccagctgtggcacggcgacagaatcctgtggggcaacaaccacttcttcagaatcaacctgcccaagagaaagagaagagactggctgaaggacttcgagaaggagaccggcccccccgagcacgacctggacgccgccagcgaggccagcagcgagcccgactacaactacgagttcgcccagatggaggtgatcatgaagaccctgaacagcaacgaccccgtgcagaacgtggtgcaggtgctggagaagcagtacctggaggagaagagaagcgccctggaggagcagagactgatgtacgagagagagctggagcagctgagacagcagctgagccccgacagacagccccagagcagcggccccgacagactggcctacagcagccagaccgcccagcagaaggtgacccagtgggccgaggagagagacgagctgttcagacagagcctggccaagctgagagagcagctggtgaaggccaacaccctggtgagagaggccaacttcctggccgaggagatgagcaagctgaccgactaccaggtgaccctgcagatccccgccgccaacctgagcgccaacagaaagagaggcgccatcgtgagcgagcccgccatccaggtgagaagaaagggcaagagcacccaggtgtggaccatcgagaagctggagaacaagctgatcgacatgagagacctgtaccaggagtggaaggagaaggtgcccgaggccaagagactgtacggcaagagaggcgaccccttctacgaggcccaggagaaccacaacctgatcggcgtggccaacgtgttcctggagtgcctgttctgcgacgtgaagctgcagtacgccgtgcccatcatcagccagcagggcgaggtggccggcagactgcacgtggaggtgatgagagtgaccggcgccgtgcccgagagagtggtggaggacgacagcagcgagaacagcagcgagagcggcagcctggaggtggtggacagcagcggcgagatcatccacagagtgaagaagctgacctgcagagtgaagatcaaggaggccaccggcctgcccctgaacctgagcaacttcgtgttctgccagtacaccttctgggaccagtgcgagagcaccgtggccgcccccgtggtggaccccgaggtgcccagcccccagagcaaggacgcccagtacaccgtgaccttcagccactgcaaggactacgtggtgaacgtgaccgaggagttcctggagttcatcagcgacggcgccctggccatcgaggtgtggggccacagatgcgccggcaacggcagcagcatctgggaggtggacagcctgcacgccaagaccagaaccctgcacgacagatggaacgaggtgaccagaagaatcgagatgtggatcagcatcctggagctgaacgagctgggcgagtacgccgccgtggagctgcaccaggccaaggacgtgaacaccggcggcatcttccagctgagacagggccacagcagaagagtgcaggtgaccgtgaagcccgtgcagcacagcggcaccctgcccctgatggtggaggccatcctgagcgtgagcatcggctgcgtgaccgccagaagcaccaagctgcagagaggcctggacagctaccagagagacgacgaggacggcgacgacatggacagctaccaggaggaggacctgaactgcgtgagagagagatggagcgacgccctgatcaagagaagagagtacctggacgagcagatcaagaaggtgagcaacaagaccgagaagaccgaggacgacgtggagagagaggcccagctggtggagcagtgggtgggcctgaccgaggagagaaacgccgtgctggtgcccgcccccggcagcggcatccccggcgcccccgccgactggatccccccccccggcatggagacccacatccccgtgctgttcctggacctgaacgccgacgacctgagcgccaacgagcagctggtgggcccccacgccagcggcgtgaacagcatcctgcccaaggagcacggcagccagttcttctacctgcccatcatcaagcacagcgacgacgaggtgagcgccaccgccagctgggacagcagcgtgcacgacagcgtgcacctgaacagagtgaccccccagaacgagagaatctacctgatcgtgaagaccaccgtgcagctgagccaccccgccgccatggagctggtgctgagaaagagaatcgccgccaacatctacaacaagcagagcttcacccagagcctgaagagaagaatcagcctgaagaacatcttctacagctgcggcgtgacctacgagatcgtgagcaacatccccaaggccaccgaggagatcgaggacagagagaccctggccctgctggccgccagaagcgagaacgagggcaccagcgacggcgagacctacatcgagaagtacaccagaggcgtgctgcaggtggagaacatcctgagcctggagagactgagacaggccgtgaccgtgaaggaggccctgagcaccaaggccagacacatcagaagaagcctgagcacccccaacgtgcacaacgtgagcagcagcagacccgacctgagcggcttcgacgaggacgacaagggctggcccgagaaccagctggacatgagcgactacagcagcagctaccaggacgtggcctgctacggcaccctgcccagagacagccccagaagaaacaaggagggctgcaccagcgagaccccccacgccctgaccgtgagccccttcaaggccttcagcccccagccccccaagttcttcaagcccctgatgcccgtgaaggaggagcacaagaagagaatcgccctggaggccagacccctgctgagccaggaggacagcgaggaggaggagaacgagctggaggccatcaacagaaagctgatcagcagccagccctacgtgcccgtggagttcgccgacttcagcgtgtacaacgccagcctggagaacagagagtggttcagcagcaaggtggacctgagcaacagcagagtgctggagaaggaggtgagcagaagccccaccaccagcagcatcaccagcggctacttcagccacagcgccagcaacgccaccctgagcgacatggtggtgcccagcagcgacagcagcgaccagctggccatccagaccaaggacgccgacagcaccgagcacagcacccccagcctggtgcacgacttcagacccagcagcaacaaggagctgaccgaggtggagaagggcctggtgaaggacaagatcatcgtggtgcccctgaaggagaacagcgccctggccaagggcagccccagcagccagagcatccccgagaagaacagcaagagcctgtgcagaaccggcagctgcagcgagctggacgcctgccccagcaagatcagccagcccgccagaggcttctgccccagagaggtgaccgtggagcacaccaccaacatcctggaggaccacagcttcaccgagttcatgggcgtgagcgagggcaaggacttcgacggcctgaccgacagcagcgccggcgagctgagcagcagaagaagcctgcccaacaagaccggcggcaagaccgtgagcgacggcctgcaccaccccagccagctgcacagcaagctggagaacgaccaggtgatcatccccgaggccgccttctgggtgctgtgctgccagtag

SEQ ID NO: 86218 - DNA, 5274 bp, synthetic construct
  misc_feature 1..5274: note = Description of Artificial Sequence: Synthetic coding sequence
  source 1..5274: mol_type = other DNA
atgagcgacaccaaggtgaaggtggccgtgagagtgagacccatgaacagaagagagctggagctgaacaccaagtgcgtggtggagatggagggcaaccagaccgtgctgcaccccccccccagcaacaccaagcagggcgagagaaagccccccaaggtgttcgccttcgactactgcttctggagcatggacgagagcaacaccaccaagtacgccggccaggaggtggtgttcaagtgcctgggcgagggcatcctggagaaggccttccagggctacaacgcctgcatcttcgcctacggccagaccggcagcggcaagagcttcagcatgatgggccacgccgagcagctgggcctgatccccagactgtgctgcgccctgttcaagagaatcagcctggagcagaacgagagccagaccttcaaggtggaggtgagctacatggagatctacaacgagaaggtgagagacctgctggaccccaagggcagcagacagagcctgaaggtgagagagcacaaggtgctgggcccctacgtggacggcctgagccagctggccgtgaccagcttcgaggacatcgagagcctgatgagcgagggcaacaagagcagaaccgtggccgccaccaacatgaacgaggagagcagcagaagccacgccgtgttcaacatcatcatcacccagaccctgtacgacctgcagagcggcaacagcggcgagaaggtgagcaaggtgagcctggtggacctggccggcagcgagagagtgagcaagaccggcgccgccggcgagagactgaaggagggcagcaacatcaacaagagcctgaccaccctgggcctggtgatcagcagcctggccgaccaggccgccggcaagggcaagagcaagttcgtgccctacagagacagcgtgctgacctggctgctgaaggacaacctgggcggcaacagccagaccagcatgatcgccaccatcagccccgccgccgacaactacgaggagaccctgagcaccctgagatacgccgacagagccaagagaatcgtgaaccacgccgtggtgaacgaggaccccaacgccaaggtgatcagagagctgagagaggaggtggagaagctgagagagcagctgagccaggccgaggccatgaaggcccccgagctgaaggagaagctggaggagagcgagaagctgatcaaggagctgaccgtgacctgggaggagaagctgagaaagaccgaggagatcgcccaggagagacagagacagctggagagcatgggcatcagcctggagatgagcggcatcaaggtgggcgacgacaagtgctacctggtgaacctgaacgccgaccccgccctgaacgagctgctggtgtactacctgaaggaccacaccagagtgggcgccgacaccagccaggacatccagctgttcggcatcggcatccagccccagcactgcgagatcgacatcgccagcgacggcgacgtgaccctgacccccaaggagaacgccagaagctgcgtgaacggcaccctggtgtgcagcaccacccagctgtggcacggcgacagaatcctgtggggcaacaaccacttcttcagaatcaacctgcccaagagaaagagaagagactggctgaaggacttcgagaaggagaccggcccccccgagcacgacctggacgccgccagcgaggccagcagcgagcccgactacaactacgagttcgcccagatggaggtgatcatgaagaccctgaacagcaacgaccccgtgcagaacgtggtgcaggtgctggagaagcagtacctggaggagaagagaagcgccctggaggagcagagactgatgtacgagagagagctggagcagctgagacagcagctgagccccgacagacagccccagagcagcggccccgacagactggcctacagcagccagaccgcccagcagaaggtgacccagtgggccgaggagagagacgagctgttcagacagagcctggccaagctgagagagcagctggtgaaggccaacaccctggtgagagaggccaacttcctggccgaggagatgagcaagctgaccgactaccaggtgaccctgcagatccccgccgccaacctgagcgccaacagaaagagaggcgccatcgtgagcgagcccgccatccaggtgagaagaaagggcaagagcacccaggtgtggaccatcgagaagctggagaacaagctgatcgacatgagagacctgtaccaggagtggaaggagaaggtgcccgaggccaagagactgtacggcaagagaggcgaccccttctacgaggcccaggagaaccacaacctgatcggcgtggccaacgtgttcctggagtgcctgttctgcgacgtgaagctgcagtacgccgtgcccatcatcagccagcagggcgaggtggccggcagactgcacgtggaggtgatgagagtgaccggcgccgtgcccgagagagtggtggaggacgacagcagcgagaacagcagcgagagcggcagcctggaggtggtggacagcagcggcgagatcatccacagagtgaagaagctgacctgcagagtgaagatcaaggaggccaccggcctgcccctgaacctgagcaacttcgtgttctgccagtacaccttctgggaccagtgcgagagcaccgtggccgcccccgtggtggaccccgaggtgcccagcccccagagcaaggacgcccagtacaccgtgaccttcagccactgcaaggactacgtggtgaacgtgaccgaggagttcctggagttcatcagcgacggcgccctggccatcgaggtgtggggccacagatgcgccggcaacggcagcagcatctgggaggtggacagcctgcacgccaagaccagaaccctgcacgacagatggaacgaggtgaccagaagaatcgagatgtggatcagcatcctggagctgaacgagctgggcgagtacgccgccgtggagctgcaccaggccaaggacgtgaacaccggcggcatcttccagctgagacagggccacagcagaagagtgcaggtgaccgtgaagcccgtgcagcacagcggcaccctgcccctgatggtggaggccatcctgagcgtgagcatcggctgcgtgaccgccagaagcaccaagctgcagagaggcctggacagctaccaggaggaggacctgaactgcgtgagagagagatggagcgacgccctgatcaagagaagagagtacctggacgagcagatcaagaaggtgagcaacaagaccgagaagaccgaggacgacgtggagagagaggcccagctggtggagcagtgggtgggcctgaccgaggagagaaacgccgtgctggtgcccgcccccggcagcggcatccccggcgcccccgccgactggatccccccccccggcatggagacccacatccccgtgctgttcctggacctgaacgccgacgacctgagcgccaacgagcagctggtgggcccccacgccagcggcgtgaacagcatcctgcccaaggagcacggcagccagttcttctacctgcccatcatcaagcacagcgacgacgaggtgagcgccaccgccagctgggacagcagcgtgcacgacagcgtgcacctgaacagagtgaccccccagaacgagagaatctacctgatcgtgaagaccaccgtgcagctgagccaccccgccgccatggagctggtgctgagaaagagaatcgccgccaacatctacaacaagcagagcttcacccagagcctgaagagaagaatcagcctgaagaacatcttctacagctgcggcgtgacctacgagatcgtgagcaacatccccaaggccaccgaggagatcgaggacagagagaccctggccctgctggccgccagaagcgagaacgagggcaccagcgacggcgagacctacatcgagaagtacaccagaggcgtgctgcaggtggagaacatcctgagcctggagagactgagacaggccgtgaccgtgaaggaggccctgagcaccaaggccagacacatcagaagaagcctgagcacccccaacgtgcacaacgtgagcagcagcagacccgacctgagcggcttcgacgaggacgacaagggctggcccgagaaccagctggacatgagcgactacagcagcagctaccaggacgtggcctgctacggcaccctgcccagagacagccccagaagaaacaaggagggctgcaccagcgagaccccccacgccctgaccgtgagccccttcaaggccttcagcccccagccccccaagttcttcaagcccctgatgcccgtgaaggaggagcacaagaagagaatcgccctggaggccagacccctgctgagccaggaggacagcgaggaggaggagaacgagctggaggccatcaacagaaagctgatcagcagccagccctacgtgcccgtggagttcgccgacttcagcgtgtacaacgccagcctggagaacagagagtggttcagcagcaaggtggacctgagcaacagcagagtgctggagaaggaggtgagcagaagccccaccaccagcagcatcaccagcggctacttcagccacagcgccagcaacgccaccctgagcgacatggtggtgcccagcagcgacagcagcgaccagctggccatccagaccaaggacgccgacagcaccgagcacagcacccccagcctggtgcacgacttcagacccagcagcaacaaggagctgaccgaggtggagaagggcctggtgaaggacaagatcatcgtggtgcccctgaaggagaacagcgccctggccaagggcagccccagcagccagagcatccccgagaagaacagcaagagcctgtgcagaaccggcagctgcagcgagctggacgcctgccccagcaagatcagccagcccgccagaggcttctgccccagagaggtgaccgtggagcacaccaccaacatcctggaggaccacagcttcaccgagttcatgggcgtgagcgagggcaaggacttcgacggcctgaccgacagcagcgccggcgagctgagcagcagaagaagcctgcccaacaagaccggcggcaagaccgtgagcgacggcctgcaccaccccagccagctgcacagcaagctggagaacgaccaggtgatcatccccgaggccgccttctgggtgctgtgctgccagtag

SEQ ID NO: 86219 - DNA, 213 bp, synthetic construct
  misc_feature 1..213: note = Description of Artificial Sequence: Synthetic coding sequence
  source 1..213: mol_type = other DNA
atgagcgacaccaaggtgaaggtggccgtgagagtgagacccatgaacagaagagagctggagctgaacaccaagtgcgtggtggagatggagggcaaccagaccgtgctgcaccccccccccagcaacaccaagcagggcgagagactggtgaccgtggcccacatcagcaacagcagcaccctgggcggccagggcaagagaatcacctag

SEQ ID NO: 86220 - DNA, 1038 bp, synthetic construct
  misc_feature 1..1038: note = Description of Artificial Sequence: Synthetic coding sequence
  source 1..1038: mol_type = other DNA
atgcccaagctgctgaagagcctgttccccgtgagagacgagaagagaggcaagagacccagccccctggcccaccaggcccagcccgagatgggccccgacgtgctggtgcagaccatgggcgcccccgccctgaagatctgcgacaagcccgccaaggtgcccagccccccccccgtgatcgccgtgaccgccgtgacccccgcccccgaggcccaggacggcccccccagccccctgagcgaggccagcagcggctacttcagccacagcgtgagcaccgccaccctgagcgacgccctgggccccggcctggacgccgccgccccccccggcagcatgcccaccgcccccgaggccgagcccgaggcccccatcagccacccccccccccccaccgccgtgcccgccgaggagccccccggcccccagcagctggtgagccccggcagagagagacccgacctggaggcccccgcccccggcagccccttcagagtgagaagagtgagagccagcgagctgagaagcttcagcagaatgctggccggcgaccccggctgcagccccggcgccgagggcaacgcccccgcccccggcgccggcggccaggccctggccagcgacagcgaggaggccgacgaggtgcccgagtggctgagagagggcgagttcgtgaccgtgggcgcccacaagaccggcgtggtgagatacgtgggccccgccgacttccaggagggcacctgggtgggcgtggagctggacctgcccagcggcaagaacgacggcagcatcggcggcaagcagtacttcagatgcaaccccggctacggcctgctggtgagacccagcagagtgagaagagccaccggccccgtgagaagaagaagcaccggcctgagactgggcgcccccgaggccagaagaagcgccaccctgagcggcagcgccaccaacctggccagcctgaccgccgccctggccaaggccgacagaagccacaagaaccccgagaacagaaagagctgggccagctag

SEQ ID NO: 86221 - DNA, 5481 bp, synthetic construct
  misc_feature 1..5481: note = Description of Artificial Sequence: Synthetic coding sequence
  source 1..5481: mol_type = other DNA
atgggcgacagcaaggtgaaggtggccgtgagaatcagacccatgaacagaagagagaccgacctgcacaccaagtgcgtggtggacgtggacgccaacaaggtgatcctgaaccccgtgaacaccaacctgagcaagggcgacgccagaggccagcccaaggtgttcgcctacgaccactgcttctggagcatggacgagagcgtgaaggagaagtacgccggccaggacatcgtgttcaagtgcctgggcgagaacatcctgcagaacgccttcgacggctacaacgcctgcatcttcgcctacggccagaccggcagcggcaagagctacaccatgatgggcaccgccgaccagcccggcctgatccccagactgtgcagcggcctgttcgagagaacccagaaggaggagaacgaggagcagagcttcaaggtggaggtgagctacatggagatctacaacgagaaggtgagagacctgctggaccccaagggcagcagacagaccctgaaggtgagagagcacagcgtgctgggcccctacgtggacggcctgagcaagctggccgtgaccagctacaaggacatcgagagcctgatgagcgagggcaacaagagcagaaccgtggccgccaccaacatgaacgaggagagcagcagaagccacgccgtgttcaagatcaccctgacccacaccctgtacgacgtgaagagcggcaccagcggcgagaaggtgggcaagctgagcctggtggacctggccggcagcgagagagccaccaagaccggcgccgccggcgacagactgaaggagggcagcaacatcaacaagagcctgaccaccctgggcctggtgatcagcgccctggccgaccagagcgccggcaagaacaagaacaagttcgtgccctacagagacagcgtgctgacctggctgctgaaggacagcctgggcggcaacagcaagaccgccatggtggccaccgtgagccccgccgccgacaactacgacgagaccctgagcaccctgagatacgccgacagagccaagcacatcgtgaaccacgccgtggtgaacgaggaccccaacgccagaatcatcagagacctgagagaggaggtggagaagctgagagagcagctgaccaaggccgaggccatgaagagccccgagctgaaggacagactggaggagagcgagaagctgatccaggagatgaccgtgacctgggaggagaagctgagaaagaccgaggagatcgcccaggagagacagaagcagctggagagcctgggcatcagcctgcagagcagcggcatcaaggtgggcgacgacaagtgcttcctggtgaacctgaacgccgaccccgccctgaacgagctgctggtgtactacctgaaggagcacaccctgatcggcagcgccaacagccaggacatccagctgtgcggcatgggcatcctgcccgagcactgcatcatcgacatcaccagcgagggccaggtgatgctgaccccccagaagaacaccagaaccttcgtgaacggcagcagcgtgagcagccccatccagctgcaccacggcgacagaatcctgtggggcaacaaccacttcttcagactgaacctgcccaagaagaagaagaaggccgagagagaggacgaggaccaggaccccagcatgaagaacgagaacagcagcgagcagctggacgtggacggcgacagcagcagcgaggtgagcagcgaggtgaacttcaactacgagtacgcccagatggaggtgaccatgaaggccctgggcagcaacgaccccatgcagagcatcctgaacagcctggagcagcagcacgaggaggagaagagaagcgccctggagagacagagactgatgtacgagcacgagctggagcagctgagaagaagactgagccccgagaagcagaactgcagaagcatggacagattcagcttccacagccccagcgcccagcagagactgagacagtgggccgaggagagagaggccaccctgaacaacagcctgatgagactgagagagcagatcgtgaaggccaacctgctggtgagagaggccaactacatcgccgaggagctggacaagagaaccgagtacaaggtgaccctgcagatccccgccagcagcctggacgccaacagaaagagaggcagcctgctgagcgagcccgccatccaggtgagaagaaagggcaagggcaagcagatctggagcctggagaagctggacaacagactgctggacatgagagacctgtaccaggagtggaaggagtgcgaggaggacaaccccgtgatcagaagctacttcaagagagccgaccccttctacgacgagcaggagaaccacagcctgatcggcgtggccaacgtgttcctggagagcctgttctacgacgtgaagctgcagtacgccgtgcccatcatcaaccagaagggcgaggtggccggcagactgcacgtggaggtgatgagactgagcggcgacgtgggcgagagaatcgccggcggcgacgaggtggccgaggtgagcttcgagaaggagacccaggagaacaagctggtgtgcatggtgaagatcctgcaggccaccggcctgccccagcacctgagccacttcgtgttctgcaagtacagcttctgggaccagcaggagcccgtgatcgtggcccccgaggtggacaccagcagcagcagcgtgagcaaggagccccactgcatggtggtgttcgaccactgcaacgagttcagcgtgaacatcaccgaggacttcatcgagcacctgagcgagggcgccctggccatcgaggtgtacggccacaagatcaacgaccccagaaagaaccccgccctgtgggacctgggcatcatccaggccaagaccagaagcctgagagacagatggagcgaggtgaccagaaagctggagttctgggtgcagatcctggagcagaacgagaacggcgagtactgccccgtggaggtgatcagcgccaaggacgtgcccaccggcggcatcttccagctgagacagggccagagcagaagagtgcaggtggaggtgaagagcgtgcaggagagcggcaccctgcccctgatggaggagtgcatcctgagcgtgggcatcggctgcgtgaaggtgagacccctgagagcccccagaacccacgagaccttccacgaggaggaggaggacatggacagctaccaggacagagacctggagagactgagaagaaagtggctgaacgccctgaccaagagacaggagtacctggaccagcagctgcagaagctggtgagcaagagagacaagaccgaggacgacgccgacagagaggcccagctgctggagatgagactgaccctgaccgaggagagaaacgccgtgatggtgcccagcgccggcagcggcatccccggcgcccccgccgagtggacccccgtgcccggcatggagacccacatccccgtgatcttcctggacctgaacgccgacgacttcagcagccaggacaacctggacgaccccgaggccggcggctgggacgccaccctgaccggcgaggaggaggaggagttcttcgagctgcagatcgtgaagcagcacgacggcgaggtgaaggccgaggccagctgggacagcgccgtgcacggctgcccccagctgagcagaggcacccccgtggacgagagactgttcctgatcgtgagagtgaccgtgcagctgagccaccccgccgacatgcagctggtgctgagaaagagaatctgcgtgaacgtgcacggcagacagggcttcgcccagagcctgctgaagaagatgagccacagaagcagcatccccggctgcggcgtgaccttcgagatcgtgagcaacatccccgaggacgcccagggcgtggaggagagagaggccctggccagaatggccgccaacgtggagaaccccgccagcgccgacagcgaggcctacatcgagaagtacctgagaagcgtgctggccgtggagaacctgctgaccctggacagactgagacaggaggtggccgtgaaggagcagctgaccggcaagggcaagctgagcagaagaagcatcagcagccccaacgtgaacagactgagcggcagcagacaggacctgatccccagctacagcctgggcagcaacaagggcagatgggagagccagcaggacgtgagccagaccaccgtgagcagaggcatcgcccccgcccccgccctgagcgtgagcccccagaacaaccacagccccgaccccggcctgagcaacctggccgccagctacctgaaccccgtgaagagcttcgtgccccagatgcccaagctgctgaagagcctgttccccgtgagagacgagaagagaggcaagagacccagccccctggcccaccagcccgtgcccagaatcatggtgcagagcgccagccccgacatcagagtgaccagaatggaggaggcccagcccgagatgggccccgacgtgctggtgcagaccatgggcgcccccgccctgaagatctgcgacaagcccgccaaggtgcccagccccccccccgtgatcgccgtgaccgccgtgacccccgcccccgaggcccaggacggcccccccagccccctgagcgaggccagcagcggctacttcagccacagcgtgagcaccgccaccctgagcgacgccctgggccccggcctggacgccgccgccccccccggcagcatgcccaccgcccccgaggccgagcccgaggcccccatcagccacccccccccccccaccgccgtgcccgccgaggagccccccggcccccagcagctggtgagccccggcagagagagacccgacctggaggcccccgcccccggcagccccttcagagtgagaagagtgagagccagcgagctgagaagcttcagcagaatgctggccggcgaccccggctgcagccccggcgccgagggcaacgcccccgcccccggcgccggcggccaggccctggccagcgacagcgaggaggccgacgaggtgcccgagtggctgagagagggcgagttcgtgaccgtgggcgcccacaagaccggcgtggtgagatacgtgggccccgccgacttccaggagggcacctgggtgggcgtggagctggacctgcccagcggcaagaacgacggcagcatcggcggcaagcagtacttcagatgcaaccccggctacggcctgctggtgagacccagcagagtgagaagagccaccggccccgtgagaagaagaagcaccggcctgagactgggcgcccccgaggccagaagaagcgccaccctgagcggcagcgccaccaacctggccagcctgaccgccgccctggccaaggccgacagaagccacaagaaccccgagaacagaaagagctgggccagctag

SEQ ID NO: 86222 - DNA, 4947 bp, synthetic construct
  misc_feature 1..4947: note = Description of Artificial Sequence: Synthetic coding sequence
  source 1..4947: mol_type = other DNA
atgagcctgcacagcacccacaacagaaacaacagcggcgacatcctggacatccccagcagccagaacagcagcagcctgaacgccctgacccacagcagcagactgaagctgcacctgaagagcgacatgagcgagtgcgagaacgacgaccccctgctgagaagcgccggcaaggtgagagacatcaacagaacctacgtgatcagcgccagcagaaagaccgccgacatgcccctgacccccaaccccgtgggcagactggccctgcagagaagaaccaccagaaacaaggagagcagcctgctggtgagcgagctggaggacaccaccgagaagaccgccgagaccagactgaccctgcagagaagagccaagaccgacagcgccgagaagtggaagaccgccgagatcgacagcgtgaagatgaccctgaacgtgggcggcgagaccgagaacaacggcgtgagcaaggagagcagaaccaacgtgagaatcgtgaacaacgccaagaacagcttcgtggccagcagcgtgcccctggacgaggacccccaggtgatcgagatgatggccgacaagaagtacaaggagaccttcagcgcccccagcagagccaacgagaacgtggccctgaagtacagcagcaacagaccccccatcgccagcctgagccagaccgaggtggtgagaagcggccacctgaccaccaagcccacccagagcaagctggacatcaaggtgctgggcaccggcaacctgtaccacagaagcatcggcaaggagatcgccaagaccagcaacaagttcggcagcctggagaagagaacccccaccaagtgcaccaccgagcacaagctgaccaccaagtgcagcctgccccagctgaagagccccgcccccagcatcctgaagaacagaatgagcaacctgcaggtgaagcagagacccaagagcagcttcctggccaacaagcaggagagaagcgccgagaacaccatcctgcccgaggaggagaccgtggtgcagaacaccagcgccggcaaggaccccctgaaggtggagaacagccaggtgaccgtggccgtgagagtgagacccttcaccaagagagagaagatcgagaaggccagccaggtggtgttcatgagcggcaaggagatcaccgtggagcaccccgacaccaagcaggtgtacaacttcatctacgacgtgagcttctggagcttcgacgagtgccacccccactacgccagccagaccaccgtgtacgagaagctggccgcccccctgctggagagagccttcgagggcttcaacacctgcctgttcgcctacggccagaccggcagcggcaagagctacaccatgatgggcttcagcgaggagcccggcatcatccccagattctgcgaggacctgttcagccaggtggccagaaagcagacccaggaggtgagctaccacatcgagatgagcttcttcgaggtgtacaacgagaagatccacgacctgctggtgtgcaaggacgagaacggccagagaaagcagcccctgagagtgagagagcaccccgtgtacggcccctacgtggaggccctgagcatgaacatcgtgagcagctacgccgacatccagagctggctggagctgggcaacaagcagagagccaccgccgccaccggcatgaacgacaagagcagcagaagccacagcgtgttcaccctggtgatgacccagaccaagaccgagttcgtggagggcgaggagcacgaccacagaatcaccagcagaatcaacctgatcgacctggccggcagcgagagatgcagcaccgcccacaccaacggcgacagactgaaggagggcgtgagcatcaacaagagcctgctgaccctgggcaaggtgatcagcgccctgagcgagcaggccaaccagagaagcgtgttcatcccctacagagagagcgtgctgacctggctgctgaaggagagcctgggcggcaacagcaagaccgccatgatcgccaccatcagccccgccgccagcaacatcgaggagaccctgagcaccctgagatacgccaaccaggccagactgatcgtgaacatcgccaaggtgaacgaggacatgaacgccaagctgatcagagagctgaaggccgagatcgccaagctgaaggccgcccagagaaacagcagaaacatcgaccccgagagatacagactgtgcagacaggagatcaccagcctgagaatgaagctgcaccagcaggagagagacatggccgagatgcagagagtgtggaaggagaagttcgagcaggccgagaagagaaagctgcaggagaccaaggagctgcagaaggccggcatcatgttccagatggacaaccacctgcccaacctggtgaacctgaacgaggacccccagctgagcgagatgctgctgtacatgatcaaggagggcaccaccaccgtgggcaagtacaagcccaacagcagccacgacatccagctgagcggcgtgctgatcgccgacgaccactgcaccatcaagaacttcggcggcaccgtgagcatcatccccgtgggcgaggccaagacctacgtgaacggcaagcacatcctggagatcaccgtgctgagacacggcgacagagtgatcctgggcggcgaccactacttcagattcaaccaccccgtggaggtgcagaagggcaagagacccagcggcagagacacccccatcagcgagggccccaaggacttcgagttcgccaagaacgagctgctgatggcccagagaagccagctggaggccgagatcaaggaggcccagctgaaggccaaggaggagatgatgcagggcatccagatcgccaaggagatggcccagcaggagctgagcagccagaaggccgcctacgagagcaagatcaaggccctggaggccgagctgagagaggagagccagagaaagaagatgcaggagatcaacaaccagaaggccaaccacaagatcgaggagctggagaaggccaagcagcacctggagcaggagatctacgtgaacaagaagagactggagatggagaccctggccaccaagcaggccctggaggaccacagcatcagacacgccagaatcctggaggccctggagaccgagaagcagaagatcgccaaggaggtgcagatcctgcagcagaacagaaacaacagagacaagaccttcaccgtgcagaccacctggagcagcatgaagctgagcatgatgatccaggaggccaacgccatcagcagcaagctgaagacctactacgtgttcggcagacacgacatcagcgacaagagcagcagcgacaccagcatcagagtgagaaacctgaagctgggcatcagcaccttctggagcctggagaagttcgagagcaagctggccgccatgaaggagctgtacgagagcaacggcagcaacagaggcgaggacgccttctgcgaccccgaggacgagtgggagcccgacatcaccgacgcccccgtgagcagcctgagcagaagaagaagcagaagcctgatgaagaacagaagaatcagcggctgcctgcacgacatccaggtgcaccccatcaagaacctgcacagcagccacagcagcggcctgatggacaagagcagcaccatctacagcaacagcgccgagagcttcctgcccggcatctgcaaggagctgatcggcagcagcctggacttcttcggccagagctacgacgaggagagaaccatcgccgacagcctgatcaacagcttcctgaagatctacaacggcctgttcgccatcagcaaggcccacgaggagcaggacgaggagagccaggacaacctgttcagcagcgacagagccatccagagcctgaccatccagaccgcctgcgccttcgagcagctggtggtgctgatgaagcactggctgagcgacctgctgccctgcaccaacatcgccagactggaggacgagctgagacaggaggtgaagaagctgggcggctacctgcagctgttcctgcagggctgctgcctggacatcagcagcatgatcaaggaggcccagaagaacgccatccagatcgtgcagcaggccgtgaagtacgtgggccagctggccgtgctgaagggcagcaagctgcacttcctggagaacggcaacaacaaggccgccagcgtgcaggaggagttcatggacgccgtgtgcgacggcgtgggcctgggcatgaagatcctgctggacagcggcctggagaaggccaaggagctgcagcacgagctgttcagacagtgcaccaagaacgaggtgaccaaggagatgaagaccaacgccatgggcctgatcagaagcctggagaacatcttcgccgagagcaagatcaagagcttcagaagacaggtgcaggaggagaacttcgagtaccaggacttcaagagaatggtgaacagagcccccgagttcctgaagctgaagcactgcctggagaaggccatcgagatcatcatcagcgccctgaagggctgccacagcgacatcaacctgctgcagacctgcgtggagagcatcagaaacctggccagcgacttctacagcgacttcagcgtgcccagcaccagcgtgggcagctacgagagcagagtgacccacatcgtgcaccaggagctggagagcctggccaagagcctgctgttctgcttcgagagcgaggagagccccgacctgctgaagccctgggagacctacaaccagaacaccaaggaggagcaccagcagagcaagagcagcggcatcgacggcagcaagaacaagggcgtgcccaagagagtgtacgagctgcacggcagcagccccgccgtgagcagcgaggagtgcacccccagcagaatccagtgggtgtag

SEQ ID NO: 86223 - DNA, 5073 bp, synthetic construct
  misc_feature 1..5073: note = Description of Artificial Sequence: Synthetic coding sequence
  source 1..5073: mol_type = other DNA
atggccggcgccagcgtgaaggtggccgtgagagtgagacccttcaacagcagagagatgagcagagacagcaagtgcatcatccagatgagcggcagcaccaccaccatcgtgaaccccaagcagcccaaggagacccccaagagcttcagcttcgactacagctactggagccacaccagccccgaggacatcaactacgccagccagaagcaggtgtacagagacatcggcgaggagatgctgcagcacgccttcgagggctacaacgtgtgcatcttcgcctacggccagaccggcgccggcaagagctacaccatgatgggcaagcaggagaaggaccagcagggcatcatcccccagctgtgcgaggacctgttcagcagaatcaacgacaccaccaacgacaacatgagctacagcgtggaggtgagctacatggagatctactgcgagagagtgagagacctgctgaaccccaagaacaagggcaacctgagagtgagagagcaccccctgctgggcccctacgtggaggacctgagcaagctggccgtgaccagctacaacgacatccaggacctgatggacagcggcaacaaggccagaaccgtggccgccaccaacatgaacgagaccagcagcagaagccacgccgtgttcaacatcatcttcacccagaagagacacgacgccgagaccaacatcaccaccgagaaggtgagcaagatcagcctggtggacctggccggcagcgagagagccgacagcaccggcgccaagggcaccagactgaaggagggcgccaacatcaacaagagcctgaccaccctgggcaaggtgatcagcgccctggccgagatggacagcggccccaacaagaacaagaagaagaagaagaccgacttcatcccctacagagacagcgtgctgacctggctgctgagagagaacctgggcggcaacagcagaaccgccatggtggccgccctgagccccgccgacatcaactacgacgagaccctgagcaccctgagatacgccgacagagccaagcagatcagatgcaacgccgtgatcaacgaggaccccaacaacaagctgatcagagagctgaaggacgaggtgaccagactgagagacctgctgtacgcccagggcctgggcgacatcaccgacatgaccaacgccctggtgggcatgagccccagcagcagcctgagcgccctgagcagcagagccgccagcgtgagcagcctgcacgagagaatcctgttcgcccccggcagcgaggaggccatcgagagactgaaggagaccgagaagatcatcgccgagctgaacgagacctgggaggagaagctgagaagaaccgaggccatcagaatggagagagaggccctgctggccgagatgggcgtggccatgagagaggacggcggcaccctgggcgtgttcagccccaagaagaccccccacctggtgaacctgaacgaggaccccctgatgagcgagtgcctgctgtactacatcaaggacggcatcaccagagtgggcagagaggacggcgagagaagacaggacatcgtgctgagcggccacttcatcaaggaggagcactgcgtgttcagaagcgacagcagaggcggcagcgaggccgtggtgaccctggagccctgcgagggcgccgacacctacgtgaacggcaagaaggtgaccgagcccagcatcctgagaagcggcaacagaatcatcatgggcaagagccacgtgttcagattcaaccaccccgagcaggccagacaggagagagagagaaccccctgcgccgagacccccgccgagcccgtggactgggccttcgcccagagagagctgctggagaagcagggcatcgacatgaagcaggagatggagcagagactgcaggagctggaggaccagtacagaagagagagagaggaggccacctacctgctggagcagcagagactggactacgagagcaagctggaggccctgcagaagcagatggacagcagatactaccccgaggtgaacgaggaggaggaggagcccgaggacgaggtgcagtggaccgagagagagtgcgagctggccctgtgggccttcagaaagtggaagtggtaccagttcaccagcctgagagacctgctgtggggcaacgccatcttcctgaaggaggccaacgccatcagcgtggagctgaagaagaaggtgcagttccagttcgtgctgctgaccgacaccctgtacagccccctgccccccgacctgctgccccccgaggccgccaaggacagagagaccagacccttccccagaaccatcgtggccgtggaggtgcaggaccagaagaacggcgccacccactactggaccctggagaagctgagacagagactggacctgatgagagagatgtacgacagagccgccgaggtgcccagcagcgtgatcgaggactgcgacaacgtggtgaccggcggcgaccccttctacgacagattcccctggttcagactggtgggcagagccttcgtgtacctgagcaacctgctgtaccccgtgcccctggtgcacagagtggccatcgtgagcgagaagggcgaggtgaagggcttcctgagagtggccgtgcaggccatcagcgccgacgaggaggcccccgactacggcagcggcgtgagacagagcggcaccgccaagatcagcttcgacgaccagcacttcgagaagttccagagcgagagctgccccgtggtgggcatgagcagaagcggcaccagccaggaggagctgagaatcgtggagggccagggccagggcgccgacgtgggccccagcgccgacgaggtgaacaacaacacctgcagcgccgtgccccccgagggcctgctgctggacagcagcgagaaggccgccctggacggccccctggacgccgccctggaccacctgagactgggcaacaccttcaccttcagagtgaccgtgctgcaggccagcagcatcagcgccgagtacgccgacatcttctgccagttcaacttcatccacagacacgacgaggccttcagcaccgagcccctgaagaacaccggcagaggcccccccctgggcttctaccacgtgcagaacatcgccgtggaggtgaccaagagcttcatcgagtacatcaagagccagcccatcgtgttcgaggtgttcggccactaccagcagcaccccttcccccccctgtgcaaggacgtgctgagccccctgagacccagcagaagacacttccccagagtgatgcccctgagcaagcccgtgcccgccaccaagctgagcaccctgaccagaccctgccccggcccctgccactgcaagtacgacctgctggtgtacttcgagatctgcgagctggaggccaacggcgactacatccccgccgtggtggaccacagaggcggcatgccctgcatgggcaccttcctgctgcaccagggcatccagagaagaatcaccgtgaccctgctgcacgagaccggcagccacatcagatggaaggaggtgagagagctggtggtgggcagaatcagaaacacccccgagaccgacgagagcctgatcgaccccaacatcctgagcctgaacatcctgagcagcggctacatccaccccgcccaggacgacagaaccttctaccagttcgaggccgcctgggacagcagcatgcacaacagcctgctgctgaacagagtgaccccctacagagagaagatctacatgaccctgagcgcctacatcgagatggagaactgcacccagcccgccgtggtgaccaaggacttctgcatggtgttctacagcagagacgccaagctgcccgccagcagaagcatcagaaacctgttcggcagcggcagcctgagagccagcgagagcaacagagtgaccggcgtgtacgagctgagcctgtgccacgtggccgacgccggcagccccggcatgcagagaagaagaagaagagtgctggacaccagcgtggcctacgtgagaggcgaggagaacctggccggctggagacccagaagcgacagcctgatcctggaccaccagtgggagctggagaagctgagcctgctgcaggaggtggagaagaccagacactacctgctgctgagagagaagctggagaccgcccagagacccgtgcccgaggccctgagccccgccttcagcgaggacagcgagagccacggcagcagcagcgccagcagccccctgagcgccgagggcagacccagccccctggaggcccccaacgagagacagagagagctggccgtgaagtgcctgagactgctgacccacaccttcaacagagagtacacccacagccacgtgtgcgtgagcgccagcgagagcaagctgagcgagatgagcgtgaccctgctgagagaccccagcatgagccccctgggcgtggccaccctgacccccagcagcacctgccccagcctggtggagggcagatacggcgccaccgacctgagaaccccccagccctgcagcagacccgccagccccgagcccgagctgctgcccgaggccgacagcaagaagctgcccagccccgccagagccaccgagaccgacaaggagccccagagactgctggtgcccgacatccaggagatcagagtgagccccatcgtgagcaagaagggctacctgcacttcctggagccccacaccagcggctgggccagaagattcgtggtggtgagaagaccctacgcctacatgtacaacagcgacaaggacaccgtggagagattcgtgctgaacctggccaccgcccaggtggagtacagcgaggaccagcaggccatgctgaagacccccaacaccttcgccgtgtgcaccgagcacagaggcatcctgctgcaggccgccagcgacaaggacatgcacgactggctgtacgccttcaaccccctgctggccggcaccatcagaagcaagctgagcagaagaagaagcgcccagatgagagtgtag

SEQ ID NO: 86224 - DNA, 5400 bp, synthetic construct
  misc_feature 1..5400: note = Description of Artificial Sequence: Synthetic coding sequence
  source 1..5400: mol_type = other DNA
atggccggcgccagcgtgaaggtggccgtgagagtgagacccttcaacagcagagagatgagcagagacagcaagtgcatcatccagatgagcggcagcaccaccaccatcgtgaaccccaagcagcccaaggagacccccaagagcttcagcttcgactacagctactggagccacaccagccccgaggacatcaactacgccagccagaagcaggtgtacagagacatcggcgaggagatgctgcagcacgccttcgagggctacaacgtgtgcatcttcgcctacggccagaccggcgccggcaagagctacaccatgatgggcaagcaggagaaggaccagcagggcatcatcccccagctgtgcgaggacctgttcagcagaatcaacgacaccaccaacgacaacatgagctacagcgtggaggtgagctacatggagatctactgcgagagagtgagagacctgctgaaccccaagaacaagggcaacctgagagtgagagagcaccccctgctgggcccctacgtggaggacctgagcaagctggccgtgaccagctacaacgacatccaggacctgatggacagcggcaacaaggccagaaccgtggccgccaccaacatgaacgagaccagcagcagaagccacgccgtgttcaacatcatcttcacccagaagagacacgacgccgagaccaacatcaccaccgagaaggtgagcaagatcagcctggtggacctggccggcagcgagagagccgacagcaccggcgccaagggcaccagactgaaggagggcgccaacatcaacaagagcctgaccaccctgggcaaggtgatcagcgccctggccgagatggtgagcggccccgccagaaacaagaagaagaagaagaccgacttcatcccctacagagacagcgtgctgacctggctgctgagagagaacctgggcggcaacagcagaaccgccatggtggccgccctgagccccgccgacatcaactacgacgagaccctgagcaccctgagatacgccgacagagccaagcagatcagatgcaacgccgtgatcaacgaggaccccaacaacaagctgatcagagagctgaaggacgaggtgaccagactgagagacctgctgtacgcccagggcctgggcgacatcaccgacaccaacaccgtgcccggcggccccaagctgaccaacgccctggtgggcatgagccccagcagcagcctgagcgccctgagcagcagagccgccagcgtgagcagcctgcacgagagaatcctgttcgcccccggcagcgaggaggccatcgagagactgaaggagaccgagaagatcatcgccgagctgaacgagacctgggaggagaagctgagaagaaccgaggccatcagaatggagagagaggccctgctggccgagatgggcgtggccatgagagaggacggcggcaccctgggcgtgttcagccccaagaagaccccccacctggtgaacctgaacgaggaccccctgatgagcgagtgcctgctgtactacatcaaggacggcatcaccagagtgggcagagaggacggcgagagaagacaggacatcgtgctgagcggccacttcatcaaggaggagcactgcgtgttcagaagcgacagcagaggcggcagcgaggccgtggtgaccctggagccctgcgagggcgccgacacctacgtgaacggcaagaaggtgaccgagcccagcatcctgagaagcggcaacagaatcatcatgggcaagagccacgtgttcagattcaaccaccccgagcaggccagacaggagagagagagaaccccctgcgccgagacccccgccgagcccgtggactgggccttcgcccagagagagctgctggagaagcagggcatcgacatgaagcaggagatggagcagagactgcaggagctggaggaccagtacagaagagagagagaggaggccacctacctgctggagcagcagagactggactacgagagcaagctggaggccctgcagaagcagatggacagcagatactaccccgaggtgaacgaggaggaggaggagcccgaggacgaggtgcagtggaccgagagagagtgcgagctggccctgtgggccttcagaaagtggaagtggtaccagttcaccagcctgagagacctgctgtggggcaacgccatcttcctgaaggaggccaacgccatcagcgtggagctgaagaagaaggtgcagttccagttcgtgctgctgaccgacaccctgtacagccccctgccccccgacctgctgccccccgaggccgccaaggacagagagaccagacccttccccagaaccatcgtggccgtggaggtgcaggaccagaagaacggcgccacccactactggaccctggagaagctgagacagagactggacctgatgagagagatgtacgacagagccgccgaggtgcccagcagcgtgatcgaggactgcgacaacgtggtgaccggcggcgaccccttctacgacagattcccctggttcagactggtgggcagcagcgccatcagcggctgcaacagctaccccctgctgaacacctgcatgagcgagagaatggccgccctgacccccagccccaccttcagcagccccgacagcgacgccaccgagcccgccgaggagcagagcgtgggcgaggaggaggaggaggaggaggaggaggaggacgaggaggaggaggacctggaggacgacgtgttccccgagcacgccctgtgcgacggcagagaccccttctacgacagaccccccctgttcagcctggtgggcagagccttcgtgtacctgagcaacctgctgtaccccgtgcccctggtgcacagagtggccatcgtgagcgagaagggcgaggtgaagggcttcctgagagtggccgtgcaggccatcagcgccgacgaggaggcccccgactacggcagcggcgtgagacagagcggcaccgccaagatcagcttcgacgaccagcacttcgagaagttccagagcgagagctgccccgtggtgggcatgagcagaagcggcaccagccaggaggagctgagaatcgtggagggccagggccagggcgccgacgtgggccccagcgccgacgaggtgaacaacaacacctgcagcgccgtgccccccgagggcctgctgctggacagcagcgagaaggccgccctggacggccccctggacgccgccctggaccacctgagactgggcaacaccttcaccttcagagtgaccgtgctgcaggccagcagcatcagcgccgagtacgccgacatcttctgccagttcaacttcatccacagacacgacgaggccttcagcaccgagcccctgaagaacaccggcagaggcccccccctgggcttctaccacgtgcagaacatcgccgtggaggtgaccaagagcttcatcgagtacatcaagagccagcccatcgtgttcgaggtgttcggccactaccagcagcaccccttcccccccctgtgcaaggacgtgctgagccccctgagacccagcagaagacacttccccagagtgatgcccctgagcaagcccgtgcccgccaccaagctgagcaccctgaccagaccctgccccggcccctgccactgcaagtacgacctgctggtgtacttcgagatctgcgagctggaggccaacggcgactacatccccgccgtggtggaccacagaggcggcatgccctgcatgggcaccttcctgctgcaccagggcatccagagaagaatcaccgtgaccctgctgcacgagaccggcagccacatcagatggaaggaggtgagagagctggtggtgggcagaatcagaaacacccccgagaccgacgagagcctgatcgaccccaacatcctgagcctgaacatcctgagcagcggctacatccaccccgcccaggacgacagagtgagcctgggcaacgacaccagaaccttctaccagttcgaggccgcctgggacagcagcatgcacaacagcctgctgctgaacagagtgaccccctacagagagaagatctacatgaccctgagcgcctacatcgagatggagaactgcacccagcccgccgtggtgaccaaggacttctgcatggtgttctacagcagagacgccaagctgcccgccagcagaagcatcagaaacctgttcggcagcggcagcctgagagccagcgagagcaacagagtgaccggcgtgtacgagctgagcctgtgccacgtggccgacgccggcagccccggcatgcagagaagaagaagaagagtgctggacaccagcgtggcctacgtgagaggcgaggagaacctggccggctggagacccagaagcgacagcctgatcctggaccaccagtgggagctggagaagctgagcctgctgcaggaggtggagaagaccagacactacctgctgctgagagagaagctggagaccgcccagagacccgtgcccgaggccctgagccccgccttcagcgaggacagcgagagccacggcagcagcagcgccagcagccccctgagcgccgagggcagacccagccccctggaggcccccaacgagagacagagagagctggccgtgaagtgcctgagactgctgacccacaccttcaacagagagtacacccacagccacgtgtgcgtgagcgccagcgagagcaagctgagcgagatgagcgtgaccctgctgagagaccccagcatgagccccctgggcgtggccaccctgacccccagcagcacctgccccagcctggtggagggcagatacggcgccaccgacctgagaaccccccagccctgcagcagacccgccagccccgagcccgagctgctgcccgaggccgacagcaagaagctgcccagccccgccagagccaccgagaccgacaaggagccccagagactgctggtgcccgacatccaggagatcagagtgagccccatcgtgagcaagaagggctacctgcacttcctggagccccacaccagcggctgggccagaagattcgtggtggtgagaagaccctacgcctacatgtacaacagcgacaaggacaccgtggagagattcgtgctgaacctggccaccgcccaggtggagtacagcgaggaccagcaggccatgctgaagacccccaacaccttcgccgtgtgcaccgagcacagaggcatcctgctgcaggccgccagcgacaaggacatgcacgactggctgtacgccttcaaccccctgctggccggcaccatcagaagcaagctgagcagaagaagaagcgcccagatgagagtgtag

SEQ ID NO: 86225 - DNA, 117 bp, synthetic construct
  misc_feature 1..117: note = Description of Artificial Sequence: Synthetic coding sequence
  source 1..117: mol_type = other DNA
atggccggcgccagcgtgaaggtggccgtgagagtgagacccttcaacagcagagagatgagcagagacagcaagtgcatcatccagatgagcggcagcaccaccaccatcgtgtag

SEQ ID NO: 86226 - DNA, 5376 bp, synthetic construct
  misc_feature 1..5376: note = Description of Artificial Sequence: Synthetic coding sequence
  source 1..5376: mol_type = other DNA
atggccggcgccagcgtgaaggtggccgtgagagtgagacccttcaacagcagagagatgagcagagacagcaagtgcatcatccagatgagcggcagcaccaccaccatcgtgaaccccaagcagcccaaggagacccccaagagcttcagcttcgactacagctactggagccacaccagccccgaggacatcaactacgccagccagaagcaggtgtacagagacatcggcgaggagatgctgcagcacgccttcgagggctacaacgtgtgcatcttcgcctacggccagaccggcgccggcaagagctacaccatgatgggcaagcaggagaaggaccagcagggcatcatcccccagctgtgcgaggacctgttcagcagaatcaacgacaccaccaacgacaacatgagctacagcgtggaggtgagctacatggagatctactgcgagagagtgagagacctgctgaaccccaagaacaagggcaacctgagagtgagagagcaccccctgctgggcccctacgtggaggacctgagcaagctggccgtgaccagctacaacgacatccaggacctgatggacagcggcaacaaggccagaaccgtggccgccaccaacatgaacgagaccagcagcagaagccacgccgtgttcaacatcatcttcacccagaagagacacgacgccgagaccaacatcaccaccgagaaggtgagcaagatcagcctggtggacctggccggcagcgagagagccgacagcaccggcgccaagggcaccagactgaaggagggcgccaacatcaacaagagcctgaccaccctgggcaaggtgatcagcgccctggccgagatggacagcggccccaacaagaacaagaagaagaagaagaccgacttcatcccctacagagacagcgtgctgacctggctgctgagagagaacctgggcggcaacagcagaaccgccatggtggccgccctgagccccgccgacatcaactacgacgagaccctgagcaccctgagatacgccgacagagccaagcagatcagatgcaacgccgtgatcaacgaggaccccaacaacaagctgatcagagagctgaaggacgaggtgaccagactgagagacctgctgtacgcccagggcctgggcgacatcaccgacaccaacaccgtgcccggcggccccaagctgaccaacgccctggtgggcatgagccccagcagcagcctgagcgccctgagcagcagagccgccagcgtgagcagcctgcacgagagaatcctgttcgcccccggcagcgaggaggccatcgagagactgaaggagaccgagaagatcatcgccgagctgaacgagacctgggaggagaagctgagaagaaccgaggccatcagaatggagagagaggccctgctggccgagatgggcgtggccatgagagaggacggcggcaccctgggcgtgttcagccccaagaagaccccccacctggtgaacctgaacgaggaccccctgatgagcgagtgcctgctgtactacatcaaggacggcatcaccagagtgggcagagaggacggcgagagaagacaggacatcgtgctgagcggccacttcatcaaggaggagcactgcgtgttcagaagcgacagcagaggcggcagcgaggccgtggtgaccctggagccctgcgagggcgccgacacctacgtgaacggcaagaaggtgaccgagcccagcatcctgagaagcggcaacagaatcatcatgggcaagagccacgtgttcagattcaaccaccccgagcaggccagacaggagagagagagaaccccctgcgccgagacccccgccgagcccgtggactgggccttcgcccagagagagctgctggagaagcagggcatcgacatgaagcaggagatggagcagagactgcaggagctggaggaccagtacagaagagagagagaggaggccacctacctgctggagcagcagagactggactacgagagcaagctggaggccctgcagaagcagatggacagcagatactaccccgaggtgaacgaggaggaggaggagcccgaggacgaggtgcagtggaccgagagagagtgcgagctggccctgtgggccttcagaaagtggaagtggtaccagttcaccagcctgagagacctgctgtggggcaacgccatcttcctgaaggaggccaacgccatcagcgtggagctgaagaagaaggtgcagttccagttcgtgctgctgaccgacaccctgtacagccccctgccccccgacctgctgccccccgaggccgccaaggacagagagaccagacccttccccagaaccatcgtggccgtggaggtgcaggaccagaagaacggcgccacccactactggaccctggagaagctgagacagagactggacctgatgagagagatgtacgacagagccgccgaggtgcccagcagcgtgatcgaggactgcgacaacgtggtgaccggcggcgaccccttctacgacagattcccctggttcagactggtgggcagcagcgccatcagcggctgcaacagctaccccctgctgaacacctgcatgagcgagagaatggccgccctgacccccagccccaccttcagcagccccgacagcgacgccaccgagcccgccgaggagcagagcgtgggcgaggaggaggaggaggaggaggaggaggaggacgaggaggaggaggacctggaggacgacgtgttccccgagcacgccctgtgcgacggcagagaccccttctacgacagaccccccctgttcagcctggtgggcagagccttcgtgtacctgagcaacctgctgtaccccgtgcccctggtgcacagagtggccatcgtgagcgagaagggcgaggtgaagggcttcctgagagtggccgtgcaggccatcagcgccgacgaggaggcccccgactacggcagcggcgtgagacagagcggcaccgccaagatcagcttcgacgaccagcacttcgagaagttccagagcgagagctgccccgtggtgggcatgagcagaagcggcaccagccaggaggagctgagaatcgtggagggccagggccagggcgccgacgtgggccccagcgccgacgaggtgaacaacaacacctgcagcgccgtgccccccgagggcctgctgctggacagcagcgagaaggccgccctggacggccccctggacgccgccctggaccacctgagactgggcaacaccttcaccttcagagtgaccgtgctgcaggccagcagcatcagcgccgagtacgccgacatcttctgccagttcaacttcatccacagacacgacgaggccttcagcaccgagcccctgaagaacaccggcagaggcccccccctgggcttctaccacgtgcagaacatcgccgtggaggtgaccaagagcttcatcgagtacatcaagagccagcccatcgtgttcgaggtgttcggccactaccagcagcaccccttcccccccctgtgcaaggacgtgctgagccccctgagacccagcagaagacacttccccagagtgatgcccctgagcaagcccgtgcccgccaccaagctgagcaccctgaccagaccctgccccggcccctgccactgcaagtacgacctgctggtgtacttcgagatctgcgagctggaggccaacggcgactacatccccgccgtggtggaccacagaggcggcatgccctgcatgggcaccttcctgctgcaccagggcatccagagaagaatcaccgtgaccctgctgcacgagaccggcagccacatcagatggaaggaggtgagagagctggtggtgggcagaatcagaaacacccccgagaccgacgagagcctgatcgaccccaacatcctgagcctgaacatcctgagcagcggctacatccaccccgcccaggacgacagaaccttctaccagttcgaggccgcctgggacagcagcatgcacaacagcctgctgctgaacagagtgaccccctacagagagaagatctacatgaccctgagcgcctacatcgagatggagaactgcacccagcccgccgtggtgaccaaggacttctgcatggtgttctacagcagagacgccaagctgcccgccagcagaagcatcagaaacctgttcggcagcggcagcctgagagccagcgagagcaacagagtgaccggcgtgtacgagctgagcctgtgccacgtggccgacgccggcagccccggcatgcagagaagaagaagaagagtgctggacaccagcgtggcctacgtgagaggcgaggagaacctggccggctggagacccagaagcgacagcctgatcctggaccaccagtgggagctggagaagctgagcctgctgcaggaggtggagaagaccagacactacctgctgctgagagagaagctggagaccgcccagagacccgtgcccgaggccctgagccccgccttcagcgaggacagcgagagccacggcagcagcagcgccagcagccccctgagcgccgagggcagacccagccccctggaggcccccaacgagagacagagagagctggccgtgaagtgcctgagactgctgacccacaccttcaacagagagtacacccacagccacgtgtgcgtgagcgccagcgagagcaagctgagcgagatgagcgtgaccctgctgagagaccccagcatgagccccctgggcgtggccaccctgacccccagcagcacctgccccagcctggtggagggcagatacggcgccaccgacctgagaaccccccagccctgcagcagacccgccagccccgagcccgagctgctgcccgaggccgacagcaagaagctgcccagccccgccagagccaccgagaccgacaaggagccccagagactgctggtgcccgacatccaggagatcagagtgagccccatcgtgagcaagaagggctacctgcacttcctggagccccacaccagcggctgggccagaagattcgtggtggtgagaagaccctacgcctacatgtacaacagcgacaaggacaccgtggagagattcgtgctgaacctggccaccgcccaggtggagtacagcgaggaccagcaggccatgctgaagacccccaacaccttcgccgtgtgcaccgagcacagaggcatcctgctgcaggccgccagcgacaaggacatgcacgactggctgtacgccttcaaccccctgctggccggcaccatcagaagcaagctgagcagaagaagaagcgcccagatgagagtgtag

SEQ ID NO: 86227 - DNA, 5313 bp, synthetic construct
  misc_feature 1..5313: note = Description of Artificial Sequence: Synthetic coding sequence
  source 1..5313: mol_type = other DNA
atgagcggcgccagcgtgaaggtggccgtgagagtgagacccttcaacagcagagagaccagcaaggagagcaagtgcatcatccagatgcagggcaacagcaccagcatcatcaaccccaagaaccccaaggaggcccccaagagcttcagcttcgactacagctactggagccacaccagccccgaggacccctgcttcgccagccagaacagagtgtacaacgacatcggcaaggagatgctgctgcacgccttcgagggctacaacgtgtgcatcttcgcctacggccagaccggcgccggcaagagctacaccatgatgggcaagcaggaggagagccaggccggcatcatcccccagctgtgcgaggagctgttcgagaagatcaacgacaactgcaacgaggagatgagctacagcgtggaggtgagctacatggagatctactgcgagagagtgagagacctgctgaaccccaagaacaagggcaacctgagagtgagagagcaccccctgctgggcccctacgtggaggacctgagcaagctggccgtgaccagctacaccgacatcgccgacctgatggacgccggcaacaaggccagaaccgtggccgccaccaacatgaacgagaccagcagcagaagccacgccgtgttcaccatcgtgttcacccagaagaagcacgacaacgagaccaacctgagcaccgagaaggtgagcaagatcagcctggtggacctggccggcagcgagagagccgacagcaccggcgccaagggcaccagactgaaggagggcgccaacatcaacaagagcctgaccaccctgggcaaggtgatcagcgccctggccgaggtgagcaagaagaagaagaagaccgacttcatcccctacagagacagcgtgctgacctggctgctgagagagaacctgggcggcaacagcagaaccgccatggtggccgccctgagccccgccgacatcaactacgacgagaccctgagcaccctgagatacgccgacagagccaagcagatcaagtgcaacgccgtgatcaacgaggaccccaacgccaagctggtgagagagctgaaggaggaggtgaccagactgaaggacctgctgagagcccagggcctgggcgacatcatcgacaccagcatgggcagcctgaccagcagccccagcagctgcagcctgagcagccaggtgggcctgaccagcgtgaccagcatccaggagagaatcatgagcacccccggcggcgaggaggccatcgagagactgaaggagagcgagaagatcatcgccgagctgaacgagacctgggaggagaagctgagaaagaccgaggccatcagaatggagagagaggccctgctggccgagatgggcgtggccatcagagaggacggcggcaccctgggcgtgttcagccccaagaagaccccccacctggtgaacctgaacgaggaccccctgatgagcgagtgcctgctgtactacatcaaggacggcatcaccagagtgggccaggccgacgccgagagaagacaggacatcgtgctgagcggcgcccacatcaaggaggagcactgcatcttcagaagcgagagaagcaacagcggcgaggtgatcgtgaccctggagccctgcgagagaagcgagacctacgtgaacggcaagagagtgagccagcccgtgcagctgagaagcggcaacagaatcatcatgggcaagaaccacgtgttcagattcaaccaccccgagcaggccagagccgagagagagaagacccccagcgccgagacccccagcgagcccgtggactggaccttcgcccagagagagctgctggagaagcagggcatcgacatgaagcaggagatggagaagagactgcaggagatggagatcctgtacaagaaggagaaggaggaggccgacctgctgctggagcagcagagactggactacgagagcaagctgcaggccctgcagaagcaggtggagaccagaagcctggccgccgagaccaccgaggaggaggaggaggaggaggaggtgccctggacccagcacgagttcgagctggcccagtgggccttcagaaagtggaagagccaccagttcaccagcctgagagacctgctgtggggcaacgccgtgtacctgaaggaggccaacgccatcagcgtggagctgaagaagaaggtgcagttccagttcgtgctgctgaccgacaccctgtacagccccctgccccccgagctgctgcccaccgagatggagaagacccacgaggacagacccttccccagaaccgtggtggccgtggaggtgcaggacctgaagaacggcgccacccactactggagcctggagaagctgaagcagagactggacctgatgagagagatgtacgacagagccggcgagatggccagcagcgcccaggacgagagcgagaccaccgtgaccggcagcgaccccttctacgacagattccactggttcaagctggtgggcagcagccccatcttccacggctgcgtgaacgagagactggccgacagaacccccagccccaccttcagcaccgccgacagcgacatcaccgagctggccgacgagcagcaggacgagatggaggacttcgacgacgaggccttcgtggacgacgccggcagcgacgccggcaccgaggagggcagcgacctgttcagcgacggccacgaccccttctacgacagaagcccctggttcatcctggtgggcagagccttcgtgtacctgagcaacctgctgtaccccgtgcccctgatccacagagtggccatcgtgagcgagaagggcgaggtgagaggcttcctgagagtggccgtgcaggccatcgccgccgacgaggaggcccccgactacggcagcggcatcagacagagcggcaccgccaagatcagcttcgacaacgagtacttcaaccagagcgacttcagcagcgtggccatgaccagaagcggcctgagcctggaggagctgagaatcgtggagggccagggccagagcagcgaggtgatcaccccccccgaggagatcagcagaatcaacgacctggacctgaagagcagcaccctgctggacggcaagatggtgatggagggcttcagcgaggagatcggcaaccacctgaagctgggcagcgccttcaccttcagagtgaccgtgctgcaggccagcggcatcctgcccgagtacgccgacatcttctgccagttcaacttcctgcacagacacgacgaggccttcagcaccgagcccctgaagaacaacggcagaggcagccccctggccttctaccacgtgcagaacatcgccgtggagatcaccgagagcttcgtggactacatcaagaccaagcccatcgtgttcgaggtgttcggccactaccagcagcaccccctgcacctgcagggccaggagctgaacagccccccccagccctgcagaagattcttccccccccccatgcccctgagcaagcccgtgcccgccaccaagctgaacaccatgagcaagaccagcctgggccagagcatgagcaagtacgacctgctggtgtggttcgagatcagcgagctggagcccaccggcgagtacatccccgccgtggtggaccacaccgccggcctgccctgccagggcaccttcctgctgcaccagggcatccagagaagaatcaccgtgaccatcatccacgagaagggcagcgagctgcactggaaggacgtgagagagctggtggtgggcagaatcagaaacaagcccgaggtggacgaggccgccgtggacgccatcctgagcctgaacatcatcagcgccaagtacctgaagagcagccacaacagcagcagaaccttctacagattcgaggccgtgtgggacagcagcctgcacaacagcctgctgctgaacagagtgaccccctacggcgagaagatctacatgaccctgagcgcctacctggagctggaccactgcatccagcccgccgtgatcaccaaggacgtgtgcatggtgttctacagcagagacgccaagatcagcccccccagaagcctgagaagcctgttcggcagcggctacagcaagagccccgacagcaacagagtgaccggcatctacgagctgagcctgtgcaagatgagcgacaccggcagccccggcatgcagagaagaagaagaaagatcctggacaccagcgtggcctacgtgagaggcgaggagaacctggccggctggagacccagaggcgacagcctgatcctggagcaccagtgggagctggagaagctggagctgctgcacgaggtggagaagaccagacacttcctgctgctgagagagagactgggcgacagcatccccaagagcctgagcgacagcctgagccccagcctgagcagcggcaccctgagcaccagcaccagcatcagcagccagatcagcaccaccaccttcgagagcgccatcacccccagcgagagcagcggctacgacagcggcgacatcgagagcctggtggacagagagaaggagctggccaccaagtgcctgcagctgctgacccacaccttcaacagagagttcagccaggtgcacggcagcgtgagcgactgcaagctgagcgacatcagccccatcggcagagaccccagcgagagcagcttcagcagcgccaccctgacccccagcagcacctgccccagcctggtggacagcagaagcaacagcctggaccagaagacccccgaggccaacagcagagccagcagcccctgccccgagttcgagcagttccagatcgtgcccgccgtggagaccccctacctggccagagccggcaagaacgagttcctgaacctggtgcccgacatcgaggagatcagacccagcagcgtggtgagcaagaagggctacctgcacttcaaggagcccctgtacagcaactgggccaagcacttcgtggtggtgagaagaccctacgtgttcatctacaacagcgacaaggaccccgtggagagaggcatcatcaacctgagcaccgcccaggtggagtacagcgaggaccagcaggccatggtgaagacccccaacaccttcgccgtgtgcaccaagcacagaggcgtgctgctgcaggccctgaacgacaaggacatgaacgactggctgtacgccttcaaccccctgctggccggcaccatcagaagcaagctgagcagaagatgccccagccagagcaagtactag

SEQ ID NO: 86228 - DNA, 5472 bp, synthetic construct
  misc_feature 1..5472: note = Description of Artificial Sequence: Synthetic coding sequence
  source 1..5472: mol_type = other DNA
atgagcggcgccagcgtgaaggtggccgtgagagtgagacccttcaacagcagagagaccagcaaggagagcaagtgcatcatccagatgcagggcaacagcaccagcatcatcaaccccaagaaccccaaggaggcccccaagagcttcagcttcgactacagctactggagccacaccagccccgaggacccctgcttcgccagccagaacagagtgtacaacgacatcggcaaggagatgctgctgcacgccttcgagggctacaacgtgtgcatcttcgcctacggccagaccggcgccggcaagagctacaccatgatgggcaagcaggaggagagccaggccggcatcatcccccagctgtgcgaggagctgttcgagaagatcaacgacaactgcaacgaggagatgagctacagcgtggaggtgagctacatggagatctactgcgagagagtgagagacctgctgaaccccaagaacaagggcaacctgagagtgagagagcaccccctgctgggcccctacgtggaggacctgagcaagctggccgtgaccagctacaccgacatcgccgacctgatggacgccggcaacaaggccagaaccgtggccgccaccaacatgaacgagaccagcagcagaagccacgccgtgttcaccatcgtgttcacccagaagaagcacgacaacgagaccaacctgagcaccgagaaggtgagcaagatcagcctggtggacctggccggcagcgagagagccgacagcaccggcgccaagggcaccagactgaaggagggcgccaacatcaacaagagcctgaccaccctgggcaaggtgatcagcgccctggccgaggtggacaccagcaagaagaagagcaagaagaagaagaagaccgacttcatcccctacagagacagcgtgctgacctggctgctgagagagaacctgggcggcaacagcagaaccgccatggtggccgccctgagccccgccgacatcaactacgacgagaccctgagcaccctgagatacgccgacagagccaagcagatcaagtgcaacgccgtgatcaacgaggaccccaacgccaagctggtgagagagctgaaggaggaggtgaccagactgaaggacctgctgagagcccagggcctgggcgacatcatcgacatcgaccccctgatcgacgactacagcggcagcggcagcaagtacctgaaggacttccagaacaacaagcacagatacctgctggccagcgagaaccagagacccggccacttcagcaccgccagcatgggcagcctgaccagcagccccagcagctgcagcctgagcagccaggtgggcctgaccagcgtgaccagcatccaggagagaatcatgagcacccccggcggcgaggaggccatcgagagactgaaggagagcgagaagatcatcgccgagctgaacgagacctgggaggagaagctgagaaagaccgaggccatcagaatggagagagaggccctgctggccgagatgggcgtggccatcagagaggacggcggcaccctgggcgtgttcagccccaagaagaccccccacctggtgaacctgaacgaggaccccctgatgagcgagtgcctgctgtactacatcaaggacggcatcaccagagtgggccaggccgacgccgagagaagacaggacatcgtgctgagcggcgcccacatcaaggaggagcactgcatcttcagaagcgagagaagcaacagcggcgaggtgatcgtgaccctggagccctgcgagagaagcgagacctacgtgaacggcaagagagtgagccagcccgtgcagctgagaagcggcaacagaatcatcatgggcaagaaccacgtgttcagattcaaccaccccgagcaggccagagccgagagagagaagacccccagcgccgagacccccagcgagcccgtggactggaccttcgcccagagagagctgctggagaagcagggcatcgacatgaagcaggagatggagaagagactgcaggagatggagatcctgtacaagaaggagaaggaggaggccgacctgctgctggagcagcagagactggactacgagagcaagctgcaggccctgcagaagcaggtggagaccagaagcctggccgccgagaccaccgaggaggaggaggaggaggaggaggtgccctggacccagcacgagttcgagctggcccagtgggccttcagaaagtggaagagccaccagttcaccagcctgagagacctgctgtggggcaacgccgtgtacctgaaggaggccaacgccatcagcgtggagctgaagaagaaggtgcagttccagttcgtgctgctgaccgacaccctgtacagccccctgccccccgagctgctgcccaccgagatggagaagacccacgaggacagacccttccccagaaccgtggtggccgtggaggtgcaggacctgaagaacggcgccacccactactggagcctggagaagctgaagcagagactggacctgatgagagagatgtacgacagagccggcgagatggccagcagcgcccaggacgagagcgagaccaccgtgaccggcagcgaccccttctacgacagattccactggttcaagctggtgggcagcagccccatcttccacggctgcgtgaacgagagactggccgacagaacccccagccccaccttcagcaccgccgacagcgacatcaccgagctggccgacgagcagcaggacgagatggaggacttcgacgacgaggccttcgtggacgacgccggcagcgacgccggcaccgaggagggcagcgacctgttcagcgacggccacgaccccttctacgacagaagcccctggttcatcctggtgggcagagccttcgtgtacctgagcaacctgctgtaccccgtgcccctgatccacagagtggccatcgtgagcgagaagggcgaggtgagaggcttcctgagagtggccgtgcaggccatcgccgccgacgaggaggcccccgactacggcagcggcatcagacagagcggcaccgccaagatcagcttcgacaacgagtacttcaaccagagcgacttcagcagcgtggccatgaccagaagcggcctgagcctggaggagctgagaatcgtggagggccagggccagagcagcgaggtgatcaccccccccgaggagatcagcagaatcaacgacctggacctgaagagcagcaccctgctggacggcaagatggtgatggagggcttcagcgaggagatcggcaaccacctgaagctgggcagcgccttcaccttcagagtgaccgtgctgcaggccagcggcatcctgcccgagtacgccgacatcttctgccagttcaacttcctgcacagacacgacgaggccttcagcaccgagcccctgaagaacaacggcagaggcagccccctggccttctaccacgtgcagaacatcgccgtggagatcaccgagagcttcgtggactacatcaagaccaagcccatcgtgttcgaggtgttcggccactaccagcagcaccccctgcacctgcagggccaggagctgaacagccccccccagccctgcagaagattcttccccccccccatgcccctgagcaagcccgtgcccgccaccaagctgaacaccatgagcaagaccagcctgggccagagcatgagcaagtacgacctgctggtgtggttcgagatcagcgagctggagcccaccggcgagtacatccccgccgtggtggaccacaccgccggcctgccctgccagggcaccttcctgctgcaccagggcatccagagaagaatcaccgtgaccatcatccacgagaagggcagcgagctgcactggaaggacgtgagagagctggtggtgggcagaatcagaaacaagcccgaggtggacgaggccgccgtggacgccatcctgagcctgaacatcatcagcgccaagtacctgaagagcagccacaacagcagcagaaccttctacagattcgaggccgtgtgggacagcagcctgcacaacagcctgctgctgaacagagtgaccccctacggcgagaagatctacatgaccctgagcgcctacctggagctggaccactgcatccagcccgccgtgatcaccaaggacgtgtgcatggtgttctacagcagagacgccaagatcagcccccccagaagcctgagaagcctgttcggcagcggctacagcaagagccccgacagcaacagagtgaccggcatctacgagctgagcctgtgcaagatgagcgacaccggcagccccggcatgcagagaagaagaagaaagatcctggacaccagcgtggcctacgtgagaggcgaggagaacctggccggctggagacccagaggcgacagcctgatcctggagcaccagtgggagctggagaagctggagctgctgcacgaggtggagaagaccagacacttcctgctgctgagagagagactgggcgacagcatccccaagagcctgagcgacagcctgagccccagcctgagcagcggcaccctgagcaccagcaccagcatcagcagccagatcagcaccaccaccttcgagagcgccatcacccccagcgagagcagcggctacgacagcggcgacatcgagagcctggtggacagagagaaggagctggccaccaagtgcctgcagctgctgacccacaccttcaacagagagttcagccaggtgcacggcagcgtgagcgactgcaagctgagcgacatcagccccatcggcagagaccccagcgagagcagcttcagcagcgccaccctgacccccagcagcacctgccccagcctggtggacagcagaagcaacagcctggaccagaagacccccgaggccaacagcagagccagcagcccctgccccgagttcgagcagttccagatcgtgcccgccgtggagaccccctacctggccagagccggcaagaacgagttcctgaacctggtgcccgacatcgaggagatcagacccagcagcgtggtgagcaagaagggctacctgcacttcaaggagcccctgtacagcaactgggccaagcacttcgtggtggtgagaagaccctacgtgttcatctacaacagcgacaaggaccccgtggagagaggcatcatcaacctgagcaccgcccaggtggagtacagcgaggaccagcaggccatggtgaagacccccaacaccttcgccgtgtgcaccaagcacagaggcgtgctgctgcaggccctgaacgacaaggacatgaacgactggctgtacgccttcaaccccctgctggccggcaccatcagacccggccacctggccagcgagatcatcagagaggacaagagcgtgagcttcagctgccagtag

SEQ ID NO: 86229 - DNA, 5472 bp, synthetic construct
  misc_feature 1..5472: note = Description of Artificial Sequence: Synthetic coding sequence
  source 1..5472: mol_type = other DNA
atgagcggcgccagcgtgaaggtggccgtgagagtgagacccttcaacagcagagagaccagcaaggagagcaagtgcatcatccagatgcagggcaacagcaccagcatcatcaaccccaagaaccccaaggaggcccccaagagcttcagcttcgactacagctactggagccacaccagccccgaggacccctgcttcgccagccagaacagagtgtacaacgacatcggcaaggagatgctgctgcacgccttcgagggctacaacgtgtgcatcttcgcctacggccagaccggcgccggcaagagctacaccatgatgggcaagcaggaggagagccaggccggcatcatcccccagctgtgcgaggagctgttcgagaagatcaacgacaactgcaacgaggagatgagctacagcgtggaggtgagctacatggagatctactgcgagagagtgagagacctgctgaaccccaagaacaagggcaacctgagagtgagagagcaccccctgctgggcccctacgtggaggacctgagcaagctggccgtgaccagctacaccgacatcgccgacctgatggacgccggcaacaaggccagaaccgtggccgccaccaacatgaacgagaccagcagcagaagccacgccgtgttcaccatcgtgttcacccagaagaagcacgacaacgagaccaacctgagcaccgagaaggtgagcaagatcagcctggtggacctggccggcagcgagagagccgacagcaccggcgccaagggcaccagactgaaggagggcgccaacatcaacaagagcctgaccaccctgggcaaggtgatcagcgccctggccgaggtggacaactgcaccagcaagagcaagaagaagaagaagaccgacttcatcccctacagagacagcgtgctgacctggctgctgagagagaacctgggcggcaacagcagaaccgccatggtggccgccctgagccccgccgacatcaactacgacgagaccctgagcaccctgagatacgccgacagagccaagcagatcaagtgcaacgccgtgatcaacgaggaccccaacgccaagctggtgagagagctgaaggaggaggtgaccagactgaaggacctgctgagagcccagggcctgggcgacatcatcgacatcgaccccctgatcgacgactacagcggcagcggcagcaagtacctgaaggacttccagaacaacaagcacagatacctgctggccagcgagaaccagagacccggccacttcagcaccgccagcatgggcagcctgaccagcagccccagcagctgcagcctgagcagccaggtgggcctgaccagcgtgaccagcatccaggagagaatcatgagcacccccggcggcgaggaggccatcgagagactgaaggagagcgagaagatcatcgccgagctgaacgagacctgggaggagaagctgagaaagaccgaggccatcagaatggagagagaggccctgctggccgagatgggcgtggccatcagagaggacggcggcaccctgggcgtgttcagccccaagaagaccccccacctggtgaacctgaacgaggaccccctgatgagcgagtgcctgctgtactacatcaaggacggcatcaccagagtgggccaggccgacgccgagagaagacaggacatcgtgctgagcggcgcccacatcaaggaggagcactgcatcttcagaagcgagagaagcaacagcggcgaggtgatcgtgaccctggagccctgcgagagaagcgagacctacgtgaacggcaagagagtgagccagcccgtgcagctgagaagcggcaacagaatcatcatgggcaagaaccacgtgttcagattcaaccaccccgagcaggccagagccgagagagagaagacccccagcgccgagacccccagcgagcccgtggactggaccttcgcccagagagagctgctggagaagcagggcatcgacatgaagcaggagatggagaagagactgcaggagatggagatcctgtacaagaaggagaaggaggaggccgacctgctgctggagcagcagagactggactacgagagcaagctgcaggccctgcagaagcaggtggagaccagaagcctggccgccgagaccaccgaggaggaggaggaggaggaggaggtgccctggacccagcacgagttcgagctggcccagtgggccttcagaaagtggaagagccaccagttcaccagcctgagagacctgctgtggggcaacgccgtgtacctgaaggaggccaacgccatcagcgtggagctgaagaagaaggtgcagttccagttcgtgctgctgaccgacaccctgtacagccccctgccccccgagctgctgcccaccgagatggagaagacccacgaggacagacccttccccagaaccgtggtggccgtggaggtgcaggacctgaagaacggcgccacccactactggagcctggagaagctgaagcagagactggacctgatgagagagatgtacgacagagccggcgagatggccagcagcgcccaggacgagagcgagaccaccgtgaccggcagcgaccccttctacgacagattccactggttcaagctggtgggcagcagccccatcttccacggctgcgtgaacgagagactggccgacagaacccccagccccaccttcagcaccgccgacagcgacatcaccgagctggccgacgagcagcaggacgagatggaggacttcgacgacgaggccttcgtggacgacgccggcagcgacgccggcaccgaggagggcagcgacctgttcagcgacggccacgaccccttctacgacagaagcccctggttcatcctggtgggcagagccttcgtgtacctgagcaacctgctgtaccccgtgcccctgatccacagagtggccatcgtgagcgagaagggcgaggtgagaggcttcctgagagtggccgtgcaggccatcgccgccgacgaggaggcccccgactacggcagcggcatcagacagagcggcaccgccaagatcagcttcgacaacgagtacttcaaccagagcgacttcagcagcgtggccatgaccagaagcggcctgagcctggaggagctgagaatcgtggagggccagggccagagcagcgaggtgatcaccccccccgaggagatcagcagaatcaacgacctggacctgaagagcagcaccctgctggacggcaagatggtgatggagggcttcagcgaggagatcggcaaccacctgaagctgggcagcgccttcaccttcagagtgaccgtgctgcaggccagcggcatcctgcccgagtacgccgacatcttctgccagttcaacttcctgcacagacacgacgaggccttcagcaccgagcccctgaagaacaacggcagaggcagccccctggccttctaccacgtgcagaacatcgccgtggagatcaccgagagcttcgtggactacatcaagaccaagcccatcgtgttcgaggtgttcggccactaccagcagcaccccctgcacctgcagggccaggagctgaacagccccccccagccctgcagaagattcttccccccccccatgcccctgagcaagcccgtgcccgccaccaagctgaacaccatgagcaagaccagcctgggccagagcatgagcaagtacgacctgctggtgtggttcgagatcagcgagctggagcccaccggcgagtacatccccgccgtggtggaccacaccgccggcctgccctgccagggcaccttcctgctgcaccagggcatccagagaagaatcaccgtgaccatcatccacgagaagggcagcgagctgcactggaaggacgtgagagagctggtggtgggcagaatcagaaacaagcccgaggtggacgaggccgccgtggacgccatcctgagcctgaacatcatcagcgccaagtacctgaagagcagccacaacagcagcagaaccttctacagattcgaggccgtgtgggacagcagcctgcacaacagcctgctgctgaacagagtgaccccctacggcgagaagatctacatgaccctgagcgcctacctggagctggaccactgcatccagcccgccgtgatcaccaaggacgtgtgcatggtgttctacagcagagacgccaagatcagcccccccagaagcctgagaagcctgttcggcagcggctacagcaagagccccgacagcaacagagtgaccggcatctacgagctgagcctgtgcaagatgagcgacaccggcagccccggcatgcagagaagaagaagaaagatcctggacaccagcgtggcctacgtgagaggcgaggagaacctggccggctggagacccagaggcgacagcctgatcctggagcaccagtgggagctggagaagctggagctgctgcacgaggtggagaagaccagacacttcctgctgctgagagagagactgggcgacagcatccccaagagcctgagcgacagcctgagccccagcctgagcagcggcaccctgagcaccagcaccagcatcagcagccagatcagcaccaccaccttcgagagcgccatcacccccagcgagagcagcggctacgacagcggcgacatcgagagcctggtggacagagagaaggagctggccaccaagtgcctgcagctgctgacccacaccttcaacagagagttcagccaggtgcacggcagcgtgagcgactgcaagctgagcgacatcagccccatcggcagagaccccagcgagagcagcttcagcagcgccaccctgacccccagcagcacctgccccagcctggtggacagcagaagcaacagcctggaccagaagacccccgaggccaacagcagagccagcagcccctgccccgagttcgagcagttccagatcgtgcccgccgtggagaccccctacctggccagagccggcaagaacgagttcctgaacctggtgcccgacatcgaggagatcagacccagcagcgtggtgagcaagaagggctacctgcacttcaaggagcccctgtacagcaactgggccaagcacttcgtggtggtgagaagaccctacgtgttcatctacaacagcgacaaggaccccgtggagagaggcatcatcaacctgagcaccgcccaggtggagtacagcgaggaccagcaggccatggtgaagacccccaacaccttcgccgtgtgcaccaagcacagaggcgtgctgctgcaggccctgaacgacaaggacatgaacgactggctgtacgccttcaaccccctgctggccggcaccatcagacccggccacctggccagcgagatcatcagagaggacaagagcgtgagcttcagctgccagtag

SEQ ID NO: 86230 - DNA, 3462 bp, synthetic construct
  misc_feature 1..3462: note = Description of Artificial Sequence: Synthetic coding sequence
  source 1..3462: mol_type = other DNA
atgagcggcgccagcgtgaaggtggccgtgagagtgagacccttcaacagcagagagaccagcaaggagagcaagtgcatcatccagatgcagggcaacagcaccagcatcatcaaccccaagaaccccaaggaggcccccaagagcttcagcttcgactacagctactggagccacaccagccccgaggacccctgcttcgccagccagaacagagtgtacaacgacatcggcaaggagatgctgctgcacgccttcgagggctacaacgtgtgcatcttcgcctacggccagaccggcgccggcaagagctacaccatgatgggcaagcaggaggagagccaggccggcatcatcccccagctgtgcgaggagctgttcgagaagatcaacgacaactgcaacgaggagatgagctacagcgtggaggtgagctacatggagatctactgcgagagagtgagagacctgctgaaccccaagaacaagggcaacctgagagtgagagagcaccccctgctgggcccctacgtggaggacctgagcaagctggccgtgaccagctacaccgacatcgccgacctgatggacgccggcaacaaggccagaaccgtggccgccaccaacatgaacgagaccagcagcagaagccacgccgtgttcaccatcgtgttcacccagaagaagcacgacaacgagaccaacctgagcaccgagaaggtgagcaagatcagcctggtggacctggccggcagcgagagagccgacagcaccggcgccaagggcaccagactgaaggagggcgccaacatcaacaagagcctgaccaccctgggcaaggtgatcagcgccctggccgaggtgagcaagaagaagaagaagaccgacttcatcccctacagagacagcgtgctgacctggctgctgagagagaacctgggcggcaacagcagaaccgccatggtggccgccctgagccccgccgacatcaactacgacgagaccctgagcaccctgagatacgccgacagagccaagcagatcaagtgcaacgccgtgatcaacgaggaccccaacgccaagctggtgagagagctgaaggaggaggtgaccagactgaaggacctgctgagagcccagggcctgggcgacatcatcgacaccagcatgggcagcctgaccagcagccccagcagctgcagcctgagcagccaggtgggcctgaccagcgtgaccagcatccaggagagaatcatgagcacccccggcggcgaggaggccatcgagagactgaaggagagcgagaagatcatcgccgagctgaacgagacctgggaggagaagctgagaaagaccgaggccatcagaatggagagagaggccctgctggccgagatgggcgtggccatcagagaggacggcggcaccctgggcgtgttcagccccaagaagaccccccacctggtgaacctgaacgaggaccccctgatgagcgagtgcctgctgtactacatcaaggacggcatcaccagagtgggccaggccgacgccgagagaagacaggacatcgtgctgagcggcgcccacatcaaggaggagcactgcatcttcagaagcgagagaagcaacagcggcgaggtgatcgtgaccctggagccctgcgagagaagcgagacctacgtgaacggcaagagagtgagccagcccgtgcagctgagaagcggcaacagaatcatcatgggcaagaaccacgtgttcagattcaaccaccccgagcaggccagagccgagagagagaagacccccagcgccgagacccccagcgagcccgtggactggaccttcgcccagagagagctgctggagaagcagggcatcgacatgaagcaggagatggagaagagactgcaggagatggagatcctgtacaagaaggagaaggaggaggccgacctgctgctggagcagcagagactggacgccgacagcgacagcggcgacgacagcgacaagagaagctgcgaggagagctggaagctgatcaccagcctgagagagaagctgccccccagcaagctgcagaccatcgtgaagaagtgcggcctgcccagcagcggcaagaagagagagcccatcaagatgtaccagatcccccagagaagaagactgagcaaggacagcaagtgggtgaccatcagcgacctgaagatccaggccgtgaaggagatctgctacgaggtggccctgaacgacttcagacacagcagacaggagatcgaggccctggccatcgtgaagatgaaggagctgtgcgccatgtacggcaagaaggaccccaacgagagagacagctggagagccgtggccagagacgtgtgggacaccgtgggcgtgggcgacgagaagatcgaggacgtgatggccaccggcaagggcagcaccgacgtggacgacctgaaggtgcacatcgacaagctggaggacatcctgcaggaggtgaagaagcagaacaacatgaaggacgaggagatcaaggtgctgagaaacaagatgctgaagatggagaaggtgctgcccctgatcggcagccaggagcagaagagccccggcagccacaaggccaaggagcccgtgggcgccggcgtgagcagcaccagcgagaacaacgtgagcaagggcgacaacggcgagctggccaaggaggagagagtgagccagctgatgaacggcgaccccgccttcagaagaggcagactgagatggatgagacaggagcagatcagattcaagaacctgcagcagcaggagatcaccaagcagctgagaagacagaacgtgccccacagattcatcccccccgagaacagaaagcccagattccccttcaagagcaaccccaagcacagaaacagctggagccccggcacccacatcatcatcaccgaggacgaggtgatcgagctgagaatccccaaggacgacgaggccagaaagggcaacaaggaggagagccaggagaagggcggcaagggcgccttcaaggacccccagttcccctggggcagccagggcatgagaagccaggaccacatccaggtgagcaagcagcacatcaacaaccagcagcagcccccccagctgagatggagaagcaacagcctgaacaacggccagcccaagagcaccagatgccaggccagcgccagcgccgagagcctgaacagccacagcggccaccccaccgccgacgtgcagaccttccaggccaagagacacatccaccagcacagacagagctactgcaactacaacaccggcggccagctggagggcaacgccgccaccagctaccagaagcagaccgacaagcccagccactgcagccagttcgtgaccccccccagaatgagaagacagttcagcgcccccaacctgaaggccggcagagagaccaccgtgtag

SEQ ID NO: 86231 - DNA, 5451 bp, synthetic construct
  misc_feature 1..5451: note = Description of Artificial Sequence: Synthetic coding sequence
  source 1..5451: mol_type = other DNA
atgagcggcgccagcgtgaaggtggccgtgagagtgagacccttcaacagcagagagaccagcaaggagagcaagtgcatcatccagatgcagggcaacagcaccagcatcatcaaccccaagaaccccaaggaggcccccaagagcttcagcttcgactacagctactggagccacaccagccccgaggacccctgcttcgccagccagaacagagtgtacaacgacatcggcaaggagatgctgctgcacgccttcgagggctacaacgtgtgcatcttcgcctacggccagaccggcgccggcaagagctacaccatgatgggcaagcaggaggagagccaggccggcatcatcccccagctgtgcgaggagctgttcgagaagatcaacgacaactgcaacgaggagatgagctacagcgtggaggtgagctacatggagatctactgcgagagagtgagagacctgctgaaccccaagaacaagggcaacctgagagtgagagagcaccccctgctgggcccctacgtggaggacctgagcaagctggccgtgaccagctacaccgacatcgccgacctgatggacgccggcaacaaggccagaaccgtggccgccaccaacatgaacgagaccagcagcagaagccacgccgtgttcaccatcgtgttcacccagaagaagcacgacaacgagaccaacctgagcaccgagaaggtgagcaagatcagcctggtggacctggccggcagcgagagagccgacagcaccggcgccaagggcaccagactgaaggagggcgccaacatcaacaagagcctgaccaccctgggcaaggtgatcagcgccctggccgaggtggacaactgcaccagcaagagcaagaagaagaagaagaccgacttcatcccctacagagacagcgtgctgacctggctgctgagagagaacctgggcggcaacagcagaaccgccatggtggccgccctgagccccgccgacatcaactacgacgagaccctgagcaccctgagatacgccgacagagccaagcagatcaagtgcaacgccgtgatcaacgaggaccccaacgccaagctggtgagagagctgaaggaggaggtgaccagactgaaggacctgctgagagcccagggcctgggcgacatcatcgacatcgaccccctgatcgacgactacagcggcagcggcagcaagtacctgaaggacttccagaacaacaagcacagatacctgctggccagcgagaaccagagacccggccacttcagcaccgccagcatgggcagcctgaccagcagccccagcagctgcagcctgagcagccaggtgggcctgaccagcgtgaccagcatccaggagagaatcatgagcacccccggcggcgaggaggccatcgagagactgaaggagagcgagaagatcatcgccgagctgaacgagacctgggaggagaagctgagaaagaccgaggccatcagaatggagagagaggccctgctggccgagatgggcgtggccatcagagaggacggcggcaccctgggcgtgttcagccccaagaagaccccccacctggtgaacctgaacgaggaccccctgatgagcgagtgcctgctgtactacatcaaggacggcatcaccagagtgggccaggccgacgccgagagaagacaggacatcgtgctgagcggcgcccacatcaaggaggagcactgcatcttcagaagcgagagaagcaacagcggcgaggtgatcgtgaccctggagccctgcgagagaagcgagacctacgtgaacggcaagagagtgagccagcccgtgcagctgagaagcggcaacagaatcatcatgggcaagaaccacgtgttcagattcaaccaccccgagcaggccagagccgagagagagaagacccccagcgccgagacccccagcgagcccgtggactggaccttcgcccagagagagctgctggagaagcagggcatcgacatgaagcaggagatggagaagagactgcaggagatggagatcctgtacaagaaggagaaggaggaggccgacctgctgctggagcagcagagactggactacgagagcaagctgcaggccctgcagaagcaggtggagaccagaagcctggccgccgagaccaccgaggaggaggaggaggaggaggaggtgccctggacccagcacgagttcgagctggcccagtgggccttcagaaagtggaagagccaccagttcaccagcctgagagacctgctgtggggcaacgccgtgtacctgaaggaggccaacgccatcagcgtggagctgaagaagaaggtgcagttccagttcgtgctgctgaccgacaccctgtacagccccctgccccccgagctgctgcccaccgagatggagaagacccacgaggacagacccttccccagaaccgtggtggccgtggaggtgcaggacctgaagaacggcgccacccactactggagcctggagaagctgaagcagagactggacctgatgagagagatgtacgacagagccggcgagatggccagcagcgcccaggacgagagcgagaccaccgtgaccggcagcgaccccttctacgacagattccactggttcaagctggtgggcagcagccccatcttccacggctgcgtgaacgagagactggccgacagaacccccagccccaccttcagcaccgccgacagcgacatcaccgagctggccgacgagcagcaggacgagatggaggacttcgacgacgaggccttcgtggacgacgccggcagcgacgccggcaccgaggagggcagcgacctgttcagcgacggccacgaccccttctacgacagaagcccctggttcatcctggtgggcagagccttcgtgtacctgagcaacctgctgtaccccgtgcccctgatccacagagtggccatcgtgagcgagaagggcgaggtgagaggcttcctgagagtggccgtgcaggccatcgccgccgacgaggaggcccccgactacggcagcggcatcagacagagcggcaccgccaagatcagcttcgacaacgagtacttcaaccagagcgacttcagcagcgtggccatgaccagaagcggcctgagcctggaggagctgagaatcgtggagggccagggccagagcagcgaggtgatcaccccccccgaggagatcagcagaatcaacgacctggacctgaagagcagcaccctgctggacggcaagatggtgatggagggcttcagcgaggagatcggcaaccacctgaagctgggcagcgccttcaccttcagagtgaccgtgctgcaggccagcggcatcctgcccgagtacgccgacatcttctgccagttcaacttcctgcacagacacgacgaggccttcagcaccgagcccctgaagaacaacggcagaggcagccccctggccttctaccacgtgcagaacatcgccgtggagatcaccgagagcttcgtggactacatcaagaccaagcccatcgtgttcgaggtgttcggccactaccagcagcaccccctgcacctgcagggccaggagctgaacagccccccccagccctgcagaagattcttccccccccccatgcccctgagcaagcccgtgcccgccaccaagctgaacaccatgagcaagaccagcctgggccagagcatgagcaagtacgacctgctggtgtggttcgagatcagcgagctggagcccaccggcgagtacatccccgccgtggtggaccacaccgccggcctgccctgccagggcaccttcctgctgcaccagggcatccagagaagaatcaccgtgaccatcatccacgagaagggcagcgagctgcactggaaggacgtgagagagctggtggtgggcagaatcagaaacaagcccgaggtggacgaggccgccgtggacgccatcctgagcctgaacatcatcagcgccaagtacctgaagagcagccacaacagcagcagaaccttctacagattcgaggccgtgtgggacagcagcctgcacaacagcctgctgctgaacagagtgaccccctacggcgagaagatctacatgaccctgagcgcctacctggagctggaccactgcatccagcccgccgtgatcaccaaggacgtgtgcatggtgttctacagcagagacgccaagatcagcccccccagaagcctgagaagcctgttcggcagcggctacagcaagagccccgacagcaacagagtgaccggcatctacgagctgagcctgtgcaagatgagcgacaccggcagccccggcatgcagagaagaagaagaaagatcctggacaccagcgtggcctacgtgagaggcgaggagaacctggccggctggagacccagaggcgacagcctgatcctggagcaccagtgggagctggagaagctggagctgctgcacgaggtggagaagaccagacacttcctgctgctgagagagagactgggcgacagcatccccaagagcctgagcgacagcctgagccccagcctgagcagcggcaccctgagcaccagcaccagcatcagcagccagatcagcaccaccaccttcgagagcgccatcacccccagcgagagcagcggctacgacagcggcgacatcgagagcctggtggacagagagaaggagctggccaccaagtgcctgcagctgctgacccacaccttcaacagagagttcagccaggtgcacggcagcgtgagcgactgcaagctgagcgacatcagccccatcggcagagaccccagcgagagcagcttcagcagcgccaccctgacccccagcagcacctgccccagcctggtggacagcagaagcaacagcctggaccagaagacccccgaggccaacagcagagccagcagcccctgccccgagttcgagcagttccagatcgtgcccgccgtggagaccccctacctggccagagccggcaagaacgagttcctgaacctggtgcccgacatcgaggagatcagacccagcagcgtggtgagcaagaagggctacctgcacttcaaggagcccctgtacagcaactgggccaagcacttcgtggtggtgagaagaccctacgtgttcatctacaacagcgacaaggaccccgtggagagaggcatcatcaacctgagcaccgcccaggtggagtacagcgaggaccagcaggccatggtgaagacccccaacaccttcgccgtgtgcaccaagcacagaggcgtgctgctgcaggccctgaacgacaaggacatgaacgactggctgtacgccttcaaccccctgctggccggcaccatcagaagcaagctgagcagaagatgccccagccagagcaagtactag

SEQ ID NO: 86232 - DNA, 3462 bp, synthetic construct; identical to SEQ ID NO: 86230
  misc_feature 1..3462: note = Description of Artificial Sequence: Synthetic coding sequence
  source 1..3462: mol_type = other DNA

SEQ ID NO: 86233 - DNA, 2673 bp, synthetic construct
  misc_feature 1..2673: note = Description of Artificial Sequence: Synthetic coding sequence
  source 1..2673: mol_type = other DNA
atgagccagggcatcctgagcccccccgccggcctgctgagcgacgacgacgtggtggtgagccccatgttcgagagcaccgccgccgacctgggcagcgtggtgagaaagaacctgctgagcgactgcagcgtggtgagcaccagcctggaggacaagcagcaggtgcccagcgaggacagcatggagaaggtgaaggtgtacctgagagtgagacccctgctgcccagcgagctggagagacaggaggaccagggctgcgtgagaatcgagaacgtggagaccctggtgctgcaggcccccaaggacagcttcgccctgaagagcaacgagagaggcatcggccaggccacccacagattcaccttcagccagatcttcggccccgaggtgggccaggccagcttcttcaacctgaccgtgaaggagatggtgaaggacgtgctgaagggccagaactggctgatctacacctacggcgtgaccaacagcggcaagacccacaccatccagggcaccatcaaggacggcggcatcctgcccagaagcctggccctgatcttcaacagcctgcagggccagctgcaccccacccccgacctgaagcccctgctgagcaacgaggtgatctggctggacagcaagcagatcagacaggaggagatgaagaagctgagcctgctgaacggcggcctgcaggaggaggagctgagcaccagcctgaagagaagcgtgtacatcgagagcagaatcggcaccagcaccagcttcgacagcggcatcgccggcctgagcagcatcagccagtgcaccagcagcagccagctggacgagaccagccacagatgggcccagcccgacaccgcccccctgcccgtgcccgccaacatcagattcagcatctggatcagcttcttcgagatctacaacgagctgctgtacgacctgctggagccccccagccagcagagaaagagacagaccctgagactgtgcgaggaccagaacggcaacccctacgtgaaggacctgaactggatccacgtgcaggacgccgaggaggcctggaagctgctgaaggtgggcagaaagaaccagagcttcgccagcacccacctgaaccagaacagcagcagaagccacagcatcttcagcatcagaatcctgcacctgcagggcgagggcgacatcgtgcccaagatcagcgagctgagcctgtgcgacctggccggcagcgagagatgcaaggaccagaagagcggcgagagactgaaggaggccggcaacatcaacaccagcctgcacaccctgggcagatgcatcgccgccctgagacagaaccagcagaacagaagcaagcagaacctggtgcccttcagagacagcaagctgaccagagtgttccagggcttcttcaccggcagaggcagaagctgcatgatcgtgaacgtgaacccctgcgccagcacctacgacgagaccctgcacgtggccaagttcagcgccatcgccagccagctggtgcacgccccccccatgcagctgggcttccccagcctgcacagcttcatcaaggagcacagcctgcaggtgagccccagcctggagaagggcgccaaggccgacaccggcctggacgacgacatcgagaacgaggccgacatcagcatgtacggcaaggaggagctgctgcaggtggtggaggccatgaagaccctgctgctgaaggagagacaggagaagctgcagctggagatgcacctgagagacgagatctgcaacgagatggtggagcagatgcagcagagagagcagtggtgcagcgagcacctggacacccagaaggagctgctggaggagatgtacgaggagaagctgaacatcctgaaggagagcctgaccagcttctaccaggaggagatccaggagagagacgagaagatcgaggagctggaggccctgctgcaggaggccagacagcagagcgtggcccaccagcagagcggcagcgagctggccctgagaagaagccagagactggccgccagcgccagcacccagcagctgcaggaggtgaaggccaagctgcagcagtgcaaggccgagctgaacagcaccaccgaggagctgcacaagtaccagaagatgctggagcccccccccagcgccaagcccttcaccatcgacgtggacaagaagctggaggagggccagaagaacatcagactgctgagaaccgagctgcagaagctgggcgagagcctgcagagcgccgagagagcctgctgccacagcaccggcgccggcaagctgagacaggccctgaccacctgcgacgacatcctgatcaagcaggaccagaccctggccgagctgcagaacaacatggtgctggtgaagctggacctgagaaagaaggccgcctgcatcgccgagcagtaccacaccgtgctgaagctgcagggccaggtgagcgccaagaagagactgggcaccaaccaggagaaccagcagcccaaccagcagccccccggcaagaagcccttcctgagaaacctgctgcccagaacccccacctgccagagcagcaccgactgcagcccctacgccagaatcctgagaagcagaagaagccccctgctgaagagcggccccttcggcaagaagtactag

SEQ ID NO: 86234 - DNA, 678 bp, synthetic construct
  misc_feature 1..678: note = Description of Artificial Sequence: Synthetic coding sequence
  source 1..678: mol_type = other DNA
atgagccagggcatcctgagcccccccgccggcctgctgagcgacgacgacgtggtggtgagccccatgttcgagagcaccgccgccgacctgggcagcgtggtgagaaagaacctgctgagcgactgcagcgtggtgagcaccagcctggaggacaagcagcaggtgcccagcgaggacagcatggagaaggtgaaggtgtacctgagagtgagacccctgctgcccagcgagctggagagacaggaggaccagggctgcgtgagaatcgagaacgtggagaccctggtgctgcaggcccccaaggacagcttcgccctgaagagcaacgagagaggcatcggccaggccacccacagattcaccttcagccagatcttcggccccgaggtgggccaggccagcttcttcaacctgaccgtgaaggagatggtgaaggacgtgctgaagggccagaactggctgatctacacctacggcgtgaccaacagcggcaagacccacaccatccagggcaccatcaaggacggcggcatcctgcccagaagcctggccctgatcttcaacagcctgcagggccagctgcaccccacccccgacctgaagcccctgctgagcaacgaggtgatctggctggacagcaagcagatcagacaggaggagatgaagaagctgtag

SEQ ID NO: 86235 - DNA, 2619 bp, synthetic construct
  misc_feature 1..2619: note = Description of Artificial Sequence: Synthetic coding sequence
  source 1..2619: mol_type = other DNA
atgagccagggcatcctgagcccccccgccggcctgctgagcgacgacgacgtggtggtgagccccatgttcgagagcaccgccgccgacctgggcagcgtggtgagaaagaacctgctgagcgactgcagcgtggtgagcaccagcctggaggacaagcagcaggtgcccagcgaggacagcatggagaaggaggaccagggctgcgtgagaatcgagaacgtggagaccctggtgctgcaggcccccaaggacagcttcgccctgaagagcaacgagagaggcatcggccaggccacccacagattcaccttcagccagatcttcggccccgaggtgggccaggccagcttcttcaacctgaccgtgaaggagatggtgaaggacgtgctgaagggccagaactggctgatctacacctacggcgtgaccaacagcggcaagacccacaccatccagggcaccatcaaggacggcggcatcctgcccagaagcctggccctgatcttcaacagcctgcagggccagctgcaccccacccccgacctgaagcccctgctgagcaacgaggtgatctggctggacagcaagcagatcagacaggaggagatgaagaagctgagcctgctgaacggcggcctgcaggaggaggagctgagcaccagcctgaagagaagcgtgtacatcgagagcagaatcggcaccagcaccagcttcgacagcggcatcgccggcctgagcagcatcagccagtgcaccagcagcagccagctggacgagaccagccacagatgggcccagcccgacaccgcccccctgcccgtgcccgccaacatcagattcagcatctggatcagcttcttcgagatctacaacgagctgctgtacgacctgctggagccccccagccagcagagaaagagacagaccctgagactgtgcgaggaccagaacggcaacccctacgtgaaggacctgaactggatccacgtgcaggacgccgaggaggcctggaagctgctgaaggtgggcagaaagaaccagagcttcgccagcacccacctgaaccagaacagcagcagaagccacagcatcttcagcatcagaatcctgcacctgcagggcgagggcgacatcgtgcccaagatcagcgagctgagcctgtgcgacctggccggcagcgagagatgcaaggaccagaagagcggcgagagactgaaggaggccggcaacatcaacaccagcctgcacaccctgggcagatgcatcgccgccctgagacagaaccagcagaacagaagcaagcagaacctggtgcccttcagagacagcaagctgaccagagtgttccagggcttcttcaccggcagaggcagaagctgcatgatcgtgaacgtgaacccctgcgccagcacctacgacgagaccctgcacgtggccaagttcagcgccatcgccagccagctggtgcacgccccccccatgcagctgggcttccccagcctgcacagcttcatcaaggagcacagcctgcaggtgagccccagcctggagaagggcgccaaggccgacaccggcctggacgacgacatcgagaacgaggccgacatcagcatgtacggcaaggaggagctgctgcaggtggtggaggccatgaagaccctgctgctgaaggagagacaggagaagctgcagctggagatgcacctgagagacgagatctgcaacgagatggtggagcagatgcagcagagagagcagtggtgcagcgagcacctggacacccagaaggagctgctggaggagatgtacgaggagaagctgaacatcctgaaggagagcctgaccagcttctaccaggaggagatccaggagagagacgagaagatcgaggagctggaggccctgctgcaggaggccagacagcagagcgtggcccaccagcagagcggcagcgagctggccctgagaagaagccagagactggccgccagcgccagcacccagcagctgcaggaggtgaaggccaagctgcagcagtgcaaggccgagctgaacagcaccaccgaggagctgcacaagtaccagaagatgctggagcccccccccagcgccaagcccttcaccatcgacgtggacaagaagctggaggagggccagaagaacatcagactgctgagaaccgagctgcagaagctgggcgagagcctgcagagcgccgagagagcctgctgccacagcaccggcgccggcaagctgagacaggccctgaccacctgcgacgacatcctgatcaagcaggaccagaccctggccgagctgcagaacaacatggtgctggtgaagctggacctgagaaagaaggccgcctgcatcgccgagcagtaccacaccgtgctgaagctgcagggccaggtgagcgccaagaagagactgggcaccaaccaggagaaccagcagcccaaccagcagccccccggcaagaagcccttcctgagaaacctgctgcccagaacccccacctgccagagcagcaccgactgcagcccctacgccagaatcctgagaagcagaagaagccccctgctgaagagcggccccttcggcaagaagtactag

SEQ ID NO: 86236 - DNA, 480 bp, synthetic construct
  misc_feature 1..480: note = Description of Artificial Sequence: Synthetic coding sequence
  source 1..480: mol_type = other DNA
atgagccagggcatcctgagcccccccgccggcctgctgagcgacgacgacgtggtggtgagccccatgttcgagagcaccgccgccgacctgggcagcgtggtgagaaagaacctgctgagcgactgcagcgtggtgagcaccagcctggaggacaagcagcaggtgcccagcgaggacagcatggagaaggtgaaggtgtacctgagagtgagacccctgctgcccagcgagctggagagacaggaggaccagggctgcgtgagaatcgagaacgtggagaccctggtgctgcaggcccccaaggacagcttcgccctgaagagcaacgagagaggcatcggccaggccacccacagattcaccttcagccagatcttcggccccgaggtgggccaggccagcttcttcaacctgaccgtgaaggagatggtgaaggacgtgctgaagggccagaactggctgatctacacctactag

SEQ ID NO: 86237 - DNA, 4884 bp, synthetic construct
  misc_feature 1..4884: note = Description of Artificial Sequence: Synthetic coding sequence
  source 1..4884: mol_type = other DNA
atgctgggcgcccccgacgagagcagcgtgagagtggccgtgagaatcagaccccagctggccaaggagaagatcgagggctgccacatctgcaccagcgtgacccccggcgagccccaggtgttcctgggcaaggacaaggccttcaccttcgactacgtgttcgacatcgacagccagcaggagcagatctacatccagtgcatcgagaagctgatcgagggctgcttcgagggctacaacgccaccgtgttcgcctacggccagaccggcgccggcaagacctacaccatgggcaccggcttcgacgtgaacatcgtggaggaggagctgggcatcatcagcagagccgtgaagcacctgttcaagagcatcgaggagaagaagcacatcgccatcaagaacggcctgcccgcccccgacttcaaggtgaacgcccagttcctggagctgtacaacgaggaggtgctggacctgttcgacaccaccagagacatcgacgccaagagcaagaagagcaacatcagaatccacgaggacagcaccggcggcatctacaccgtgggcgtgaccaccagaaccgtgaacaccgagagcgagatgatgcagtgcctgaagctgggcgccctgagcagaaccaccgccagcacccagatgaacgtgcagagcagcagaagccacgccatcttcaccatccacgtgtgccagaccagagtgtgcccccagatcgacgccgacaacgccaccgacaacaagatcatcagcgagagcgcccagatgaacgagttcgagaccctgaccgccaagttccacttcgtggacctggccggcagcgagagactgaagagaaccggcgccaccggcgagagagccaaggagggcatcagcatcaactgcggcctgctggccctgggcaacgtgatcagcgccctgggcgacaagagcaagagagccacccacgtgccctacagagacagcaagctgaccagactgctgcaggacagcctgggcggcaacagccagaccatcatgatcgcctgcgtgagccccagcgacagagacttcatggagaccctgaacaccctgaagtacgccaacagagccagaaacatcaagaacaaggtgatggtgaaccaggacagagccagccagcagatcaacgccctgagaagcgagatcaccagactgcagatggagctgatggagtacaagaccggcaagagaatcatcgacgaggagggcgtggagagcatcaacgacatgttccacgagaacgccatgctgcagaccgagaacaacaacctgagagtgagaatcaaggccatgcaggagaccgtggacgccctgagaagcagaatcacccagctggtgagcgaccaggccaaccacgtgctggccagagccggcgagggcaacgaggagatcagcaacatgatccacagctacatcaaggagatcgaggacctgagagccaagctgctggagagcgaggccgtgaacgagaacctgagaaagaacctgaccagagccaccgccagagccccctacttcagcggcagcagcaccttcagccccaccatcctgagcagcgacaaggagaccatcgagatcatcgacctggccaagaaggacctggagaagctgaagagaaaggagaagagaaagaagaagagactgcagaagctggaggagagcaacagagaggagagaagcgtggccggcaaggaggacaacaccgacaccgaccaggagaagaaggaggagaagggcgtgagcgagagagagaacaacgagctggaggtggaggagagccaggaggtgagcgaccacgaggacgaggaggaggaggaggaggaggaggaggacgacatcgacggcggcgagagcagcgacgagagcgacagcgagagcgacgagaaggccaactaccaggccgacctggccaacatcacctgcgagatcgccatcaagcagaagctgatcgacgagctggagaacagccagaagagactgcagaccctgaagaagcagtacgaggagaagctgatgatgctgcagcacaagatcagagacacccagctggagagagaccaggtgctgcagaacctgggcagcgtggagagctacagcgaggagaaggccaagaaggtgagaagcgagtacgagaagaagctgcaggccatgaacaaggagctgcagagactgcaggccgcccagaaggagcacgccagactgctgaagaaccagagccagtacgagaagcagctgaagaagctgcagcaggacgtgatggagatgaagaagaccaaggtgagactgatgaagcagatgaaggaggagcaggagaaggccagactgaccgagagcagaagaaacagagagatcgcccagctgaagaaggaccagagaaagagagaccaccagctgagactgctggaggcccagaagagaaaccaggaggtggtgctgagaagaaagaccgaggaggtgaccgccctgagaagacaggtgagacccatgagcgacaaggtggccggcaaggtgaccagaaagctgagcagcagcgacgcccccgcccaggacaccggcagcagcgccgccgccgtggagaccgacgccagcagaaccggcgcccagcagaagatgagaatccccgtggccagagtgcaggccctgcccacccccgccaccaacggcaacagaaagaagtaccagagaaagggcctgaccggcagagtgttcatcagcaagaccgccagaatgaagtggcagctgctggagagaagagtgaccgacatcatcatgcagaagatgaccatcagcaacatggaggccgacatgaacagactgctgaagcagagagaggagctgaccaagagaagagagaagctgagcaagagaagagagaagatcgtgaaggagaacggcgagggcgacaagaacgtggccaacatcaacgaggagatggagagcctgaccgccaacatcgactacatcaacgacagcatcagcgactgccaggccaacatcatgcagatggaggaggccaaggaggagggcgagaccctggacgtgaccgccgtgatcaacgcctgcaccctgaccgaggccagatacctgctggaccacttcctgagcatgggcatcaacaagggcctgcaggccgcccagaaggaggcccagatcaaggtgctggagggcagactgaagcagaccgagatcaccagcgccacccagaaccagctgctgttccacatgctgaaggagaaggccgagctgaaccccgagctggacgccctgctgggccacgccctgcaggacttcaagcacttcttcgtggagaacgtggaggacagcaccgacgaggacgcccccctgaacagccccggcagcgagggcagcaccctgagcagcgacctgatgaagctgtgcggcgaggtgaagcccaagaacaaggccagaagaagaaccaccacccagatggagctgctgtacgccgacagcagcgagctggccagcgacaccagcaccggcgacgccagcctgcccggccccctgacccccgtggccgagggccaggagatcggcatgaacaccgagaccagcggcaccagcgccagagagaaggagctgagccccccccccggcctgcccagcaagatcggcagcatcagcagacagagcagcctgagcgagaagaagatccccgagcccagccccgtgaccagaagaaaggcctacgagaaggccgagaagagcaaggccaaggagcagaagcagagcgacgagagcgacagcagcctgagcgaggtgcacagaggcatcatcaaccccttccccgccagcaagggcatcagagccttccccctgcagtgcatccacatcgccgagggccacaccaaggccgtgctgtgcgtggacagcaccgacgacctgctgttcaccggcagcaaggacagaacctgcaaggtgtggaacctggtgaccggccaggagatcatgagcctgggcggccaccccaacaacgtggtgagcgtgaagtactgcaactacaccagcctggtgttcaccgtgagcaccagctacatcaaggtgtgggacatcagagacagcgccaagtgcatcagaaccctgaccagcagcggccaggtgaccctgggcgacgcctgcagcgccagcaccagcagaaccgtggccatccccagcggcgagaaccagatcaaccagatcgccctgaaccccaccggcaccttcctgtacgccgccagcggcaacgccgtgagaatgtgggacctgaagagattccagagcaccggcaagctgaccggccacctgggccccgtgatgtgcctgaccgtggaccagatcagcagcggccaggacctgatcatcaccggcagcaaggaccactacatcaagatgttcgacgtgaccgagggcgccctgggcaccgtgagccccacccacaacttcgagcccccccactacgacggcatcgaggccctgaccatccagggcgacaacctgttcagcggcagcagagacaacggcatcaagaagtgggacctgacccagaaggacctgctgcagcaggtgcccaacgcccacaaggactgggtgtgcgccctgggcgtggtgcccgaccaccccgtgctgctgagcggctgcagaggcggcatcctgaaggtgtggaacatggacaccttcatgcccgtgggcgagatgaagggccacgacagccccatcaacgccatctgcgtgaacagcacccacatcttcaccgccgccgacgacagaaccgtgagaatctggaaggccagaaacctgcaggacggccagatcagcgacaccggcgacctgggcgaggacatcgccagcaactag

SEQ ID NO: 86238 - DNA, 5025 bp, synthetic construct
  misc_feature 1..5025: note = Description of Artificial Sequence: Synthetic coding sequence
  source 1..5025: mol_type = other DNA
atgctgggcgcccccgacgagagcagcgtgagagtggccgtgagaatcagaccccagctggccaaggagaagatcgagggctgccacatctgcaccagcgtgacccccggcgagccccaggtgttcctgggcaaggacaaggccttcaccttcgactacgtgttcgacatcgacagccagcaggagcagatctacatccagtgcatcgagaagctgatcgagggctgcttcgagggctacaacgccaccgtgttcgcctacggccagaccggcgccggcaagacctacaccatgggcaccggcttcgacgtgaacatcgtggaggaggagctgggcatcatcagcagagccgtgaagcacctgttcaagagcatcgaggagaagaagcacatcgccatcaagaacggcctgcccgcccccgacttcaaggtgaacgcccagttcctggagctgtacaacgaggaggtgctggacctgttcgacaccaccagagacatcgacgccaagagcaagaagagcaacatcagaatccacgaggacagcaccggcggcatctacaccgtgggcgtgaccaccagaaccgtgaacaccgagagcgagatgatgcagtgcctgaagctgggcgccctgagcagaaccaccgccagcacccagatgaacgtgcagagcagcagaagccacgccatcttcaccatccacgtgtgccagaccagagtgtgcccccagatcgacgccgacaacgccaccgacaacaagatcatcagcgagagcgcccagatgaacgagttcgagaccctgaccgccaagttccacttcgtggacctggccggcagcgagagactgaagagaaccggcgccaccggcgagagagccaaggagggcatcagcatcaactgcggcctgctggccctgggcaacgtgatcagcgccctgggcgacaagagcaagagagccacccacgtgccctacagagacagcaagctgaccagactgctgcaggacagcctgggcggcaacagccagaccatcatgatcgcctgcgtgagccccagcgacagagacttcatggagaccctgaacaccctgaagtacgccaacagagccagaaacatcaagaacaaggtgatggtgaaccaggacagagccagccagcagatcaacgccctgagaagcgagatcaccagactgcagatggagctgatggagtacaagaccggcaagagaatcatcgacgaggagggcgtggagagcatcaacgacatgttccacgagaacgccatgctgcagaccgagaacaacaacctgagagtgagaatcaaggccatgcaggagaccgtggacgccctgagaagcagaatcacccagctggtgagcgaccaggccaaccacgtgctggccagagccggcgagggcaacgaggagatcagcaacatgatccacagctacatcaaggagatcgaggacctgagagccaagctgctggagagcgaggccgtgaacgagaacctgagaaagaacctgaccagagccaccgccagagccccctacttcagcggcagcagcaccttcagccccaccatcctgagcagcgacaaggagaccatcgagatcatcgacctggccaagaaggacctggagaagctgaagagaaaggagaagagaaagaagaagagactgcagaagctggaggagagcaacagagaggagagaagcgtggccggcaaggaggacaacaccgacaccgaccaggagaagaaggaggagaagggcgtgagcgagagagagaacaacgagctggaggtggaggagagccaggaggtgagcgaccacgaggacgaggaggaggaggaggaggaggaggaggacgacatcgacggcggcgagagcagcgacgagagcgacagcgagagcgacgagaaggccaactaccaggccgacctggccaacatcacctgcgagatcgccatcaagcagaagctgatcgacgagctggagaacagccagaagagactgcagaccctgaagaagcagtacgaggagaagctgatgatgctgcagcacaagatcagagacacccagctggagagagaccaggtgctgcagaacctgggcagcgtggagagctacagcgaggagaaggccaagaaggtgagaagcgagtacgagaagaagctgcaggccatgaacaaggagctgcagagactgcaggccgcccagaaggagcacgccagactgctgaagaaccagagccagtacgagaagcagctgaagaagctgcagcaggacgtgatggagatgaagaagaccaaggtgagactgatgaagcagatgaaggaggagcaggagaaggccagactgaccgagagcagaagaaacagagagatcgcccagctgaagaaggaccagagaaagagagaccaccagctgagactgctggaggcccagaagagaaaccaggaggtggtgctgagaagaaagaccgaggaggtgaccgccctgagaagacaggtgagacccatgagcgacaaggtggccggcaaggtgaccagaaagctgagcagcagcgacgcccccgcccaggacaccggcagcagcgccgccgccgtggagaccgacgccagcagaaccggcgcccagcagaagatgagaatccccgtggccagagtgcaggccctgcccacccccgccaccaacggcaacagaaagaagtaccagagaaagggcctgaccggcagagtgttcatcagcaagaccgccagaatgaagtggcagctgctggagagaagagtgaccgacatcatcatgcagaagatgaccatcagcaacatggaggccgacatgaacagactgctgaagcagagagaggagctgaccaagagaagagagaagctgagcaagagaagagagaagatcgtgaaggagaacggcgagggcgacaagaacgtggccaacatcaacgaggagatggagagcctgaccgccaacatcgactacatcaacgacagcatcagcgactgccaggccaacatcatgcagatggaggaggccaaggaggagggcgagaccctggacgtgaccgccgtgatcaacgcctgcaccctgaccgaggccagatacctgctggaccacttcctgagcatgggcatcaacaagggcctgcaggccgcccagaaggaggcccagatcaaggtgctggagggcagactgaagcagaccgagatcaccagcgccacccagaaccagctgctgttccacatgctgaaggagaaggccgagctgaaccccgagctggacgccctgctgggccacgccctgcaggacctggacagcgtgcccctggagaacgtggaggacagcaccgacgaggacgcccccctgaacagccccggcagcgagggcagcaccctgagcagcgacctgatgaagctgtgcggcgaggtgaagcccaagaacaaggccagaagaagaaccaccacccagatggagctgctgtacgccgacagcagcgagctggccagcgacaccagcaccggcgacgccagcctgcccggccccctgacccccgtggccgagggccaggagatcggcatgaacaccgagaccagcggcaccagcgccagagagaaggagctgagccccccccccggcctgcccagcaagatcggcagcatcagcagacagagcagcctgagcgagaagaagatccccgagcccagccccgtgaccagaagaaaggcctacgagaaggccgagaagagcaaggccaaggagcagaagcacagcgacagcggcaccagcgaggccagcctgagcccccccagcagcccccccagcagacccagaaacgagctgaacgtgttcaacagactgaccgtgagccagggcaacaccagcgtgcagcaggacaagagcgacgagagcgacagcagcctgagcgaggtgcacagaagcagcagaagaggcatcatcaaccccttccccgccagcaagggcatcagagccttccccctgcagtgcatccacatcgccgagggccacaccaaggccgtgctgtgcgtggacagcaccgacgacctgctgttcaccggcagcaaggacagaacctgcaaggtgtggaacctggtgaccggccaggagatcatgagcctgggcggccaccccaacaacgtggtgagcgtgaagtactgcaactacaccagcctggtgttcaccgtgagcaccagctacatcaaggtgtgggacatcagagacagcgccaagtgcatcagaaccctgaccagcagcggccaggtgaccctgggcgacgcctgcagcgccagcaccagcagaaccgtggccatccccagcggcgagaaccagatcaaccagatcgccctgaaccccaccggcaccttcctgtacgccgccagcggcaacgccgtgagaatgtgggacctgaagagattccagagcaccggcaagctgaccggccacctgggccccgtgatgtgcctgaccgtggaccagatcagcagcggccaggacctgatcatcaccggcagcaaggaccactacatcaagatgttcgacgtgaccgagggcgccctgggcaccgtgagccccacccacaacttcgagcccccccactacgacggcatcgaggccctgaccatccagggcgacaacctgttcagcggcagcagagacaacggcatcaagaagtgggacctgacccagaaggacctgctgcagcaggtgcccaacgcccacaaggactgggtgtgcgccctgggcgtggtgcccgaccaccccgtgctgctgagcggctgcagaggcggcatcctgaaggtgtggaacatggacaccttcatgcccgtgggcgagatgaagggccacgacagccccatcaacgccatctgcgtgaacagcacccacatcttcaccgccgccgacgacagaaccgtgagaatctggaaggccagaaacctgcaggacggccagatcagcgacaccggcgacctgggcgaggacatcgccagcaactag

SEQ ID NO: 86239 - DNA, 4986 bp, synthetic construct
  misc_feature 1..4986: note = Description of Artificial Sequence: Synthetic coding sequence
  source 1..4986: mol_type = other DNA
atgctgggcgcccccgacgagagcagcgtgagagtggccgtgagaatcagaccccagctggccaaggagaagatcgagggctgccacatctgcaccagcgtgacccccggcgagccccaggtgttcctgggcaaggacaaggccttcaccttcgactacgtgttcgacatcgacagccagcaggagcagatctacatccagtgcatcgagaagctgatcgagggctgcttcgagggctacaacgccaccgtgttcgcctacggccagaccggcgccggcaagacctacaccatgggcaccggcttcgacgtgaacatcgtggaggaggagctgggcatcatcagcagagccgtgaagcacctgttcaagagcatcgaggagaagaagcacatcgccatcaagaacggcctgcccgcccccgacttcaaggtgaacgcccagttcctggagctgtacaacgaggaggtgctggacctgttcgacaccaccagagacatcgacgccaagagcaagaagagcaacatcagaatccacgaggacagcaccggcggcatctacaccgtgggcgtgaccaccagaaccgtgaacaccgagagcgagatgatgcagtgcctgaagctgggcgccctgagcagaaccaccgccagcacccagatgaacgtgcagagcagcagaagccacgccatcttcaccatccacgtgtgccagaccagagtgtgcccccagatcgacgccgacaacgccaccgacaacaagatcatcagcgagagcgcccagatgaacgagttcgagaccctgaccgccaagttccacttcgtggacctggccggcagcgagagactgaagagaaccggcgccaccggcgagagagccaaggagggcatcagcatcaactgcggcctgctggccctgggcaacgtgatcagcgccctgggcgacaagagcaagagagccacccacgtgccctacagagacagcaagctgaccagactgctgcaggacagcctgggcggcaacagccagaccatcatgatcgcctgcgtgagccccagcgacagagacttcatggagaccctgaacaccctgaagtacgccaacagagccagaaacatcaagaacaaggtgatggtgaaccaggacagagccagccagcagatcaacgccctgagaagcgagatcaccagactgcagatggagctgatggagtacaagaccggcaagagaatcatcgacgaggagggcgtggagagcatcaacgacatgttccacgagaacgccatgctgcagaccgagaacaacaacctgagagtgagaatcaaggccatgcaggagaccgtggacgccctgagaagcagaatcacccagctggtgagcgaccaggccaaccacgtgctggccagagccggcgagggcaacgaggagatcagcaacatgatccacagctacatcaaggagatcgaggacctgagagccaagctgctggagagcgaggccgtgaacgagaacctgagaaagaacctgaccagagccaccgccagagccccctacttcagcggcagcagcaccttcagccccaccatcctgagcagcgacaaggagaccatcgagatcatcgacctggccaagaaggacctggagaagctgaagagaaaggagaagagaaagaagaagagcgtggccggcaaggaggacaacaccgacaccgaccaggagaagaaggaggagaagggcgtgagcgagagagagaacaacgagctggaggtggaggagagccaggaggtgagcgaccacgaggacgaggaggaggaggaggaggaggaggaggacgacatcgacggcggcgagagcagcgacgagagcgacagcgagagcgacgagaaggccaactaccaggccgacctggccaacatcacctgcgagatcgccatcaagcagaagctgatcgacgagctggagaacagccagaagagactgcagaccctgaagaagcagtacgaggagaagctgatgatgctgcagcacaagatcagagacacccagctggagagagaccaggtgctgcagaacctgggcagcgtggagagctacagcgaggagaaggccaagaaggtgagaagcgagtacgagaagaagctgcaggccatgaacaaggagctgcagagactgcaggccgcccagaaggagcacgccagactgctgaagaaccagagccagtacgagaagcagctgaagaagctgcagcaggacgtgatggagatgaagaagaccaaggtgagactgatgaagcagatgaaggaggagcaggagaaggccagactgaccgagagcagaagaaacagagagatcgcccagctgaagaaggaccagagaaagagagaccaccagctgagactgctggaggcccagaagagaaaccaggaggtggtgctgagaagaaagaccgaggaggtgaccgccctgagaagacaggtgagacccatgagcgacaaggtggccggcaaggtgaccagaaagctgagcagcagcgacgcccccgcccaggacaccggcagcagcgccgccgccgtggagaccgacgccagcagaaccggcgcccagcagaagatgagaatccccgtggccagagtgcaggccctgcccacccccgccaccaacggcaacagaaagaagtaccagagaaagggcctgaccggcagagtgttcatcagcaagaccgccagaatgaagtggcagctgctggagagaagagtgaccgacatcatcatgcagaagatgaccatcagcaacatggaggccgacatgaacagactgctgaagcagagagaggagctgaccaagagaagagagaagctgagcaagagaagagagaagatcgtgaaggagaacggcgagggcgacaagaacgtggccaacatcaacgaggagatggagagcctgaccgccaacatcgactacatcaacgacagcatcagcgactgccaggccaacatcatgcagatggaggaggccaaggaggagggcgagaccctggacgtgaccgccgtgatcaacgcctgcaccctgaccgaggccagatacctgctggaccacttcctgagcatgggcatcaacaagggcctgcaggccgcccagaaggaggcccagatcaaggtgctggagggcagactgaagcagaccgagatcaccagcgccacccagaaccagctgctgttccacatgctgaaggagaaggccgagctgaaccccgagctggacgccctgctgggccacgccctgcaggacctggacagcgtgcccctggagaacgtggaggacagcaccgacgaggacgcccccctgaacagccccggcagcgagggcagcaccctgagcagcgacctgatgaagctgtgcggcgaggtgaagcccaagaacaaggccagaagaagaaccaccacccagatggagctgctgtacgccgacagcagcgagctggccagcgacaccagcaccggcgacgccagcctgcccggccccctgacccccgtggccgagggccaggagatcggcatgaacaccgagaccagcggcaccagcgccagagagaaggagctgagccccccccccggcctgcccagcaagatcggcagcatcagcagacagagcagcctgagcgagaagaagatccccgagcccagccccgtgaccagaagaaaggcctacgagaaggccgagaagagcaaggccaaggagcagaagcacagcgacagcggcaccagcgaggccagcctgagcccccccagcagcccccccagcagacccagaaacgagctgaacgtgttcaacagactgaccgtgagccagggcaacaccagcgtgcagcaggacaagagcgacgagagcgacagcagcctgagcgaggtgcacagaagcagcagaagaggcatcatcaaccccttccccgccagcaagggcatcagagccttccccctgcagtgcatccacatcgccgagggccacaccaaggccgtgctgtgcgtggacagcaccgacgacctgctgttcaccggcagcaaggacagaacctgcaaggtgtggaacctggtgaccggccaggagatcatgagcctgggcggccaccccaacaacgtggtgagcgtgaagtactgcaactacaccagcctggtgttcaccgtgagcaccagctacatcaaggtgtgggacatcagagacagcgccaagtgcatcagaaccctgaccagcagcggccaggtgaccctgggcgacgcctgcagcgccagcaccagcagaaccgtggccatccccagcggcgagaaccagatcaaccagatcgccctgaaccccaccggcaccttcctgtacgccgccagcggcaacgccgtgagaatgtgggacctgaagagattccagagcaccggcaagctgaccggccacctgggccccgtgatgtgcctgaccgtggaccagatcagcagcggccaggacctgatcatcaccggcagcaaggaccactacatcaagatgttcgacgtgaccgagggcgccctgggcaccgtgagccccacccacaacttcgagcccccccactacgacggcatcgaggccctgaccatccagggcgacaacctgttcagcggcagcagagacaacggcatcaagaagtgggacctgacccagaaggacctgctgcagcaggtgcccaacgcccacaaggactgggtgtgcgccctgggcgtggtgcccgaccaccccgtgctgctgagcggctgcagaggcggcatcctgaaggtgtggaacatggacaccttcatgcccgtgggcgagatgaagggccacgacagccccatcaacgccatctgcgtgaacagcacccacatcttcaccgccgccgacgacagaaccgtgagaatctggaaggccagaaacctgcaggacggccagatcagcgacaccggcgacctgggcgaggacatcgccagcaactag

SEQ ID NO: 86240 - DNA, 5028 bp, synthetic construct
  misc_feature 1..5028: note = Description of Artificial Sequence: Synthetic coding sequence
  source 1..5028: mol_type = other DNA
atgctgggcgcccccgacgagagcagcgtgagagtggccgtgagaatcagaccccagctggccaaggagaagatcgagggctgccacatctgcaccagcgtgacccccggcgagccccaggtgttcctgggcaaggacaaggccttcaccttcgactacgtgttcgacatcgacagccagcaggagcagatctacatccagtgcatcgagaagctgatcgagggctgcttcgagggctacaacgccaccgtgttcgcctacggccagaccggcgccggcaagacctacaccatgggcaccggcttcgacgtgaacatcgtggaggaggagctgggcatcatcagcagagccgtgaagcacctgttcaagagcatcgaggagaagaagcacatcgccatcaagaacggcctgcccgcccccgacttcaaggtgaacgcccagttcctggagctgtacaacgaggaggtgctggacctgttcgacaccaccagagacatcgacgccaagagcaagaagagcaacatcagaatccacgaggacagcaccggcggcatctacaccgtgggcgtgaccaccagaaccgtgaacaccgagagcgagatgatgcagtgcctgaagctgggcgccctgagcagaaccaccgccagcacccagatgaacgtgcagagcagcagaagccacgccatcttcaccatccacgtgtgccagaccagagtgtgcccccagatcgacgccgacaacgccaccgacaacaagatcatcagcgagagcgcccagatgaacgagttcgagaccctgaccgccaagttccacttcgtggacctggccggcagcgagagactgaagagaaccggcgccaccggcgagagagccaaggagggcatcagcatcaactgcggcctgctggccctgggcaacgtgatcagcgccctgggcgacaagagcaagagagccacccacgtgccctacagagacagcaagctgaccagactgctgcaggacagcctgggcggcaacagccagaccatcatgatcgcctgcgtgagccccagcgacagagacttcatggagaccctgaacaccctgaagtacgccaacagagccagaaacatcaagaacaaggtgatggtgaaccaggacagagccagccagcagatcaacgccctgagaagcgagatcaccagactgcagatggagctgatggagtacaagaccggcaagagaatcatcgacgaggagggcgtggagagcatcaacgacatgttccacgagaacgccatgctgcagaccgagaacaacaacctgagagtgagaatcaaggccatgcaggagaccgtggacgccctgagaagcagaatcacccagctggtgagcgaccaggccaaccacgtgctggccagagccggcgagggcaacgaggagatcagcaacatgatccacagctacatcaaggagatcgaggacctgagagccaagctgctggagagcgaggccgtgaacgagaacctgagaaagaacctgaccagagccaccgccagagccccctacttcagcggcagcagcaccttcagccccaccatcctgagcagcgacaaggagaccatcgagatcatcgacctggccaagaaggacctggagaagctgaagagaaaggagaagagaaagaagaagagactgcagaagctggaggagagcaacagagaggagagaagcgtggccggcaaggaggacaacaccgacaccgaccaggagaagaaggaggagaagggcgtgagcgagagagagaacaacgagctggaggtggaggagagccaggaggtgagcgaccacgaggacgaggaggaggaggaggaggaggaggaggacgacatcgacggcggcgagagcagcgacgagagcgacagcgagagcgacgagaaggccaactaccaggccgacctggccaacatcacctgcgagatcgccatcaagcagaagctgatcgacgagctggagaacagccagaagagactgcagaccctgaagaagcagtacgaggagaagctgatgatgctgcagcacaagatcagagacacccagctggagagagaccaggtgctgcagaacctgggcagcgtggagagctacagcgaggagaaggccaagaaggtgagaagcgagtacgagaagaagctgcaggccatgaacaaggagctgcagagactgcaggccgcccagaaggagcacgccagactgctgaagaaccagagccagtacgagaagcagctgaagaagctgcagcaggacgtgatggagatgaagaagaccaaggtgagactgatgaagcagatgaaggaggagcaggagaaggccagactgaccgagagcagaagaaacagagagatcgcccagctgaagaaggaccagagaaagagagaccaccagctgagactgctggaggcccagaagagaaaccaggaggtggtgctgagaagaaagaccgaggaggtgaccgccctgagaagacaggtgagacccatgagcgacaaggtggccggcaaggtgaccagaaagctgagcagcagcgacgcccccgcccaggacaccggcagcagcgccgccgccgtggagaccgacgccagcagaaccggcgcccagcagaagatgagaatccccgtggccagagtgcaggccctgcccacccccgccaccaacggcaacagaaagaagtaccagagaaagggcctgaccggcagagtgttcatcagcaagaccgccagaatgaagtggcagctgctggagagaagagtgaccgacatcatcatgcagaagatgaccatcagcaacatggaggccgacatgaacagactgctgaagcagagagaggagctgaccaagagaagagagaagctgagcaagagaagagagaagatcgtgaaggagaacggcgagggcgacaagaacgtggccaacatcaacgaggagatggagagcctgaccgccaacatcgactacatcaacgacagcatcagcgactgccaggccaacatcatgcagatggaggaggccaaggaggagggcgagaccctggacgtgaccgccgtgatcaacgcctgcaccctgaccgaggccagatacctgctggaccacttcctgagcatgggcatcaacaagggcctgcaggccgcccagaaggaggcccagatcaaggtgctggagggcagactgaagcagaccgagatcaccagcgccacccagaaccagctgctgttccacatgctgaaggagaaggccgagctgaaccccgagctggacgccctgctgggccacgccctgcaggacttcaagcacttcttcgtggagaacgtggaggacagcaccgacgaggacgcccccctgaacagccccggcagcgagggcagcaccctgagcagcgacctgatgaagctgtgcggcgaggtgaagcccaagaacaaggccagaagaagaaccaccacccagatggagctgctgtacgccgacagcagcgagctggccagcgacaccagcaccggcgacgccagcctgcccggccccctgacccccgtggccgagggccaggagatcggcatgaacaccgagaccagcggcaccagcgccagagagaaggagctgagccccccccccggcctgcccagcaagatcggcagcatcagcagacagagcagcctgagcgagaagaagatccccgagcccagccccgtgaccagaagaaaggcctacgagaaggccgagaagagcaaggccaaggagcagaagcacagcgacagcggcaccagcgaggccagcctgagcccccccagcagcccccccagcagacccagaaacgagctgaacgtgttcaacagactgaccgtgagccagggcaacaccagcgtgcagcaggacaagagcgacgagagcgacagcagcctgagcgaggtgcacagaaacagcaacctgagaggcatcatcaaccccttccccgccagcaagggcatcagagccttccccctgcagtgcatccacatcgccgagggccacaccaaggccgtgctgtgcgtggacagcaccgacgacctgctgttcaccggcagcaaggacagaacctgcaaggtgtggaacctggtgaccggccaggagatcatgagcctgggcggccaccccaacaacgtggtgagcgtgaagtactgcaactacaccagcctggtgttcaccgtgagcaccagctacatcaaggtgtgggacatcagagacagcgccaagtgcatcagaaccctgaccagcagcggccaggtgaccctgggcgacgcctgcagcgccagcaccagcagaaccgtggccatccccagcggcgagaaccagatcaaccagatcgccctgaaccccaccggcaccttcctgtacgccgccagcggcaacgccgtgagaatgtgggacctgaagagattccagagcaccggcaagctgaccggccacctgggccccgtgatgtgcctgaccgtggaccagatcagcagcggccaggacctgatcatcaccggcagcaaggaccactacatcaagatgttcgacgtgaccgagggcgccctgggcaccgtgagccccacccacaacttcgagcccccccactacgacggcatcgaggccctgaccatccagggcgacaacctgttcagcggcagcagagacaacggcatcaagaagtgggacctgacccagaaggacctgctgcagcaggtgcccaacgcccacaaggactgggtgtgcgccctgggcgtggtgcccgaccaccccgtgctgctgagcggctgcagaggcggcatcctgaaggtgtggaacatggacaccttcatgcccgtgggcgagatgaagggccacgacagccccatcaacgccatctgcgtgaacagcacccacatcttcaccgccgccgacgacagaaccgtgagaatctggaaggccagaaacctgcaggacggccagatcagcgacaccggcgacctgggcgaggacatcgccagcaactag

SEQ ID NO: 86241 - DNA, 4866 bp, synthetic construct
  misc_feature 1..4866: note = Description of Artificial Sequence: Synthetic coding sequence
  source 1..4866: mol_type = other DNA
atgctgggcgcccccgacgagagcagcgtgagagtggccgtgagaatcagaccccagctggccaaggagaagatcgagggctgccacatctgcaccagcgtgacccccggcgagccccaggtgttcctgggcaaggacaaggccttcaccttcgactacgtgttcgacatcgacagccagcaggagcagatctacatccagtgcatcgagaagctgatcgagggctgcttcgagggctacaacgccaccgtgttcgcctacggccagaccggcgccggcaagacctacaccatgggcaccggcttcgacgtgaacatcgtggaggaggagctgggcatcatcagcagagccgtgaagcacctgttcaagagcatcgaggagaagaagcacatcgccatcaagaacggcctgcccgcccccgacttcaaggtgaacgcccagttcctggagctgtacaacgaggaggtgctggacctgttcgacaccaccagagacatcgacgccaagagcaagaagagcaacatcagaatccacgaggacagcaccggcggcatctacaccgtgggcgtgaccaccagaaccgtgaacaccgagagcgagatgatgcagtgcctgaagctgggcgccctgagcagaaccaccgccagcacccagatgaacgtgcagagcagcagaagccacgccatcttcaccatccacgtgtgccagaccagagtgtgcccccagatcgacgccgacaacgccaccgacaacaagatcatcagcgagagcgcccagatgaacgagttcgagaccctgaccgccaagttccacttcgtggacctggccggcagcgagagactgaagagaaccggcgccaccggcgagagagccaaggagggcatcagcatcaactgcggcctgctggccctgggcaacgtgatcagcgccctgggcgacaagagcaagagagccacccacgtgccctacagagacagcaagctgaccagactgctgcaggacagcctgggcggcaacagccagaccatcatgatcgcctgcgtgagccccagcgacagagacttcatggagaccctgaacaccctgaagtacgccaacagagccagaaacatcaagaacaaggtgatggtgaaccaggacagagccagccagcagatcaacgccctgagaagcgagatcaccagactgcagatggagctgatggagtacaagaccggcaagagaatcatcgacgaggagggcgtggagagcatcaacgacatgttccacgagaacgccatgctgcagaccgagaacaacaacctgagagtgagaatcaaggccatgcaggagaccgtggacgccctgagaagcagaatcacccagctggtgagcgaccaggccaaccacgtgctggccagagccggcgagggcaacgaggagatcagcaacatgatccacagctacatcaaggagatcgaggacctgagagccaagctgctggagagcgaggccgtgaacgagaacctgagaaagaacctgaccagagccaccgccagagccccctacttcagcggcagcagcaccttcagccccaccatcctgagcagcgacaaggagaccatcgagatcatcgacctggccaagaaggacctggagaagctgaagagaaaggagaagagaaagaagaagagcgtggccggcaaggaggacaacaccgacaccgaccaggagaagaaggaggagaagggcgtgagcgagagagagaacaacgagctggaggtggaggagagccaggaggtgagcgaccacgaggacgaggaggaggaggaggaggaggaggaggacgacatcgacggcggcgagagcagcgacgagagcgacagcgagagcgacgagaaggccaactaccaggccgacctggccaacatcacctgcgagatcgccatcaagcagaagctgatcgacgagctggagaacagccagaagagactgcagaccctgaagaagcagtacgaggagaagctgatgatgctgcagcacaagatcagagacacccagctggagagagaccaggtgctgcagaacctgggcagcgtggagagctacagcgaggagaaggccaagaaggtgagaagcgagtacgagaagaagctgcaggccatgaacaaggagctgcagagactgcaggccgcccagaaggagcacgccagactgctgaagaaccagagccagtacgagaagcagctgaagaagctgcagcaggacgtgatggagatgaagaagaccaaggtgagactgatgaagcagatgaaggaggagcaggagaaggccagactgaccgagagcagaagaaacagagagatcgcccagctgaagaaggaccagagaaagagagacgtgaccgccctgagaagacaggtgagacccatgagcgacaaggtggccggcaaggtgaccagaaagctgagcagcagcgacgcccccgcccaggacaccggcagcagcgccgccgccgtggagaccgacgccagcagaaccggcgcccagcagaagatgagaatccccgtggccagagtgcaggccctgcccacccccgccaccaacggcaacagaaagaagtaccagagaaagggcctgaccggcagagtgttcatcagcaagaccgccagaatgaagtggcagctgctggagagaagagtgaccgacatcatcatgcagaagatgaccatcagcaacatggaggccgacatgaacagactgctgaagcagagagaggagctgaccaagagaagagagaagctgagcaagagaagagagaagatcgtgaaggagaacggcgagggcgacaagaacgtggccaacatcaacgaggagatggagagcctgaccgccaacatcgactacatcaacgacagcatcagcgactgccaggccaacatcatgcagatggaggaggccaaggaggagggcgagaccctggacgtgaccgccgtgatcaacgcctgcaccctgaccgaggccagatacctgctggaccacttcctgagcatgggcatcaacaagggcctgcaggccgcccagaaggaggcccagatcaaggtgctggagggcagactgaagcagaccgagatcaccagcgccacccagaaccagctgctgttccacatgctgaaggagaaggccgagctgaaccccgagctggacgccctgctgggccacgccctgcaggacctggacagcgtgcccctggagaacgtggaggacagcaccgacgaggacgcccccctgaacagccccggcagcgagggcagcaccctgagcagcgacctgatgaagctgtgcggcgaggtgaagcccaagaacaaggccagaagaagaaccaccacccagatggagctgctgtacgccgacagcagcgagctggccagcgacaccagcaccggcgacgccagcctgcccggccccctgacccccgtggccgagggccaggagatcggcatgaacaccgagaccagcggcaccagcgccagagagaaggagctgagccccccccccggcctgcccagcaagatcggcagcatcagcagacagagcagcctgagcgagaagaagatccccgagcccagccccgtgaccagaagaaaggcctacgagaaggccgagaagagcaaggccaaggagcagaagcacagcgacagcggcaccagcgaggccagcctgagcccccccagcagcccccccagcagacccagaaacgagctgaacgtgttcaacagactgaccgtgagccagggcaacaccagcgtgcagcaggacaagggcatcatcaaccccttccccgccagcaagggcatcagagccttccccctgcagtgcatccacatcgccgagggccacaccaaggccgtgctgtgcgtggacagcaccgacgacctgctgttcaccggcagcaaggacagaacctgcaaggtgtggaacctggtgaccggccaggagatcatgagcctgggcggccaccccaacaacgtggtgagcgtgaagtactgcaactacaccagcctggtgttcaccgtgagcaccagctacatcaaggtgtgggacatcagagacagcgccaagtgcatcagaaccctgaccagcagcggccaggtgaccctgggcgacgcctgcagcgccagcaccagcagaaccgtggccatccccagcggcgagaaccagatcaaccagatcgccctgaaccccaccggcaccttcctgtacgccgccagcggcaacgccgtgagaatgtgggacctgaagagattccagagcaccggcaagctgaccggccacctgggccccgtgatgtgcctgaccgtggaccagatcagcagcggccaggacctgatcatcaccggcagcaaggaccactacatcaagatgttcgacgtgaccgagggcgccctgggcaccgtgagccccacccacaacttcgagcccccccactacgacggcatcgaggccctgaccatccagggcgacaacctgttcagcggcagcagagacaacggcatcaagaagtgggacctgacccagaaggacctgctgcagcaggtgcccaacgcccacaaggactgggtgtgcgccctgggcgtggtgcccgaccaccccgtgctgctgagcggctgcagaggcggcatcctgaaggtgtggaacatggacaccttcatgcccgtgggcgagatgaagggccacgacagccccatcaacgccatctgcgtgaacagcacccacatcttcaccgccgccgacgacagaaccgtgagaatctggaaggccagaaacctgcaggacggccagatcagcgacaccggcgacctgggcgaggacatcgccagcaactag

SEQ ID NO: 86242 - DNA, 4914 bp, synthetic construct
  misc_feature 1..4914: note = Description of Artificial Sequence: Synthetic coding sequence
  source 1..4914: mol_type = other DNA
atgctgggcgcccccgacgagagcagcgtgagagtggccgtgagaatcagaccccagctggccaaggagaagatcgagggctgccacatctgcaccagcgtgacccccggcgagccccaggtgttcctgggcaaggacaaggccttcaccttcgactacgtgttcgacatcgacagccagcaggagcagatctacatccagtgcatcgagaagctgatcgagggctgcttcgagggctacaacgccaccgtgttcgcctacggccagaccggcgccggcaagacctacaccatgggcaccggcttcgacgtgaacatcgtggaggaggagctgggcatcatcagcagagccgtgaagcacctgttcaagagcatcgaggagaagaagcacatcgccatcaagaacggcctgcccgcccccgacttcaaggtgaacgcccagttcctggagctgtacaacgaggaggtgctggacctgttcgacaccaccagagacatcgacgccaagagcaagaagagcaacatcagaatccacgaggacagcaccggcggcatctacaccgtgggcgtgaccaccagaaccgtgaacaccgagagcgagatgatgcagtgcctgaagctgggcgccctgagcagaaccaccgccagcacccagatgaacgtgcagagcagcagaagccacgccatcttcaccatccacgtgtgccagaccagagtgtgcccccagatcgacgccgacaacgccaccgacaacaagatcatcagcgagagcgcccagatgaacgagttcgagaccctgaccgccaagttccacttcgtggacctggccggcagcgagagactgaagagaaccggcgccaccggcgagagagccaaggagggcatcagcatcaactgcggcctgctggccctgggcaacgtgatcagcgccctgggcgacaagagcaagagagccacccacgtgccctacagagacagcaagctgaccagactgctgcaggacagcctgggcggcaacagccagaccatcatgatcgcctgcgtgagccccagcgacagagacttcatggagaccctgaacaccctgaagtacgccaacagagccagaaacatcaagaacaaggtgatggtgaaccaggacagagccagccagcagatcaacgccctgagaagcgagatcaccagactgcagatggagctgatggagtacaagaccggcaagagaatcatcgacgaggagggcgtggagagcatcaacgacatgttccacgagaacgccatgctgcagaccgagaacaacaacctgagagtgagaatcaaggccatgcaggagaccgtggacgccctgagaagcagaatcacccagctggtgagcgaccaggccaaccacgtgctggccagagccggcgagggcaacgaggagatcagcaacatgatccacagctacatcaaggagatcgaggacctgagagccaagctgctggagagcgaggccgtgaacgagaacctgagaaagaacctgaccagagccaccgccagagccccctacttcagcggcagcagcaccttcagccccaccatcctgagcagcgacaaggagaccatcgagatcatcgacctggccaagaaggacctggagaagctgaagagaaaggagaagagaaagaagaagagcgtggccggcaaggaggacaacaccgacaccgaccaggagaagaaggaggagaagggcgtgagcgagagagagaacaacgagctggaggtggaggagagccaggaggtgagcgaccacgaggacgaggaggaggaggaggaggaggaggaggacgacatcgacggcggcgagagcagcgacgagagcgacagcgagagcgacgagaaggccaactaccaggccgacctggccaacatcacctgcgagatcgccatcaagcagaagctgatcgacgagctggagaacagccagaagagactgcagaccctgaagaagcagtacgaggagaagctgatgatgctgcagcacaagatcagagacacccagctggagagagaccaggtgctgcagaacctgggcagcgtggagagctacagcgaggagaaggccaagaaggtgagaagcgagtacgagaagaagctgcaggccatgaacaaggagctgcagagactgcaggccgcccagaaggagcacgccagactgctgaagaaccagagccagtacgagaagcagctgaagaagctgcagcaggacgtgatggagatgaagaagaccaaggtgagactgatgaagcagatgaaggaggagcaggagaaggccagactgaccgagagcagaagaaacagagagatcgcccagctgaagaaggaccagagaaagagagaccaccagctgagactgctggaggcccagaagagaaaccaggaggtggtgctgagaagaaagaccgaggaggtgaccgccctgagaagacaggtgagacccatgagcgacaaggtggccggcaaggtgaccagaaagctgagcagcagcgacgcccccgcccaggacaccggcagcagcgccgccgccgtggagaccgacgccagcagaaccggcgcccagcagaagatgagaatccccgtggccagagtgcaggccctgcccacccccgccaccaacggcaacagaaagaagtaccagagaaagggcctgaccggcagagtgttcatcagcaagaccgccagaatgaagtggcagctgctggagagaagagtgaccgacatcatcatgcagaagatgaccatcagcaacatggaggccgacatgaacagactgctgaagcagagagaggagctgaccaagagaagagagaagctgagcaagagaagagagaagatcgtgaaggagaacggcgagggcgacaagaacgtggccaacatcaacgaggagatggagagcctgaccgccaacatcgactacatcaacgacagcatcagcgactgccaggccaacatcatgcagatggaggaggccaaggaggagggcgagaccctggacgtgaccgccgtgatcaacgcctgcaccctgaccgaggccagatacctgctggaccacttcctgagcatgggcatcaacaagggcctgcaggccgcccagaaggaggcccagatcaaggtgctggagggcagactgaagcagaccgagatcaccagcgccacccagaaccagctgctgttccacatgctgaaggagaaggccgagctgaaccccgagctggacgccctgctgggccacgccctgcaggagaacgtggaggacagcaccgacgaggacgcccccctgaacagccccggcagcgagggcagcaccctgagcagcgacctgatgaagctgtgcggcgaggtgaagcccaagaacaaggccagaagaagaaccaccacccagatggagctgctgtacgccgacagcagcgagctggccagcgacaccagcaccggcgacgccagcctgcccggccccctgacccccgtggccgagggccaggagatcggcatgaacaccgagaccagcggcaccagcgccagagagaaggagctgagccccccccccggcctgcccagcaagatcggcagcatcagcagacagagcagcctgagcgagaagaagatccccgagcccagccccgtgaccagaagaaaggcctacgagaaggccgagaagagcaaggccaaggagcagaagcacagcgacagcggcaccagcgaggccagcctgagcccccccagcagcccccccagcagacccagaaacgagctgaacgtgttcaacagactgaccgtgagccagggcaacaccagcgtgcagcaggacaagggcatcatcaaccccttccccgccagcaagggcatcagagccttccccctgcagtgcatccacatcgccgagggccacaccaaggccgtgctgtgcgtggacagcaccgacgacctgctgttcaccggcagcaaggacagaacctgcaaggtgtggaacctggtgaccggccaggagatcatgagcctgggcggccaccccaacaacgtggtgagcgtgaagtactgcaactacaccagcctggtgttcaccgtgagcaccagctacatcaaggtgtgggacatcagagacagcgccaagtgcatcagaaccctgaccagcagcggccaggtgaccctgggcgacgcctgcagcgccagcaccagcagaaccgtggccatccccagcggcgagaaccagatcaaccagatcgccctgaaccccaccggcaccttcctgtacgccgccagcggcaacgccgtgagaatgtgggacctgaagagattccagagcaccggcaagctgaccggccacctgggccccgtgatgtgcctgaccgtggaccagatcagcagcggccaggacctgatcatcaccggcagcaaggaccactacatcaagatgttcgacgtgaccgagggcgccctgggcaccgtgagccccacccacaacttcgagcccccccactacgacggcatcgaggccctgaccatccagggcgacaacctgttcagcggcagcagagacaacggcatcaagaagtgggacctgacccagaaggacctgctgcagcaggtgcccaacgcccacaaggactgggtgtgcgccctgggcgtggtgcccgaccaccccgtgctgctgagcggctgcagaggcggcatcctgaaggtgtggaacatggacaccttcatgcccgtgggcgagatgaagggccacgacagccccatcaacgccatctgcgtgaacagcacccacatcttcaccgccgccgacgacagaaccgtgagaatctggaaggccagaaacctgcaggacggccagatcagcgacaccggcgacctgggcgaggacatcgccagcaactag

SEQ ID NO: 86243 - DNA, 1986 bp, synthetic construct
  misc_feature 1..1986: note = Description of Artificial Sequence: Synthetic coding sequence
  source 1..1986: mol_type = other DNA
atgaacagactgctgaagcagagagaggagctgaccaagagaagagagaagctgagcaagagaagagagaagatcgtgaaggagaacggcgagggcgacaagaacgtggccaacatcaacgaggagatggagagcctgaccgccaacatcgactacatcaacgacagcatcagcgactgccaggccaacatcatgcagatggaggaggccaaggaggagggcgagaccctggacgtgaccgccgtgatcaacgcctgcaccctgaccgaggccagatacctgctggaccacttcctgagcatgggcatcaacaagggcctgcaggccgcccagaaggaggcccagatcaaggtgctggagggcagactgaagcagaccgagatcaccagcgccacccagaaccagctgctgttccacatgctgaaggagaaggccgagctgaaccccgagctggacgccctgctgggccacgccctgcaggagaacgtggaggacagcaccgacgaggacgcccccctgaacagccccggcagcgagggcagcaccctgagcagcgacctgatgaagctgtgcggcgaggtgaagcccaagaacaaggccagaagaagaaccaccacccagatggagctgctgtacgccgacagcagcgagctggccagcgacaccagcaccggcgacgccagcctgcccggccccctgacccccgtggccgagggccaggagatcggcatgaacaccgagaccagcggcaccagcgccagagagaaggagctgagccccccccccggcctgcccagcaagatcggcagcatcagcagacagagcagcctgagcgagaagaagatccccgagcccagccccgtgaccagaagaaaggcctacgagaaggccgagaagagcaaggccaaggagcagaagcagggcatcatcaaccccttccccgccagcaagggcatcagagccttccccctgcagtgcatccacatcgccgagggccacaccaaggccgtgctgtgcgtggacagcaccgacgacctgctgttcaccggcagcaaggacagaacctgcaaggtgtggaacctggtgaccggccaggagatcatgagcctgggcggccaccccaacaacgtggtgagcgtgaagtactgcaactacaccagcctggtgttcaccgtgagcaccagctacatcaaggtgtgggacatcagagacagcgccaagtgcatcagaaccctgaccagcagcggccaggtgaccctgggcgacgcctgcagcgccagcaccagcagaaccgtggccatccccagcggcgagaaccagatcaaccagatcgccctgaaccccaccggcaccttcctgtacgccgccagcggcaacgccgtgagaatgtgggacctgaagagattccagagcaccggcaagctgaccggccacctgggccccgtgatgtgcctgaccgtggaccagatcagcagcggccaggacctgatcatcaccggcagcaaggaccactacatcaagatgttcgacgtgaccgagggcgccctgggcaccgtgagccccacccacaacttcgagcccccccactacgacggcatcgaggccctgaccatccagggcgacaacctgttcagcggcagcagagacaacggcatcaagaagtgggacctgacccagaaggacctgctgcagcaggtgcccaacgcccacaaggactgggtgtgcgccctgggcgtggtgcccgaccaccccgtgctgctgagcggctgcagaggcggcatcctgaaggtgtggaacatggacaccttcatgcccgtgggcgagatgaagggccacgacagccccatcaacgccatctgcgtgaacagcacccacatcttcaccgccgccgacgacagaaccgtgagaatctggaaggccagaaacctgcaggacggccagatcagcgacaccggcgacctgggcgaggacatcgccagcaactag

SEQ ID NO: 86244 - DNA, 4875 bp, synthetic construct
  misc_feature 1..4875: note = Description of Artificial Sequence: Synthetic coding sequence
  source 1..4875: mol_type = other DNA
atggccggccagggcgactgctgcgtgaaggtggccgtgagaatcagaccccagctgagcaaggagaagatcgagggctgccacatctgcaccagcgtgacccccggcgagccccaggtgctgctgggcaaggacaaggccttcacctacgacttcgtgttcgacctggacacctggcaggagcagatctacagcacctgcgtgagcaagctgatcgagggctgcttcgagggctacaacgccaccgtgctggcctacggccagaccggcgccggcaagacctacaccatgggcaccggcttcgacatggccaccagcgaggaggagcagggcatcatccccagagccatcgcccacctgttcggcggcatcgccgagagaaagagaagagcccaggagcagggcgtggccggccccgagttcaaggtgagcgcccagttcctggagctgtacaacgaggagatcctggacctgttcgacagcaccagagaccccgacaccagacacagaagaagcaacatcaagatccacgaggacgccaacggcggcatctacaccaccggcgtgaccagcagactgatccacagccaggaggagctgatccagtgcctgaagcagggcgccctgagcagaaccaccgccagcacccagatgaacgtgcagagcagcagaagccacgccatcttcaccatccacctgtgccagatgagaatgtgcacccagcccgacctggtgaacgaggccgtgaccggcctgcccgacggcaccccccccagcagcgagtacgagaccctgaccgccaagttccacttcgtggacctggccggcagcgagagactgaagagaaccggcgccaccggcgagagagccaaggagggcatcagcatcaactgcggcctgctggccctgggcaacgtgatcagcgccctgggcgaccagagcaagaaggtggtgcacgtgccctacagagacagcaagctgaccagactgctgcaggacagcctgggcggcaacagccagaccatcatgatcgcctgcgtgagccccagcgacagagacttcatggagaccctgaacaccctgaagtacgccaacagagccagaaacatcaagaacaaggtggtggtgaaccaggacaagaccagccagcagatcagcgccctgagagccgagatcgccagactgcagatggagctgatggagtacaaggccggcaagagagtgatcggcgaggacggcgccgagggctacagcgacctgttcagagagaacgccatgctgcagaaggagaacggcgccctgagactgagagtgaaggccatgcaggaggccatcgacgccatcaacaacagagtgacccagctgatgagccaggaggccaacctgctgctggccaaggccggcgacggcaacgaggccatcggcgccctgatccagaactacatcagagagatcgaggagctgagaaccaagctgctggagagcgaggccatgaacgagagcctgagaagaagcctgagcagagccagcgccagaagcccctacagcctgggcgccagccccgccgcccccgccttcggcggcagccccgccagcagcatggaggacgccagcgaggtgatcagaagagccaagcaggacctggagagactgaagaagaaggaggtgagacagagaagaaagagccccgagaaggaggccttcaagaagagagccaagctgcagcaggagaacagcgaggagaccgacgagaacgaggccgaggaggaggaggaggagagagacgagagcggctgcgaggaggaggagggcagagaggacgaggacgaggacagcggcagcgaggagagcctggtggacagcgacagcgaccccgaggagaaggaggtgaacttccaggccgacctggccgacctgacctgcgagatcgagatcaagcagaagctgatcgacgagctggagaacagccagagaagactgcagaccctgaagcaccagtacgaggagaagctgatcctgctgcagaacaagatcagagacacccagctggagagagacagagtgctgcagaacctgagcaccatggagtgctacaccgaggagaaggccaacaagatcaaggccgactacgagaagagactgagagagatgaacagagacctgcagaagctgcaggccgcccagaaggagcacgccagactgctgaagaaccagagcagatacgagagagagctgaagaagctgcaggccgaggtggccgagatgaagaaggccaaggtggccctgatgaagcagatgagagaggagcagcagagaagaagactggtggagaccaagagaaacagagagatcgcccagctgaagaaggagcagagaagacaggagttccagatcagagccctggagagccagaagagacagcaggagatggtgctgagaagaaagacccaggaggtgagcgccctgagaagactggccaagcccatgagcgagagagtggccggcagagccggcctgaagccccccatgctggacagcggcgccgaggtgagcgccagcaccaccagcagcgaggccgagagcggcgccagaagcgtgagcagcatcgtgagacagtggaacagaaagatcaaccacttcctgggcgaccaccccgcccccaccgtgaacggcaccagacccgccagaaagaagttccagaagaagggcgccagccagagcttcagcaaggccgccagactgaagtggcagagcctggagagaagaatcatcgacatcgtgatgcagagaatgaccatcgtgaacctggaggccgacatggagagactgatcaagaagagagaggagctgttcctgctgcaggaggccctgagaagaaagagagagagactgcaggccgagagccccgaggaggagaagggcctgcaggagctggccgaggagatcgaggtgctggccgccaacatcgactacatcaacgacggcatcaccgactgccaggccaccatcgtgcagctggaggagaccaaggaggagctggacagcaccgacaccagcgtggtgatcagcagctgcagcctggccgaggccagactgctgctggacaacttcctgaaggccagcatcgacaagggcctgcaggtggcccagaaggaggcccagatcagactgctggagggcagactgagacagaccgacatggccggcagcagccagaaccacctgctgctggacgccctgagagagaaggccgaggcccaccccgagctgcaggccctgatctacaacgtgcagcaggagaacggctacgccagcaccgacgaggagatcagcgagttcagcgagggcagcttcagccagagcttcaccatgaagggcagcaccagccacgacgacttcaagttcaagagcgagcccaagctgagcgcccagatgaaggccgtgagcgccgagtgcctgggcccccccctggacatcagcaccaagaacatcaccaagagcctggccagcctggtggagatcaaggaggacggcgtgggcttcagcgtgagagacccctactacagagacagagtgagcagaaccgtgagcctgcccaccagaggcagcaccttccccagacagagcagagccaccgagaccagccccctgaccagaagaaagagctacgacagaggccagcccatcagaagcaccgacgtgggcttcaccccccccagcagcccccccaccagacccagaaacgacagaaacgtgttcagcagactgaccagcaaccagagccagggcagcgccctggacaagggcatcatcagccccgtgggcggcgccaagggcgccagaaccgcccccctgcagtgcgtgagcatggccgagggccacaccaagcccatcctgtgcctggacgccaccgacgagctgctgttcaccggcagcaaggacagaagctgcaagatgtggaacctggtgaccggccaggagatcgccgccctgaagggccaccccaacaacgtggtgagcatcaagtactgcagccacagcggcctggtgttcagcgtgagcaccagctacatcaaggtgtgggacatcagagacagcgccaagtgcatcagaaccctgaccagcagcggccaggtgatcagcggcgacgcctgcgccgccaccagcaccagagccatcaccagcgcccagggcgagcaccagatcaaccagatcgccctgagccccagcggcaccatgctgtacgccgccagcggcaacgccgtgagaatctgggagctgagcagattccagcccgtgggcaagctgaccggccacatcggccccgtgatgtgcctgaccgtgacccagaccgccagccagcacgacctggtggtgaccggcagcaaggaccactacgtgaagatgttcgagctgggcgagtgcgtgaccggcaccatcggccccacccacaacttcgagcccccccactacgacggcatcgagtgcctggccatccagggcgacatcctgttcagcggcagcagagacaacggcatcaagaagtgggacctggaccagcaggagctgatccagcagatccccaacgcccacaaggactgggtgtgcgccctggccttcatccccggcagacccatgctgctgagcgcctgcagagccggcgtgatcaaggtgtggaacgtggacaacttcacccccatcggcgagatcaagggccacgacagccccatcaacgccatctgcaccaacgccaagcacatcttcaccgccagcagcgactgcagagtgaagctgtggaactacgtgcccggcctgaccccctgcctgcccagaagagtgctggccatcaagggcagagccaccaccctgccctag

SEQ ID NO: 86245 - DNA, 4833 bp, synthetic construct
  misc_feature 1..4833: note = Description of Artificial Sequence: Synthetic coding sequence
  source 1..4833: mol_type = other DNA
atggccggccagggcgactgctgcgtgaaggtggccgtgagaatcagaccccagctgagcaaggagaagatcgagggctgccacatctgcaccagcgtgacccccggcgagccccaggtgctgctgggcaaggacaaggccttcacctacgacttcgtgttcgacctggacacctggcaggagcagatctacagcacctgcgtgagcaagctgatcgagggctgcttcgagggctacaacgccaccgtgctggcctacggccagaccggcgccggcaagacctacaccatgggcaccggcttcgacatggccaccagcgaggaggagcagggcatcatccccagagccatcgcccacctgttcggcggcatcgccgagagaaagagaagagcccaggagcagggcgtggccggccccgagttcaaggtgagcgcccagttcctggagctgtacaacgaggagatcctggacctgttcgacagcaccagagaccccgacaccagacacagaagaagcaacatcaagatccacgaggacgccaacggcggcatctacaccaccggcgtgaccagcagactgatccacagccaggaggagctgatccagtgcctgaagcagggcgccctgagcagaaccaccgccagcacccagatgaacgtgcagagcagcagaagccacgccatcttcaccatccacctgtgccagatgagaatgtgcacccagcccgacctggtgaacgaggccgtgaccggcctgcccgacggcaccccccccagcagcgagtacgagaccctgaccgccaagttccacttcgtggacctggccggcagcgagagactgaagagaaccggcgccaccggcgagagagccaaggagggcatcagcatcaactgcggcctgctggccctgggcaacgtgatcagcgccctgggcgaccagagcaagaaggtggtgcacgtgccctacagagacagcaagctgaccagactgctgcaggacagcctgggcggcaacagccagaccatcatgatcgcctgcgtgagccccagcgacagagacttcatggagaccctgaacaccctgaagtacgccaacagagccagaaacatcaagaacaaggtggtggtgaaccaggacaagaccagccagcagatcagcgccctgagagccgagatcgccagactgcagatggagctgatggagtacaaggccggcaagagagtgatcggcgaggacggcgccgagggctacagcgacctgttcagagagaacgccatgctgcagaaggagaacggcgccctgagactgagagtgaaggccatgcaggaggccatcgacgccatcaacaacagagtgacccagctgatgagccaggaggccaacctgctgctggccaaggccggcgacggcaacgaggccatcggcgccctgatccagaactacatcagagagatcgaggagctgagaaccaagctgctggagagcgaggccatgaacgagagcctgagaagaagcctgagcagagccagcgccagaagcccctacagcctgggcgccagccccgccgcccccgccttcggcggcagccccgccagcagcatggaggacgccagcgaggtgatcagaagagccaagcaggacctggagagactgaagaagaaggaggtgagacagagaagaaagagccccgagaaggaggccttcaagaagagagccaagctgcagcaggagaacagcgaggagaccgacgagaacgaggccgaggaggaggaggaggagagagacgagagcggctgcgaggaggaggagggcagagaggacgaggacgaggacagcggcagcgaggagagcctggtggacagcgacagcgaccccgaggagaaggaggtgaacttccaggccgacctggccgacctgacctgcgagatcgagatcaagcagaagctgatcgacgagctggagaacagccagagaagactgcagaccctgaagcaccagtacgaggagaagctgatcctgctgcagaacaagatcagagacacccagctggagagagacagagtgctgcagaacctgagcaccatggagtgctacaccgaggagaaggccaacaagatcaaggccgactacgagaagagactgagagagatgaacagagacctgcagaagctgcaggccgcccagaaggagcacgccagactgctgaagaaccagagcagatacgagagagagctgaagaagctgcaggccgaggtggccgagatgaagaaggccaaggtggccctgatgaagcagatgagagaggagcagcagagaagaagactggtggagaccaagagaaacagagagatcgcccagctgaagaaggagcagagaagacaggagttccagatcagagccctggagagccagaagagacagcaggagatggtgctgagaagaaagacccaggaggtgagcgccctgagaagactggccaagcccatgagcgagagagtggccggcagagccggcctgaagccccccatgctggacagcggcgccgaggtgagcgccagcaccaccagcagcgaggccgagagcggcgccagaagcgtgagcagcatcgtgagacagtggaacagaaagatcaaccacttcctgggcgaccaccccgcccccaccgtgaacggcaccagacccgccagaaagaagttccagaagaagggcgccagccagagcttcagcaaggccgccagactgaagtggcagagcctggagagaagaatcatcgacatcgtgatgcagagaatgaccatcgtgaacctggaggccgacatggagagactgatcaagaagagagaggagctgttcctgctgcaggaggccctgagaagaaagagagagagactgcaggccgagagccccgaggaggagaagggcctgcaggagctggccgaggagatcgaggtgctggccgccaacatcgactacatcaacgacggcatcaccgactgccaggccaccatcgtgcagctggaggagaccaaggaggagctggacagcaccgacaccagcgtggtgatcagcagctgcagcctggccgaggccagactgctgctggacaacttcctgaaggccagcatcgacaagggcctgcaggtggcccagaaggaggcccagatcagactgctggagggcagactgagacagaccgacatggccggcagcagccagaaccacctgctgctggacgccctgagagagaaggccgaggcccaccccgagctgcaggccctgatctacaacgtgcagcaggagaacggctacgccagcaccgacgaggagatcagcgagttcagcgagggcagcttcagccagagcttcaccatgaagggcagcaccagccacgacgacttcaagttcaagagcgagcccaagctgagcgcccagatgaaggccgtgagcgccgagtgcctgggcccccccctggacatcagcaccaagaacatcaccaagagcctggccagcctggtggagatcaaggaggacggcgtgggcttcagcgtgagagacccctactacagagacagagtgagcagaaccgtgagcctgcccaccagaggcagcaccttccccagacagagcagagccaccgagaccagccccctgaccagaagaaagagctacgacagaggccagcccatcagaagcaccgacgtgggcttcaccccccccagcagcccccccaccagacccagaaacgacagaaacgtgttcagcagactgaccagcaaccagagccagggcagcgccctggacaagggcatcatcagccccgtgggcggcgccaagggcgccagaaccgcccccctgcagtgcgtgagcatggccgagggccacaccaagcccatcctgtgcctggacgccaccgacgagctgctgttcaccggcagcaaggacagaagctgcaagatgtggaacctggtgaccggccaggagatcgccgccctgaagggccaccccaacaacgtggtgagcatcaagtactgcagccacagcggcctggtgttcagcgtgagcaccagctacatcaaggtgtgggacatcagagacagcgccaagtgcatcagaaccctgaccagcagcggccaggtgatcagcggcgacgcctgcgccgccaccagcaccagagccatcaccagcgcccagggcgagcaccagatcaaccagatcgccctgagccccagcggcaccatgctgtacgccgccagcggcaacgccgtgagaatctgggagctgagcagattccagcccgtgggcaagctgaccggccacatcggccccgtgatgtgcctgaccgtgacccagaccgccagccagcacgacctggtggtgaccggcagcaaggaccactacgtgaagatgttcgagctgggcgagtgcgtgaccggcaccatcggccccacccacaacttcgagcccccccactacgacggcatcgagtgcctggccatccagggcgacatcctgttcagcggcagcagagacaacggcatcaagaagtgggacctggaccagcaggagctgatccagcagatccccaacgcccacaaggactgggtgtgcgccctggccttcatccccggcagacccatgctgctgagcgcctgcagagccggcgtgatcaaggtgtggaacgtggacaacttcacccccatcggcgagatcaagggccacgacagccccatcaacgccatctgcaccaacgccaagcacatcttcaccgccagcagcgacctgaccgtgaagttctggagcgtgagaagactgccccacagcggccccccctag

SEQ ID NO: 86246 - DNA, 4914 bp, synthetic construct
  misc_feature 1..4914: note = Description of Artificial Sequence: Synthetic coding sequence
  source 1..4914: mol_type = other DNA
atggccggccagggcgactgctgcgtgaaggtggccgtgagaatcagaccccagctgagcaaggagaagatcgagggctgccacatctgcaccagcgtgacccccggcgagccccaggtgctgctgggcaaggacaaggccttcacctacgacttcgtgttcgacctggacacctggcaggagcagatctacagcacctgcgtgagcaagctgatcgagggctgcttcgagggctacaacgccaccgtgctggcctacggccagaccggcgccggcaagacctacaccatgggcaccggcttcgacatggccaccagcgaggaggagcagggcatcatccccagagccatcgcccacctgttcggcggcatcgccgagagaaagagaagagcccaggagcagggcgtggccggccccgagttcaaggtgagcgcccagttcctggagctgtacaacgaggagatcctggacctgttcgacagcaccagagaccccgacaccagacacagaagaagcaacatcaagatccacgaggacgccaacggcggcatctacaccaccggcgtgaccagcagactgatccacagccaggaggagctgatccagtgcctgaagcagggcgccctgagcagaaccaccgccagcacccagatgaacgtgcagagcagcagaagccacgccatcttcaccatccacctgtgccagatgagaatgtgcacccagcccgacctggtgaacgaggccgtgaccggcctgcccgacggcaccccccccagcagcgagtacgagaccctgaccgccaagttccacttcgtggacctggccggcagcgagagactgaagagaaccggcgccaccggcgagagagccaaggagggcatcagcatcaactgcggcctgctggccctgggcaacgtgatcagcgccctgggcgaccagagcaagaaggtggtgcacgtgccctacagagacagcaagctgaccagactgctgcaggacagcctgggcggcaacagccagaccatcatgatcgcctgcgtgagccccagcgacagagacttcatggagaccctgaacaccctgaagtacgccaacagagccagaaacatcaagaacaaggtggtggtgaaccaggacaagaccagccagcagatcagcgccctgagagccgagatcgccagactgcagatggagctgatggagtacaaggccggcaagagagtgatcggcgaggacggcgccgagggctacagcgacctgttcagagagaacgccatgctgcagaaggagaacggcgccctgagactgagagtgaaggccatgcaggaggccatcgacgccatcaacaacagagtgacccagctgatgagccaggaggccaacctgctgctggccaaggccggcgacggcaacgaggccatcggcgccctgatccagaactacatcagagagatcgaggagctgagaaccaagctgctggagagcgaggccatgaacgagagcctgagaagaagcctgagcagagccagcgccagaagcccctacagcctgggcgccagccccgccgcccccgccttcggcggcagccccgccagcagcatggaggacgccagcgaggtgatcagaagagccaagcaggacctggagagactgaagaagaaggaggtgagacagagaagaaagagccccgagaaggaggccttcaagaagagagccaagctgcagcaggagaacagcgaggagaccgacgagaacgaggccgaggaggaggaggaggagagagacgagagcggctgcgaggaggaggagggcagagaggacgaggacgaggacagcggcagcgaggagagcctggtggacagcgacagcgaccccgaggagaaggaggtgaacttccaggccgacctggccgacctgacctgcgagatcgagatcaagcagaagctgatcgacgagctggagaacagccagagaagactgcagaccctgaagcaccagtacgaggagaagctgatcctgctgcagaacaagatcagagacacccagctggagagagacagagtgctgcagaacctgagcaccatggagtgctacaccgaggagaaggccaacaagatcaaggccgactacgagaagagactgagagagatgaacagagacctgcagaagctgcaggccgcccagaaggagcacgccagactgctgaagaaccagagcagatacgagagagagctgaagaagctgcaggccgaggtggccgagatgaagaaggccaaggtggccctgatgaagcagatgagagaggagcagcagagaagaagactggtggagaccaagagaaacagagagatcgcccagctgaagaaggagcagagaagacaggagttccagatcagagccctggagagccagaagagacagcaggagatggtgctgagaagaaagacccaggaggtgagcgccctgagaagactggccaagcccatgagcgagagagtggccggcagagccggcctgaagccccccatgctggacagcggcgccgaggtgagcgccagcaccaccagcagcgaggccgagagcggcgccagaagcgtgagcagcatcgtgagacagtggaacagaaagatcaaccacttcctgggcgaccaccccgcccccaccgtgaacggcaccagacccgccagaaagaagttccagaagaagggcgccagccagagcttcagcaaggccgccagactgaagtggcagagcctggagagaagaatcatcgacatcgtgatgcagagaatgaccatcgtgaacctggaggccgacatggagagactgatcaagaagagagaggagctgttcctgctgcaggaggccctgagaagaaagagagagagactgcaggccgagagccccgaggaggagaagggcctgcaggagctggccgaggagatcgaggtgctggccgccaacatcgactacatcaacgacggcatcaccgactgccaggccaccatcgtgcagctggaggagaccaaggaggagctggacagcaccgacaccagcgtggtgatcagcagctgcagcctggccgaggccagactgctgctggacaacttcctgaaggccagcatcgacaagggcctgcaggtggcccagaaggaggcccagatcagactgctggagggcagactgagacagaccgacatggccggcagcagccagaaccacctgctgctggacgccctgagagagaaggccgaggcccaccccgagctgcaggccctgatctacaacgtgcagcaggagaacggctacgccagcaccgacgaggagatcagcgagttcagcgagggcagcttcagccagagcttcaccatgaagggcagcaccagccacgacgacttcaagttcaagagcgagcccaagctgagcgcccagatgaaggccgtgagcgccgagtgcctgggcccccccctggacatcagcaccaagaacatcaccaagagcctggccagcctggtggagatcaaggaggacggcgtgggcttcagcgtgagagacccctactacagagacagagtgagcagaaccgtgagcctgcccaccagaggcagcaccttccccagacagagcagagccaccgagaccagccccctgaccagaagaaagagctacgacagaggccagcccatcagaagcaccgacgtgggcttcaccccccccagcagcccccccaccagacccagaaacgacagaaacgtgttcagcagactgaccagcaaccagagccagggcagcgccctggacaagagcgacgacagcgacagcagcctgagcgaggtgctgagaggcatcatcagccccgtgggcggcgccaagggcgccagaaccgcccccctgcagtgcgtgagcatggccgagggccacaccaagcccatcctgtgcctggacgccaccgacgagctgctgttcaccggcagcaaggacagaagctgcaagatgtggaacctggtgaccggccaggagatcgccgccctgaagggccaccccaacaacgtggtgagcatcaagtactgcagccacagcggcctggtgttcagcgtgagcaccagctacatcaaggtgtgggacatcagagacagcgccaagtgcatcagaaccctgaccagcagcggccaggtgatcagcggcgacgcctgcgccgccaccagcaccagagccatcaccagcgcccagggcgagcaccagatcaaccagatcgccctgagccccagcggcaccatgctgtacgccgccagcggcaacgccgtgagaatctgggagctgagcagattccagcccgtgggcaagctgaccggccacatcggccccgtgatgtgcctgaccgtgacccagaccgccagccagcacgacctggtggtgaccggcagcaaggaccactacgtgaagatgttcgagctgggcgagtgcgtgaccggcaccatcggccccacccacaacttcgagcccccccactacgacggcatcgagtgcctggccatccagggcgacatcctgttcagcggcagcagagacaacggcatcaagaagtgggacctggaccagcaggagctgatccagcagatccccaacgcccacaaggactgggtgtgcgccctggccttcatccccggcagacccatgctgctgagcgcctgcagagccggcgtgatcaaggtgtggaacgtggacaacttcacccccatcggcgagatcaagggccacgacagccccatcaacgccatctgcaccaacgccaagcacatcttcaccgccagcagcgactgcagagtgaagctgtggaactacgtgcccggcctgaccccctgcctgcccagaagagtgctggccatcaagggcagagccaccaccctgccctag

SEQ ID NO: 86247 - DNA, 4872 bp, synthetic construct
  misc_feature 1..4872: note = Description of Artificial Sequence: Synthetic coding sequence
  source 1..4872: mol_type = other DNA
atggccggccagggcgactgctgcgtgaaggtggccgtgagaatcagaccccagctgagcaaggagaagatcgagggctgccacatctgcaccagcgtgacccccggcgagccccaggtgctgctgggcaaggacaaggccttcacctacgacttcgtgttcgacctggacacctggcaggagcagatctacagcacctgcgtgagcaagctgatcgagggctgcttcgagggctacaacgccaccgtgctggcctacggccagaccggcgccggcaagacctacaccatgggcaccggcttcgacatggccaccagcgaggaggagcagggcatcatccccagagccatcgcccacctgttcggcggcatcgccgagagaaagagaagagcccaggagcagggcgtggccggccccgagttcaaggtgagcgcccagttcctggagctgtacaacgaggagatcctggacctgttcgacagcaccagagaccccgacaccagacacagaagaagcaacatcaagatccacgaggacgccaacggcggcatctacaccaccggcgtgaccagcagactgatccacagccaggaggagctgatccagtgcctgaagcagggcgccctgagcagaaccaccgccagcacccagatgaacgtgcagagcagcagaagccacgccatcttcaccatccacctgtgccagatgagaatgtgcacccagcccgacctggtgaacgaggccgtgaccggcctgcccgacggcaccccccccagcagcgagtacgagaccctgaccgccaagttccacttcgtggacctggccggcagcgagagactgaagagaaccggcgccaccggcgagagagccaaggagggcatcagcatcaactgcggcctgctggccctgggcaacgtgatcagcgccctgggcgaccagagcaagaaggtggtgcacgtgccctacagagacagcaagctgaccagactgctgcaggacagcctgggcggcaacagccagaccatcatgatcgcctgcgtgagccccagcgacagagacttcatggagaccctgaacaccctgaagtacgccaacagagccagaaacatcaagaacaaggtggtggtgaaccaggacaagaccagccagcagatcagcgccctgagagccgagatcgccagactgcagatggagctgatggagtacaaggccggcaagagagtgatcggcgaggacggcgccgagggctacagcgacctgttcagagagaacgccatgctgcagaaggagaacggcgccctgagactgagagtgaaggccatgcaggaggccatcgacgccatcaacaacagagtgacccagctgatgagccaggaggccaacctgctgctggccaaggccggcgacggcaacgaggccatcggcgccctgatccagaactacatcagagagatcgaggagctgagaaccaagctgctggagagcgaggccatgaacgagagcctgagaagaagcctgagcagagccagcgccagaagcccctacagcctgggcgccagccccgccgcccccgccttcggcggcagccccgccagcagcatggaggacgccagcgaggtgatcagaagagccaagcaggacctggagagactgaagaagaaggaggtgagacagagaagaaagagccccgagaaggaggccttcaagaagagagccaagctgcagcaggagaacagcgaggagaccgacgagaacgaggccgaggaggaggaggaggagagagacgagagcggctgcgaggaggaggagggcagagaggacgaggacgaggacagcggcagcgaggagagcctggtggacagcgacagcgaccccgaggagaaggaggtgaacttccaggccgacctggccgacctgacctgcgagatcgagatcaagcagaagctgatcgacgagctggagaacagccagagaagactgcagaccctgaagcaccagtacgaggagaagctgatcctgctgcagaacaagatcagagacacccagctggagagagacagagtgctgcagaacctgagcaccatggagtgctacaccgaggagaaggccaacaagatcaaggccgactacgagaagagactgagagagatgaacagagacctgcagaagctgcaggccgcccagaaggagcacgccagactgctgaagaaccagagcagatacgagagagagctgaagaagctgcaggccgaggtggccgagatgaagaaggccaaggtggccctgatgaagcagatgagagaggagcagcagagaagaagactggtggagaccaagagaaacagagagatcgcccagctgaagaaggagcagagaagacaggagttccagatcagagccctggagagccagaagagacagcaggagatggtgctgagaagaaagacccaggaggtgagcgccctgagaagactggccaagcccatgagcgagagagtggccggcagagccggcctgaagccccccatgctggacagcggcgccgaggtgagcgccagcaccaccagcagcgaggccgagagcggcgccagaagcgtgagcagcatcgtgagacagtggaacagaaagatcaaccacttcctgggcgaccaccccgcccccaccgtgaacggcaccagacccgccagaaagaagttccagaagaagggcgccagccagagcttcagcaaggccgccagactgaagtggcagagcctggagagaagaatcatcgacatcgtgatgcagagaatgaccatcgtgaacctggaggccgacatggagagactgatcaagaagagagaggagctgttcctgctgcaggaggccctgagaagaaagagagagagactgcaggccgagagccccgaggaggagaagggcctgcaggagctggccgaggagatcgaggtgctggccgccaacatcgactacatcaacgacggcatcaccgactgccaggccaccatcgtgcagctggaggagaccaaggaggagctggacagcaccgacaccagcgtggtgatcagcagctgcagcctggccgaggccagactgctgctggacaacttcctgaaggccagcatcgacaagggcctgcaggtggcccagaaggaggcccagatcagactgctggagggcagactgagacagaccgacatggccggcagcagccagaaccacctgctgctggacgccctgagagagaaggccgaggcccaccccgagctgcaggccctgatctacaacgtgcagcaggagaacggctacgccagcaccgacgaggagatcagcgagttcagcgagggcagcttcagccagagcttcaccatgaagggcagcaccagccacgacgacttcaagttcaagagcgagcccaagctgagcgcccagatgaaggccgtgagcgccgagtgcctgggcccccccctggacatcagcaccaagaacatcaccaagagcctggccagcctggtggagatcaaggaggacggcgtgggcttcagcgtgagagacccctactacagagacagagtgagcagaaccgtgagcctgcccaccagaggcagcaccttccccagacagagcagagccaccgagaccagccccctgaccagaagaaagagctacgacagaggccagcccatcagaagcaccgacgtgggcttcaccccccccagcagcccccccaccagacccagaaacgacagaaacgtgttcagcagactgaccagcaaccagagccagggcagcgccctggacaagagcgacgacagcgacagcagcctgagcgaggtgctgagaggcatcatcagccccgtgggcggcgccaagggcgccagaaccgcccccctgcagtgcgtgagcatggccgagggccacaccaagcccatcctgtgcctggacgccaccgacgagctgctgttcaccggcagcaaggacagaagctgcaagatgtggaacctggtgaccggccaggagatcgccgccctgaagggccaccccaacaacgtggtgagcatcaagtactgcagccacagcggcctggtgttcagcgtgagcaccagctacatcaaggtgtgggacatcagagacagcgccaagtgcatcagaaccctgaccagcagcggccaggtgatcagcggcgacgcctgcgccgccaccagcaccagagccatcaccagcgcccagggcgagcaccagatcaaccagatcgccctgagccccagcggcaccatgctgtacgccgccagcggcaacgccgtgagaatctgggagctgagcagattccagcccgtgggcaagctgaccggccacatcggccccgtgatgtgcctgaccgtgacccagaccgccagccagcacgacctggtggtgaccggcagcaaggaccactacgtgaagatgttcgagctgggcgagtgcgtgaccggcaccatcggccccacccacaacttcgagcccccccactacgacggcatcgagtgcctggccatccagggcgacatcctgttcagcggcagcagagacaacggcatcaagaagtgggacctggaccagcaggagctgatccagcagatccccaacgcccacaaggactgggtgtgcgccctggccttcatccccggcagacccatgctgctgagcgcctgcagagccggcgtgatcaaggtgtggaacgtggacaacttcacccccatcggcgagatcaagggccacgacagccccatcaacgccatctgcaccaacgccaagcacatcttcaccgccagcagcgacctgaccgtgaagttctggagcgtgagaagactgccccacagcggccccccctag

SEQ ID NO: 86248 - DNA, 5007 bp, synthetic construct
  misc_feature 1..5007: note = Description of Artificial Sequence: Synthetic coding sequence
  source 1..5007: mol_type = other DNA
atggccggccagggcgactgctgcgtgaaggtggccgtgagaatcagaccccagctgagcaaggagaagatcgagggctgccacatctgcaccagcgtgacccccggcgagccccaggtgctgctgggcaaggacaaggccttcacctacgacttcgtgttcgacctggacacctggcaggagcagatctacagcacctgcgtgagcaagctgatcgagggctgcttcgagggctacaacgccaccgtgctggcctacggccagaccggcgccggcaagacctacaccatgggcaccggcttcgacatggccaccagcgaggaggagcagggcatcatccccagagccatcgcccacctgttcggcggcatcgccgagagaaagagaagagcccaggagcagggcgtggccggccccgagttcaaggtgagcgcccagttcctggagctgtacaacgaggagatcctggacctgttcgacagcaccagagaccccgacaccagacacagaagaagcaacatcaagatccacgaggacgccaacggcggcatctacaccaccggcgtgaccagcagactgatccacagccaggaggagctgatccagtgcctgaagcagggcgccctgagcagaaccaccgccagcacccagatgaacgtgcagagcagcagaagccacgccatcttcaccatccacctgtgccagatgagaatgtgcacccagcccgacctggtgaacgaggccgtgaccggcctgcccgacggcaccccccccagcagcgagtacgagaccctgaccgccaagttccacttcgtggacctggccggcagcgagagactgaagagaaccggcgccaccggcgagagagccaaggagggcatcagcatcaactgcggcctgctggccctgggcaacgtgatcagcgccctgggcgaccagagcaagaaggtggtgcacgtgccctacagagacagcaagctgaccagactgctgcaggacagcctgggcggcaacagccagaccatcatgatcgcctgcgtgagccccagcgacagagacttcatggagaccctgaacaccctgaagtacgccaacagagccagaaacatcaagaacaaggtggtggtgaaccaggacaagaccagccagcagatcagcgccctgagagccgagatcgccagactgcagatggagctgatggagtacaaggccggcaagagagtgatcggcgaggacggcgccgagggctacagcgacctgttcagagagaacgccatgctgcagaaggagaacggcgccctgagactgagagtgaaggccatgcaggaggccatcgacgccatcaacaacagagtgacccagctgatgagccaggaggccaacctgctgctggccaaggccggcgacggcaacgaggccatcggcgccctgatccagaactacatcagagagatcgaggagctgagaaccaagctgctggagagcgaggccatgaacgagagcctgagaagaagcctgagcagagccagcgccagaagcccctacagcctgggcgccagccccgccgcccccgccttcggcggcagccccgccagcagcatggaggacgccagcgaggtgatcagaagagccaagcaggacctggagagactgaagaagaaggaggtgagacagagaagaaagagccccgagaaggaggccttcaagaagagagccaagctgcagcaggagaacagcgaggagaccgacgagaacgaggccgaggaggaggaggaggagagagacgagagcggctgcgaggaggaggagggcagagaggacgaggacgaggacagcggcagcgaggagagcctggtggacagcgacagcgaccccgaggagaaggaggtgaacttccaggccgacctggccgacctgacctgcgagatcgagatcaagcagaagctgatcgacgagctggagaacagccagagaagactgcagaccctgaagcaccagtacgaggagaagctgatcctgctgcagaacaagatcagagacacccagctggagagagacagagtgctgcagaacctgagcaccatggagtgctacaccgaggagaaggccaacaagatcaaggccgactacgagaagagactgagagagatgaacagagacctgcagaagctgcaggccgcccagaaggagcacgccagactgctgaagaaccagagcagatacgagagagagctgaagaagctgcaggccgaggtggccgagatgaagaaggccaaggtggccctgatgaagcagatgagagaggagcagcagagaagaagactggtggagaccaagagaaacagagagatcgcccagctgaagaaggagcagagaagacaggagttccagatcagagccctggagagccagaagagacagcaggagatggtgctgagaagaaagacccaggaggtgagcgccctgagaagactggccaagcccatgagcgagagagtggccggcagagccggcctgaagccccccatgctggacagcggcgccgaggtgagcgccagcaccaccagcagcgaggccgagagcggcgccagaagcgtgagcagcatcgtgagacagtggaacagaaagatcaaccacttcctgggcgaccaccccgcccccaccgtgaacggcaccagacccgccagaaagaagttccagaagaagggcgccagccagagcttcagcaaggccgccagactgaagtggcagagcctggagagaagaatcatcgacatcgtgatgcagagaatgaccatcgtgaacctggaggccgacatggagagactgatcaagaagagagaggagctgttcctgctgcaggaggccctgagaagaaagagagagagactgcaggccgagagccccgaggaggagaagggcctgcaggagctggccgaggagatcgaggtgctggccgccaacatcgactacatcaacgacggcatcaccgactgccaggccaccatcgtgcagctggaggagaccaaggaggagctggacagcaccgacaccagcgtggtgatcagcagctgcagcctggccgaggccagactgctgctggacaacttcctgaaggccagcatcgacaagggcctgcaggtggcccagaaggaggcccagatcagactgctggagggcagactgagacagaccgacatggccggcagcagccagaaccacctgctgctggacgccctgagagagaaggccgaggcccaccccgagctgcaggccctgatctacaacgtgcagcaggagaacggctacgccagcaccgacgaggagatcagcgagttcagcgagggcagcttcagccagagcttcaccatgaagggcagcaccagccacgacgacttcaagttcaagagcgagcccaagctgagcgcccagatgaaggccgtgagcgccgagtgcctgggcccccccctggacatcagcaccaagaacatcaccaagagcctggccagcctggtggagatcaaggaggacggcgtgggcttcagcgtgagagacccctactacagagacagagtgagcagaaccgtgagcctgcccaccagaggcagcaccttccccagacagagcagagccaccgagaccagccccctgaccagaagaaagagctacgacagaggccagcccatcagaagcaccgacgtgggcttcaccccccccagcagcccccccaccagacccagaaacgacagaaacgtgttcagcagactgaccagcaaccagagccagggcagcgccctggacaagagcgacgacagcgacagcagcctgagcgaggtgctgagaggcatcatcagccccgtgggcggcgccaagggcgccagaaccgcccccctgcagtgcgtgagcatggccgagggccacaccaagcccatcctgtgcctggacgccaccgacgagctgctgttcaccggcagcaaggacagaagctgcaagatgtggaacctggtgaccggccaggagatcgccgccctgaagggccaccccaacaacgtggtgagcatcaagtactgcagccacagcggcctggtgttcagcgtgagcaccagctacatcaaggtgtgggacatcagagacagcgccaagtgcatcagaaccctgaccagcagcggccaggtgatcagcggcgacgcctgcgccgccaccagcaccagagccatcaccagcgcccagggcgagcaccagatcaaccagatcgccctgagccccagcggcaccatgctgtacgccgccagcggcaacgccgtgagaatctgggagctgagcagattccagcccgtgggcaagctgaccggccacatcggccccgtgatgtgcctgaccgtgacccagaccgccagccagcacgacctggtggtgaccggcagcaaggaccactacgtgaagatgttcgagctgggcgagtgcgtgaccggcaccatcggccccacccacaacttcgagcccccccactacgacggcatcgagtgcctggccatccagggcgacatcctgttcagcggcagcagagacaacggcatcaagaagtgggacctggaccagcaggagctgatccagcagatccccaacgcccacaaggactgggtgtgcgccctggccttcatccccggcagacccatgctgctgagcgcctgcagagccggcgtgatcaaggtgtggaacgtggacaacttcacccccatcggcgagatcaagggccacgacagccccatcaacgccatctgcaccaacgccaagcacatcttcaccgccagcagcgactgcagagtgaagctgtggaactacgtgcccggcctgaccccctgcctgcccagaagagtgctggccatcaagggcagagccaccacctgccccgaccccccccagctgagcctgagccccctgagcttcttccccagcttcctgttccccctgttcccccacttcgacctgagctgcttcctgacctag

SEQ ID NO: 86249 - DNA, 1998 bp, synthetic construct
  misc_feature 1..1998: note = Description of Artificial Sequence: Synthetic coding sequence
  source 1..1998: mol_type = other DNA
atggccgccggcggcagcacccagcagagaagaagagagatggccgccgccagcgccgccgccatcagcggcgccggcagatgcagactgagcaagatcggcgccaccagaagacccccccccgccagagtgagagtggccgtgagactgagacccttcgtggacggcaccgccggcgccagcgaccccccctgcgtgagaggcatggacagctgcagcctggagatcgccaactggagaaaccaccaggagaccctgaagtaccagttcgacgccttctacggcgagagaagcacccagcaggacatctacgccggcagcgtgcagcccatcctgagacacctgctggagggccagaacgccagcgtgctggcctacggccccaccggcgccggcaagacccacaccatgctgggcagccccgagcagcccggcgtgatccccagagccctgatggacctgctgcagctgaccagagaggagggcgccgagggcagaccctgggccctgagcgtgaccatgagctacctggagatctaccaggagaaggtgctggacctgctggaccccgccagcggcgacctggtgatcagagaggactgcagaggcaacatcctgatccccggcctgagccagaagcccatcagcagcttcgccgacttcgagagacacttcctgcccgccagcagaaacagaaccgtgggcgccaccagactgaaccagagaagcagcagaagccacgccgtgctgctggtgaaggtggaccagagagagagactggcccccttcagacagagagagggcaagctgtacctgatcgacctggccggcagcgaggacaacagaagaaccggcaacaagggcctgagactgaaggagagcggcgccatcaacaccagcctgttcgtgctgggcaaggtggtggacgccctgaaccagggcctgcccagagtgccctacagagacagcaagctgaccagactgctgcaggacagcctgggcggcagcgcccacagcatcctgatcgccaacatcgcccccgagagaagattctacctggacaccgtgagcgccctgaacttcgccgccagaagcaaggaggtgatcaacagacccttcaccaacgagagcctgcagccccacgccctgggccccgtgaagctgagccagaaggagctgctgggcccccccgaggccaagagagccagaggccccgaggaggaggagatcggcagccccgagcccatggccgcccccgccagcgccagccagaagctgagccccctgcagaagctgagcagcatggaccccgccatgctggagagactgctgagcctggacagactgctggccagccagggcagccagggcgcccccctgctgagcacccccaagagagagagaatggtgctgatgaagaccgtggaggagaaggacctggagatcgagagactgaagaccaagcagaaggagctggaggccaagatgctggcccagaaggccgaggagaaggagaaccactgccccaccatgctgagacccctgagccacagaaccgtgaccggcgccaagcccctgaagaaggccgtggtgatgcccctgcagctgatccaggagcaggccgccagccccaacgccgagatccacatcctgaagaacaagggcagaaagagaaagctggagagcctggacgccctggagcccgaggagaaggccgaggactgctgggagctgcagatcagccccgagctgctggcccacggcagacagaagatcctggacctgctgaacgagggcagcgccagagacctgagaagcctgcagagaatcggccccaagaaggcccagctgatcgtgggctggagagagctgcacggccccttcagccaggtggaggacctggagagagtggagggcatcaccggcaagcagatggagagcttcctgaaggccaacatcctgggcctggccgccggccagagatgcggcgccagctag

SEQ ID NO: 86250 - DNA, 219 bp, synthetic construct
  misc_feature 1..219: note = Description of Artificial Sequence: Synthetic coding sequence
  source 1..219: mol_type = other DNA
atgctggcccagaaggccgaggagaaggagaaccactgccccaccatgctgagacccctgagccacagaaccgtgaccggcgccaagcccctgaagaaggccgtggtgatgcccctgcagctgatccaggagcaggccgccagccccaacgccgagatccacatcctgaagaacaagggcagaaagagaaagggcgccaacatcaccaccggctactag

SEQ ID NO: 86251 - DNA, 1794 bp, synthetic construct
  misc_feature 1..1794: note = Description of Artificial Sequence: Synthetic coding sequence
  source 1..1794: mol_type = other DNA
atggacagctgcagcctggagatcgccaactggagaaaccaccaggagaccctgaagtaccagttcgacgccttctacggcgagagaagcacccagcaggacatctacgccggcagcgtgcagcccatcctgagacacctgctggagggccagaacgccagcgtgctggcctacggccccaccggcgccggcaagacccacaccatgctgggcagccccgagcagcccggcgtgatccccagagccctgatggacctgctgcagctgaccagagaggagggcgccgagggcagaccctgggccctgagcgtgaccatgagctacctggagatctaccaggagaaggtgctggacctgctggaccccgccagcggcgacctggtgatcagagaggactgcagaggcaacatcctgatccccggcctgagccagaagcccatcagcagcttcgccgacttcgagagacacttcctgcccgccagcagaaacagaaccgtgggcgccaccagactgaaccagagaagcagcagaagccacgccgtgctgctggtgaaggtggaccagagagagagactggcccccttcagacagagagagggcaagctgtacctgatcgacctggccggcagcgaggacaacagaagaaccggcaacaagggcctgagactgaaggagagcggcgccatcaacaccagcctgttcgtgctgggcaaggtggtggacgccctgaaccagggcctgcccagagtgccctacagagacagcaagctgaccagactgctgcaggacagcctgggcggcagcgcccacagcatcctgatcgccaacatcgcccccgagagaagattctacctggacaccgtgagcgccctgaacttcgccgccagaagcaaggaggtgatcaacagacccttcaccaacgagagcctgcagccccacgccctgggccccgtgaagctgagccagaaggagctgctgggcccccccgaggccaagagagccagaggccccgaggaggaggagatcggcagccccgagcccatggccgcccccgccagcgccagccagaagctgagccccctgcagaagctgagcagcatggaccccgccatgctggagagactgctgagcctggacagactgctggccagccagggcagccagggcgcccccctgctgagcacccccaagagagagagaatggtgctgatgaagaccgtggaggagaaggacctggagatcgagagactgaagaccaagcagaaggagctggaggccaagatgctggcccagaaggccgaggagaaggagaaccactgccccaccatgctgagacccctgagccacagaaccgtgaccggcgccaagcccctgaagaaggccgtggtgatgcccctgcagctgatccaggagcaggccgccagccccaacgccgagatccacatcctgaagaacaagggcagaaagagaaagctggagagcctggacgccctggagcccgaggagaaggccgaggactgctgggagctgcagatcagccccgagctgctggcccacggcagacagaagatcctggacctgctgaacgagggcagcgccagagacctgagaagcctgcagagaatcggccccaagaaggcccagctgatcgtgggctggagagagctgcacggccccttcagccaggtggaggacctggagagagtggagggcatcaccggcaagcagatggagagcttcctgaaggccaacatcctgggcctggccgccggccagagatgcggcgccagctag

SEQ ID NO: 86252 - DNA, 1794 bp, synthetic construct; identical to SEQ ID NO: 86251
  misc_feature 1..1794: note = Description of Artificial Sequence: Synthetic coding sequence
  source 1..1794: mol_type = other DNA

SEQ ID NO: 86253 - DNA, 2883 bp, synthetic construct
  misc_feature 1..2883: note = Description of Artificial Sequence: Synthetic coding sequence
  source 1..2883: mol_type = other DNA
atgaagagcgccagagccaagacccccagaaagcccaccgtgaagaagggcagccagaccaacctgaaggaccccgtgggcgtgtactgcagagtgagacccctgggcttccccgaccaggagtgctgcatcgaggtgatcaacaacaccaccgtgcagctgcacacccccgagggctacagactgaacagaaacggcgactacaaggagacccagtacagcttcaagcaggtgttcggcacccacaccacccagaaggagctgttcgacgtggtggccaaccccctggtgaacgacctgatccacggcaagaacggcctgctgttcacctacggcgtgaccggcagcggcaagacccacaccatgaccggcagccccggcgagggcggcctgctgcccagatgcctggacatgatcttcaacagcatcggcagcttccaggccaagagatacgtgttcaagagcaacgacagaaacagcatggacatccagtgcgaggtggacgccctgctggagagacagaagagagaggccatgcccaaccccaagaccagcagcagcaagagacaggtggaccccgagttcgccgacatgatcaccgtgcaggagttctgcaaggccgaggaggtggacgaggacagcgtgtacggcgtgttcgtgagctacatcgagatctacaacaactacatctacgacctgctggaggaggtgcccttcgaccccatcaagcccaagcccccccagagcaagctgctgagagaggacaagaaccacaacatgtacgtggccggctgcaccgaggtggaggtgaagagcaccgaggaggccttcgaggtgttctggagaggccagaagaagagaagaatcgccaacacccacctgaacagagagagcagcagaagccacagcgtgttcaacatcaagctggtgcaggcccccctggacgccgacggcgacaacgtgctgcaggagaaggagcagatcaccatcagccagctgagcctggtggacctggccggcagcgagagaaccaacagaaccagagccgagggcaacagactgagagaggccggcaacatcaaccagagcctgatgaccctgagaacctgcatggacgtgctgagagagaaccagatgtacggcaccaacaagatggtgccctacagagacagcaagctgacccacctgttcaagaactacttcgacggcgagggcaaggtgagaatgatcgtgtgcgtgaaccccaaggccgaggactacgaggagaacctgcaggtgatgagattcgccgaggtgacccaggaggtggaggtggccagacccgtggacaaggccatctgcggcctgacccccggcagaagatacagaaaccagcccagaggccccgtgggcaacgagcccctggtgaccgacgtggtgctgcagagcttcccccccctgcccagctgcgagatcctggacatcaacgacgagcagaccctgcccagactgatcgaggccctggagaagagacacaacctgagacagatgatgatcgacgagttcaacaagcagagcaacgccttcaaggccctgctgcaggagttcgacaacgccgtgctgagcaaggagaaccacatgcagggcaagctgaacgagaaggagaagatgatcagcggccagaagctggagatcgagagactggagaagaagaacaagaccctggagtacaagatcgagatcctggagaagaccaccaccatctacgaggaggacaagagaaacctgcagcaggagctggagacccagaaccagaagctgcagagacagttcagcgacaagagaagactggaggccagactgcagggcatggtgaccgagaccaccatgaagtgggagaaggagtgcgagagaagagtggccgccaagcagctggagatgcagaacaagctgtgggtgaaggacgagaagctgaagcagctgaaggccatcgtgaccgagcccaagaccgagaagcccgagagacccagcagagagagagacagagagaaggtgacccagagaagcgtgagccccagccccgtgcccctgagcagcaactacatcgcccagatcagcaacggccagcagctgatgagccagccccagctgcacagaagaagcaacagctgcagcagcatcagcgtggccagctgcatcagcgagtgggagcagaagatccccacctacaacacccccctgaaggtgaccagcatcgccagaagaagacagcaggagcccggccagagcaagacctgcatcgtgagcgacagaagaagaggcatgtactggaccgagggcagagaggtggtgcccaccttcagaaacgagatcgagatcgaggaggaccactgcggcagactgctgttccagcccgaccagaacgccccccccatcagactgagacacagaagaagcagaagcgccggcgacagatgggtggaccacaagcccgccagcaacatgcagaccgagaccgtgatgcagccccacgtgccccacgccatcaccgtgagcgtggccaacgagaaggccctggccaagtgcgagaagtacatgctgacccaccaggagctggccagcgacggcgagatcgagaccaagctgatcaagggcgacatctacaagaccagaggcggcggccagagcgtgcagttcaccgacatcgagaccctgaagcaggagagccccaacggcagcagaaagagaagaagcagcaccgtggcccccgcccagcccgacggcgccgagagcgagtggaccgacgtggagaccagatgcagcgtggccgtggagatgagagccggcagccagctgggccccggctaccagcaccacgcccagcccaagagaaagaagccctag

SEQ ID NO: 86254 - DNA, 2022 bp, synthetic construct
  misc_feature 1..2022: note = Description of Artificial Sequence: Synthetic coding sequence
  source 1..2022: mol_type = other DNA
atgatcaccgtgcaggagttctgcaaggccgaggaggtggacgaggacagcgtgtacggcgtgttcgtgagctacatcgagatctacaacaactacatctacgacctgctggaggaggtgcccttcgaccccatcaagcccaagtggaacagctgcagcacccccatgagaaacaccgacttcgtgcccccccagagcaagctgctgagagaggacaagaaccacaacatgtacgtggccggctgcaccgaggtggaggtgaagagcaccgaggaggccttcgaggtgttctggagaggccagaagaagagaagaatcgccaacacccacctgaacagagagagcagcagaagccacagcgtgttcaacatcaagctggtgcaggcccccctggacgccgacggcgacaacgtgctgcaggagaaggagcagatcaccatcagccagctgagcctggtggacctggccggcagcgagagaaccaacagaaccagagccgagggcaacagactgagagaggccggcaacatcaaccagagcctgatgaccctgagaacctgcatggacgtgctgagagagaaccagatgtacggcaccaacaagatggtgccctacagagacagcaagctgacccacctgttcaagaactacttcgacggcgagggcaaggtgagaatgatcgtgtgcgtgaaccccaaggccgaggactacgaggagaacctgcaggtgatgagattcgccgaggtgacccaggaggtggaggtggccagacccgtggacaaggccatctgcggcctgacccccggcagaagatacagaaaccagcccagaggccccgtgggcaacgagcccctggtgaccgacgtggtgctgcagagcttcccccccctgcccagctgcgagatcctggacatcaacgacgagcagaccctgcccagactgatcgaggccctggagaagagacacaacctgagacagatgatgatcgacgagttcaacaagcagagcaacgccttcaaggccctgctgcaggagttcgacaacgccgtgctgagcaaggagaaccacatgcagggcaagctgaacgagaaggagaagatgatcagcggccagaagctggagatcgagagactggagaagaagaacaagaccctggagtacaagatcgagatcctggagaagaccaccaccatctacgaggaggacaagagaaacctgcagcaggagctggagacccagaaccagaagctgcagagacagttcagcgacaagagaagactggaggccagactgcagggcatggtgaccgagaccaccatgaagtgggagaaggagtgcgagagaagagtggccgccaagcagctggagatgcagaacaagctgtgggtgaaggacgagaagctgaagcagctgaaggccatcgtgaccgagcccaagaccgagaagcccgagagacccagcagagagagagacagagagaaggtgacccagagaagcgtgagccccagccccgtgcccctgctgttccagcccgaccagaacgccccccccatcagactgagacacagaagaagcagaagcgccggcgacagatgggtggaccacaagcccgccagcaacatgcagaccgagaccgtgatgcagccccacgtgccccacgccatcaccgtgagcgtggccaacgagaaggccctggccaagtgcgagaagtacatgctgacccaccaggagctggccagcgacggcgagatcgagaccaagctgatcaagggcgacatctacaagaccagaggcggcggccagagcgtgcagttcaccgacatcgagaccctgaagcaggagagccccaacggcagcagaaagagaagaagcagcaccgtggcccccgcccagcccgacggcgccgagagcgagtggaccgacgtggagaccagatgcagcgtggccgtggagatgagagccggcagccagctgggccccggctaccagcaccacgcccagcccaagagaaagaagccctag

SEQ ID NO: 86255 - DNA, 2022 bp, synthetic construct; identical to SEQ ID NO: 86254
  misc_feature 1..2022: note = Description of Artificial Sequence: Synthetic coding sequence
  source 1..2022: mol_type = other DNA

SEQ ID NO: 86256 - DNA, 2571 bp, synthetic construct
  misc_feature 1..2571: note = Description of Artificial Sequence: Synthetic coding sequence
  source 1..2571: mol_type = other DNA
atgaagagcgccagagccaagacccccagaaagcccaccgtgaagaagggcagccagaccaacctgaaggaccccgtgggcgtgtactgcagagtgagacccctgggcttccccgaccaggagtgctgcatcgaggtgatcaacaacaccaccgtgcagctgcacacccccgagggctacagactgaacagaaacggcgactacaaggagacccagtacagcttcaagcaggtgttcggcacccacaccacccagaaggagctgttcgacgtggtggccaaccccctggtgaacgacctgatccacggcaagaacggcctgctgttcacctacggcgtgaccggcagcggcaagacccacaccatgaccggcagccccggcgagggcggcctgctgcccagatgcctggacatgatcttcaacagcatcggcagcttccaggccaagagatacgtgttcaagagcaacgacagaaacagcatggacatccagtgcgaggtggacgccctgctggagagacagaagagagaggccatgcccaaccccaagaccagcagcagcaagagacaggtggaccccgagttcgccgacatgatcaccgtgcaggagttctgcaaggccgaggaggtggacgaggacagcgtgtacggcgtgttcgtgagctacatcgagatctacaacaactacatctacgacctgctggaggaggtgcccttcgaccccatcaagcccaagcccccccagagcaagctgctgagagaggacaagaaccacaacatgtacgtggccggctgcaccgaggtggaggtgaagagcaccgaggaggccttcgaggtgttctggagaggccagaagaagagaagaatcgccaacacccacctgaacagagagagcagcagaagccacagcgtgttcaacatcaagctggtgcaggcccccctggacgccgacggcgacaacgtgctgcaggagaaggagcagatcaccatcagccagctgagcctggtggacctggccggcagcgagagaaccaacagaaccagagccgagggcaacagactgagagaggccggcaacatcaaccagagcctgatgaccctgagaacctgcatggacgtgctgagagagaaccagatgtacggcaccaacaagatggtgccctacagagacagcaagctgacccacctgttcaagaactacttcgacggcgagggcaaggtgagaatgatcgtgtgcgtgaaccccaaggccgaggactacgaggagaacctgcaggtgatgagattcgccgaggtgacccaggaggtggaggtggccagacccgtggacaaggccatctgcggcctgacccccggcagaagatacagaaaccagcccagaggccccgtgggcaacgagcccctggtgaccgacgtggtgctgcagagcttcccccccctgcccagctgcgagatcctggacatcaacgacgagcagaccctgcccagactgatcgaggccctggagaagagacacaacctgagacagatgatgatcgacgagttcaacaagcagagcaacgccttcaaggccctgctgcaggagttcgacaacgccgtgctgagcaaggagaaccacatgcagggcaagctgaacgagaaggagaagatgatcagcggccagaagctggagatcgagagactggagaagaagaacaagaccctggagtacaagatcgagatcctggagaagaccaccaccatctacgaggaggacaagagaaacctgcagcaggagctggagacccagaaccagaagctgcagagacagttcagcgacaagagaagactggaggccagactgcagggcatggtgaccgagaccaccatgaagtgggagaaggagtgcgagagaagagtggccgccaagcagctggagatgcagaacaagctgtgggtgaaggacgagaagctgaagcagctgaaggccatcgtgaccgagcccaagaccgagaagcccgagagacccagcagagagagagacagagagaaggtgacccagagaagcgtgagccccagccccgtgcccctgctgttccagcccgaccagaacgccccccccatcagactgagacacagaagaagcagaagcgccggcgacagatgggtggaccacaagcccgccagcaacatgcagaccgagaccgtgatgcagccccacgtgccccacgccatcaccgtgagcgtggccaacgagaaggccctggccaagtgcgagaagtacatgctgacccaccaggagctggccagcgacggcgagatcgagaccaagctgatcaagggcgacatctacaagaccagaggcggcggccagagcgtgcagttcaccgacatcgagaccctgaagcaggagagccccaacggcagcagaaagagaagaagcagcaccgtggcccccgcccagcccgacggcgccgagagcgagtggaccgacgtggagaccagatgcagcgtggccgtggagatgagagccggcagccagctgggccccggctaccagcaccacgcccagcccaagagaaagaagccctag

SEQ ID NO: 86257 - DNA, 2520 bp, synthetic construct
  misc_feature 1..2520: note = Description of Artificial Sequence: Synthetic coding sequence
  source 1..2520: mol_type = other DNA
atgaccggcagccccggcgagggcggcctgctgcccagatgcctggacatgatcttcaacagcatcggcagcttccaggccaagagatacgtgttcaagagcaacgacagaaacagcatggacatccagtgcgaggtggacgccctgctggagagacagaagagagaggccatgcccaaccccaagaccagcagcagcaagagacaggtggaccccgagttcgccgacatgatcaccgtgcaggagttctgcaaggccgaggaggtggacgaggacagcgtgtacggcgtgttcgtgagctacatcgagatctacaacaactacatctacgacctgctggaggaggtgcccttcgaccccatcaagcccaagcccccccagagcaagctgctgagagaggacaagaaccacaacatgtacgtggccggctgcaccgaggtggaggtgaagagcaccgaggaggccttcgaggtgttctggagaggccagaagaagagaagaatcgccaacacccacctgaacagagagagcagcagaagccacagcgtgttcaacatcaagctggtgcaggcccccctggacgccgacggcgacaacgtgctgcaggagaaggagcagatcaccatcagccagctgagcctggtggacctggccggcagcgagagaaccaacagaaccagagccgagggcaacagactgagagaggccggcaacatcaaccagagcctgatgaccctgagaacctgcatggacgtgctgagagagaaccagatgtacggcaccaacaagatggtgccctacagagacagcaagctgacccacctgttcaagaactacttcgacggcgagggcaaggtgagaatgatcgtgtgcgtgaaccccaaggccgaggactacgaggagaacctgcaggtgatgagattcgccgaggtgacccaggaggtggaggtggccagacccgtggacaaggccatctgcggcctgacccccggcagaagatacagaaaccagcccagaggccccgtgggcaacgagcccctggtgaccgacgtggtgctgcagagcttcccccccctgcccagctgcgagatcctggacatcaacgacgagcagaccctgcccagactgatcgaggccctggagaagagacacaacctgagacagatgatgatcgacgagttcaacaagcagagcaacgccttcaaggccctgctgcaggagttcgacaacgccgtgctgagcaaggagaaccacatgcagggcaagctgaacgagaaggagaagatgatcagcggccagaagctggagatcgagagactggagaagaagaacaagaccctggagtacaagatcgagatcctggagaagaccaccaccatctacgaggaggacaagagaaacctgcagcaggagctggagacccagaaccagaagctgcagagacagttcagcgacaagagaagactggaggccagactgcagggcatggtgaccgagaccaccatgaagtgggagaaggagtgcgagagaagagtggccgccaagcagctggagatgcagaacaagctgtgggtgaaggacgagaagctgaagcagctgaaggccatcgtgaccgagcccaagaccgagaagcccgagagacccagcagagagagagacagagagaaggtgacccagagaagcgtgagccccagccccgtgcccctgagcagcaactacatcgcccagatcagcaacggccagcagctgatgagccagccccagctgcacagaagaagcaacagctgcagcagcatcagcgtggccagctgcatcagcgagtgggagcagaagatccccacctacaacacccccctgaaggtgaccagcatcgccagaagaagacagcaggagcccggccagagcaagacctgcatcgtgagcgacagaagaagaggcatgtactggaccgagggcagagaggtggtgcccaccttcagaaacgagatcgagatcgaggaggaccactgcggcagactgctgttccagcccgaccagaacgccccccccatcagactgagacacagaagaagcagaagcgccggcgacagatgggtggaccacaagcccgccagcaacatgcagaccgagaccgtgatgcagccccacgtgccccacgccatcaccgtgagcgtggccaacgagaaggccctggccaagtgcgagaagtacatgctgacccaccaggagctggccagcgacggcgagatcgagaccaagctgatcaagggcgacatctacaagaccagaggcggcggccagagcgtgcagttcaccgacatcgagaccctgaagcaggagagccccaacggcagcagaaagagaagaagcagcaccgtggcccccgcccagcccgacggcgccgagagcgagtggaccgacgtggagaccagatgcagcgtggccgtggagatgagagccggcagccagctgggccccggctaccagcaccacgcccagcccaagagaaagaagccctag

SEQ ID NO: 86258 - DNA, 3705 bp, synthetic construct
  misc_feature 1..3705: note = Description of Artificial Sequence: Synthetic coding sequence
  source 1..3705: mol_type = other DNA
atggccagctggctgtacgagtgcctgtgcgaggccgagctggcccagtactacagccacttcaccgccctgggcctgcagaagatcgacgagctggccaagatcaccatgaaggactacagcaagctgggcgtgcacgacatgaacgacagaaagagactgttccagctgatcaagatcatcaagatcatgcaggaggaggacaaggccgtgagcatccccgagagacacctgcagaccagcagcctgagaatcaagagccaggagctgagaagcggccccagaagacagctgaacttcgacagccccgccgacaacaaggacagaaacgccagcaacgacggcttcgagatgtgcagcctgagcgacttcagcgccaacgagcagaagagcacctacctgaaggtgctggagcacatgctgcccgacgacagccagtaccacaccaagaccggcatcctgaacgccaccgccggcgacagctacgtgcagaccgagatcagcaccagcctgttcagccccaactacctgagcgccatcctgggcgactgcgacatccccatcatccagagaatcagccacgtgagcggctacaactacggcatcccccacagctgcatcagacagaacaccagcgagaagcagaacccctggaccgagatggagaagatcagagtgtgcgtgagaaagagacccctgggcatgagagaggtgagaagaggcgagatcaacatcatcaccgtggaggacaaggagaccctgctggtgcacgagaagaaggaggccgtggacctgacccagtacatcctgcaggtgatcctgaagggcagcaaggagagaagcaccggcgccaccggcgtgaacgccgacagcagcagaagccacgccgtgatccagatccagatcaaggacagcgccaagagaaccttcggcagaatcagcttcatcgacctggccggcagcgagagagccgccgacgccagagacagcgacagacagaccaagatggagggcgccgagatcaaccagagcctgctggccctgaaggagtgcatcagagccctggaccaggagcacacccacacccccttcagacagagcaagctgacccaggtgctgaaggacagcttcatcggcaacgccaagacctgcatgatcgccaacatcagccccagccacgtggccaccgagcacaccctgaacaccctgagatacgccgacagagtgaaggagctgaagaagggcatcaagtgctgcaccagcgtgaccagcagaaacagaaccagcggcaacagcagccccaagagaatccagagcagccccggcgccctgagcgaggacaagtgcagccccaagaaggtgaagctgggcttccagcagagcctgaccgtggccgcccccggcagcaccagaggcaaggtgcaccccctgaccagccacccccccaacatccccttcaccagcgcccccaaggtgagcggcaagagaggcggcagcagaggcagccccagccaggagtgggtgatccacgccagccccgtgaagggcaccgtgagaagcggccacgtggccaagaagaagcccgaggagagcgcccccctgtgcagcgagaagaacagaatgggcaacaagaccgtgctgggctgggagagcagagccagcggccccggcgagggcctggtgagaggcaagctgagcaccaagtgcaagaaggtgcagaccgtgcagcccgtgcagaagcagctggtgagcagagtggagctgagcttcggcaacgcccaccacagagccgagtacagccaggacagccagagaggcacccccgccagacccgccagcgaggcctggaccaacatccccccccaccagaaggagagagaggagcacctgagattctaccaccagcagttccagcagccccccctgctgcagcagaagctgaagtaccagcccctgaagagaagcctgagacagtacagaccccccgagggccagctgaccaacgagaccccccccctgttccacagctacagcgagaaccacgacggcgcccaggtggaggagctggacgacagcgacttcagcgaggacagcttcagccacatcagcagccagagagccaccaagcagagaaacaccctggagaacagcgaggacagcttcttcctgcaccagacctggggccagggccccgagaagcaggtggccgagagacagcagagcctgttcagcagccccagaaccggcgacaagaaggacctgaccaagagctgggtggacagcagagaccccatcaaccacagaagagccgccctggaccacagctgcagccccagcaagggccccgtggactggagcagagagaacagcaccagcagcggccccagccccagagacagcctggccgagaagccctactgcagccaggtggacttcatctacagacaggagagaggcggcggcagcagcttcgacctgagaaaggacgccagccagagcgaggtgagcggcgagaacgagggcaacctgcccagccccgaggaggacggcttcaccatcagcctgagccacgtggccgtgcccggcagccccgaccagagagacaccgtgaccacccccctgagagaggtgagcgccgacggccccatccaggtgaccagcaccgtgaagaacggccacgccgtgcccggcgaggaccccagaggccagctgggcacccacgccgagtacgccagcggcctgatgagccccctgaccatgagcctgctggagaaccccgacaacgagggcagcccccccagcgagcagctggtgcaggacggcgccacccacagcctggtggccgagagcaccggcggccccgtggtgagccacaccgtgcccagcggcgaccaggaggccgccctgcccgtgagcagcgccaccagacacctgtggctgagcagcagcccccccgacaacaagcccggcggcgacctgcccgccctgagccccagccccatcagacagcaccccgccgacaagctgcccagcagagaggccgacctgggcgaggcctgccagagcagagagaccgtgctgttcagccacgagcacatgggcagcgagcagtacgacgccgacgccgaggagaccggcctggacggcagctggggcttccccggcaagcccttcaccaccatccacatgggcgtgccccacagcggccccaccctgacccccagaaccggcagcagcgacgtggccgaccagctgtgggcccaggagagaaagcaccccaccagactgggctggcaggagttcggcctgagcaccgaccccatcaagctgccctgcaacagcgagaacgtgacctggctgaagcccagacccatcagcagatgcctggccagacccagcagccccctggtgcccagctgcagccccaagaccgccggcaccctgagacagcccaccctggagcaggcccagcaggtggtgatcagagcccaccaggagcagctggacgagatggccgagctgggcttcaaggaggagaccctgatgagccagctggccagcaacgacttcgaggacttcgtgacccagctggacgagatcatggtgctgaagagcaagtgcatccagagcctgagaagccagctgcagctgtacctgacctgccacggccccaccgccgcccccgagggcaccgtgcccagctag

SEQ ID NO: 86259 - DNA, 4107 bp, synthetic construct
  misc_feature 1..4107: note = Description of Artificial Sequence: Synthetic coding sequence
  source 1..4107: mol_type = other DNA
atggccagctggctgtacgagtgcctgtgcgaggccgagctggcccagtactacagccacttcaccgccctgggcctgcagaagatcgacgagctggccaagatcaccatgaaggactacagcaagctgggcgtgcacgacatgaacgacagaaagagactgttccagctgatcaagatcatcaagatcatgcaggaggaggacaaggccgtgagcatccccgagagacacctgcagaccagcagcctgagaatcaagagccaggagctgagaagcggccccagaagacagctgaacttcgacagccccgccgacaacaaggacagaaacgccagcaacgacggcttcgagatgtgcagcctgagcgacttcagcgccaacgagcagaagagcacctacctgaaggtgctggagcacatgctgcccgacgacagccagtaccacaccaagaccggcatcctgaacgccaccgccggcgacagctacgtgcagaccgagatcagcaccagcctgttcagccccaactacctgagcgccatcctgggcgactgcgacatccccatcatccagagaatcagccacgtgagcggctacaactacggcatcccccacagctgcatcagacagaacaccagcgagaagcagaacccctggaccgagatggagaagatcagagtgtgcgtgagaaagagacccctgggcatgagagaggtgagaagaggcgagatcaacatcatcaccgtggaggacaaggagaccctgctggtgcacgagaagaaggaggccgtggacctgacccagtacatcctgcagcacgtgttctacttcgacgaggtgttcggcgaggcctgcaccaaccaggacgtgtacatgaagaccacccaccccctgatccagcacatcttcaacggcggcaacgccacctgcttcgcctacggccagaccggcgccggcaagacctacaccatgatcggcacccacgagaaccccggcctgtacgccctggccgccaaggacatcttcagacagctggaggtgagccagcccagaaagcacctgttcgtgtggatcagcttctacgagatctactgcggccagctgtacgacctgctgaacagaagaaagagactgttcgccagagaggacagcaagcacatggtgcagatcgtgggcctgcaggagctgcaggtggacagcgtggagctgctgctggaggtgatcctgaagggcagcaaggagagaagcaccggcgccaccggcgtgaacgccgacagcagcagaagccacgccgtgatccagatccagatcaaggacagcgccaagagaaccttcggcagaatcagcttcatcgacctggccggcagcgagagagccgccgacgccagagacagcgacagacagaccaagatggagggcgccgagatcaaccagagcctgctggccctgaaggagtgcatcagagccctggaccaggagcacacccacacccccttcagacagagcaagctgacccaggtgctgaaggacagcttcatcggcaacgccaagacctgcatgatcgccaacatcagccccagccacgtggccaccgagcacaccctgaacaccctgagatacgccgacagagtgaaggagctgaagaagggcatcaagtgctgcaccagcgtgaccagcagaaacagaaccagcggcaacagcagccccaagagaatccagagcagccccggcgccctgagcgaggacaagtgcagccccaagaaggtgaagctgggcttccagcagagcctgaccgtggccgcccccggcagcaccagaggcaaggtgcaccccctgaccagccacccccccaacatccccttcaccagcgcccccaaggtgagcggcaagagaggcggcagcagaggcagccccagccaggagtgggtgatccacgccagccccgtgaagggcaccgtgagaagcggccacgtggccaagaagaagcccgaggagagcgcccccctgtgcagcgagaagaacagaatgggcaacaagaccgtgctgggctgggagagcagagccagcggccccggcgagggcctggtgagaggcaagctgagcaccaagtgcaagaaggtgcagaccgtgcagcccgtgcagaagcagctggtgagcagagtggagctgagcttcggcaacgcccaccacagagccgagtacagccaggacagccagagaggcacccccgccagacccgccagcgaggcctggaccaacatccccccccaccagaaggagagagaggagcacctgagattctaccaccagcagttccagcagccccccctgctgcagcagaagctgaagtaccagcccctgaagagaagcctgagacagtacagaccccccgagggccagctgaccaacgagaccccccccctgttccacagctacagcgagaaccacgacggcgcccaggtggaggagctggacgacagcgacttcagcgaggacagcttcagccacatcagcagccagagagccaccaagcagagaaacaccctggagaacagcgaggacagcttcttcctgcaccagacctggggccagggccccgagaagcaggtggccgagagacagcagagcctgttcagcagccccagaaccggcgacaagaaggacctgaccaagagctgggtggacagcagagaccccatcaaccacagaagagccgccctggaccacagctgcagccccagcaagggccccgtggactggagcagagagaacagcaccagcagcggccccagccccagagacagcctggccgagaagccctactgcagccaggtggacttcatctacagacaggagagaggcggcggcagcagcttcgacctgagaaaggacgccagccagagcgaggtgagcggcgagaacgagggcaacctgcccagccccgaggaggacggcttcaccatcagcctgagccacgtggccgtgcccggcagccccgaccagagagacaccgtgaccacccccctgagagaggtgagcgccgacggccccatccaggtgaccagcaccgtgaagaacggccacgccgtgcccggcgaggaccccagaggccagctgggcacccacgccgagtacgccagcggcctgatgagccccctgaccatgagcctgctggagaaccccgacaacgagggcagcccccccagcgagcagctggtgcaggacggcgccacccacagcctggtggccgagagcaccggcggccccgtggtgagccacaccgtgcccagcggcgaccaggaggccgccctgcccgtgagcagcgccaccagacacctgtggctgagcagcagcccccccgacaacaagcccggcggcgacctgcccgccctgagccccagccccatcagacagcaccccgccgacaagctgcccagcagagaggccgacctgggcgaggcctgccagagcagagagaccgtgctgttcagccacgagcacatgggcagcgagcagtacgacgccgacgccgaggagaccggcctggacggcagctggggcttccccggcaagcccttcaccaccatccacatgggcgtgccccacagcggccccaccctgacccccagaaccggcagcagcgacgtggccgaccagctgtgggcccaggagagaaagcaccccaccagactgggctggcaggagttcggcctgagcaccgaccccatcaagctgccctgcaacagcgagaacgtgacctggctgaagcccagacccatcagcagatgcctggccagacccagcagccccctggtgcccagctgcagccccaagaccgccggcaccctgagacagcccaccctggagcaggcccagcaggtggtgatcagagcccaccaggagcagctggacgagatggccgagctgggcttcaaggaggagaccctgatgagccagctggccagcaacgacttcgaggacttcgtgacccagctggacgagatcatggtgctgaagagcaagtgcatccagagcctgagaagccagctgcagctgtacctgacctgccacggccccaccgccgcccccgagggcaccgtgcccagctag

SEQ ID NO: 86260 - DNA, 4107 bp, synthetic construct; identical to SEQ ID NO: 86259
  misc_feature 1..4107: note = Description of Artificial Sequence: Synthetic coding sequence
  source 1..4107: mol_type = other DNA

SEQ ID NO: 86261 - DNA, 3477 bp, synthetic construct
  misc_feature 1..3477: note = Description of Artificial Sequence: Synthetic coding sequence
  source 1..3477: mol_type = other DNA
atggccagctggctgtacgagtgcctgtgcgaggccgagctggcccagtactacagccacttcaccgccctgggcctgcagaagatcgacgagctggccaagatcaccatgaaggactacagcaagctgggcgtgcacgacatgaacgacagaaagagactgttccagctgatcaagatcatcaagatcatgcaggaggaggacaaggccgtgagcatccccgagagacacctgcagaccagcagcctgagaatcaagagccaggagctgagaagcggccccagaagacagctgaacttcgacagccccgccgacaacaaggacagaaacgccagcaacgacggcttcgagatgtgcagcctgagcgacttcagcgccaacgagcagaagagcacctacctgaaggtgctggagcacatgctgcccgacgacagccagtaccacaccaagaccggcatcctgaacgccaccgccggcgacagctacgtgcagaccgagatcagcaccagcctgttcagccccaactacctgagcgccatcctgggcgactgcgacatccccatcatccagagaatcagccacgtgagcggctacaactacggcatcccccacagctgcatcagacagaacaccagcgagaagcagaacccctggaccgagatggagaagatcagagtgtgcgtgagaaagagacccctgggcatgagagaggtgagaagaggcgagatcaacatcatcaccgtggaggacaaggagaccctgctggtgcacgagaagaaggaggccgtggacctgacccagtacatcctgcagcacgtgttctacttcgacgaggtgttcggcgaggcctgcaccaaccaggacgtgtacatgaagaccacccaccccctgatccagcacatcttcaacggcggcaacgccacctgcttcgcctacggccagaccggcgccggcaagacctacaccatgatcggcacccacgagaaccccggcctgtacgccctggccgccaaggacatcttcagacagctggaggtgagccagcccagaaagcacctgttcgtgtggatcagcttctacgagatctactgcggccagctgtacgacctgctgaacagaagaaagagactgttcgccagagaggacagcaagcacatggtgcagatcgtgggcctgcaggagctgcaggtggacagcgtggagctgctgctggaggtgatcctgaagggcagcaaggagagaagcaccggcgccaccggcgtgaacgccgacagcagcagaagccacgccgtgatccagatccagatcaaggacagcgccaagagaaccttcggcagaatcagcttcatcgacctggccggcagcgagagagccgccgacgccagagacagcgacagacagaccaagatggagggcgccgagatcaaccagagcctgctggccctgaaggagtgcatcagagccctggaccaggagcacacccacacccccttcagacagagcaagctgacccaggtgctgaaggacagcttcatcggcaacgccaagacctgcatgatcgccaacatcagccccagccacgtggccaccgagcacaccctgaacaccctgagatacgccgacagagtgaaggagctgaagaagggcatcaagtgctgcaccagcgtgaccagcagaaacagaaccagcggcaacagcagccccaagagaatccagagcagccccggcgccctgagcgaggacaagtgcagccccaagaaggtgaagctgggcttccagcagagcctgaccgtggccgcccccggcagcaccagaggcaaggtgcaccccctgaccagccacccccccaacatccccttcaccagcgcccccaaggtgagcggcaagagaggcggcagcagaggcagccccagccaggagtgggtgatccacgccagccccgtgaagggcaccgtgagaagcggccacgtggccaagaagaagcccgaggagagcgcccccctgtgcagcgagaagaacagaatgggcaacaagaccgtgctgggctgggagagcagagccagcggccccggcgagggcctggtgagaggcaagctgagcaccaagtgcaagaaggtgcagaccgtgcagcccgtgcagaagcagctggtgagcagagtggagctgagcttcggcaacgcccaccacagagccgagtacagccaggacagccagagaggcacccccgccagacccgccagcgaggcctggaccaacatccccccccaccagaaggagagagaggagcacctgagattctaccaccagcagttccagcagccccccctgctgcagcagaagctgaagtaccagcccctgaagagaagcctgagacagtacagaccccccgagggccagctgaccaacgagaccccccccctgttccacagctacagcgagaaccacgacggcgcccaggtggaggagctggacgacagcgacttcagcgaggacagcttcagccacatcagcagccagagagccaccaagcagagaaacaccctggagaacagcgaggacagcttcttcctgcaccagacctggggccagggccccgagaagcaggtggccgagagacagcagagcctgttcagcagccccagaaccggcgacaagaaggacctgaccaagagctgggtggacagcagagaccccatcaaccacagaagagccgccctggaccacagctgcagccccagcaagggccccgtggactggagcagagagaacagcaccagcagcggccccagccccagagacagcctggccgagaagccctactgcagccaggtggacttcatctacagacaggagagaggcggcggcagcagcttcgacctgagaaaggacgccagccagagcgaggtgagcggcgagaacgagggcaacctgcccagccccgaggaggacggcttcaccatcagcctgagccacgtggccgtgcccggcagccccgaccagagagacaccgtgaccacccccctgagagaggtgagcgccgacggccccatccaggtgaccagcaccgtgaagaacggccacgccgtgcccggcgaggaccccagaggccagctgggcacccacgccgagtacgccagcggcctgatgagccccctgaccatgagcctgctggagaaccccgacaacgagggcagcccccccagcgagcagctggtgcaggacggcgccacccacagcctggtggccgagagcaccggcggccccgtggtgagccacaccgtgcccagcggcgaccaggaggccgccctgcccgtgagcagcgccaccagacacctgtggctgagcagcagcccccccgacaacaagcccggcggcgacctgcccgccctgggccccggcgagaagaccagctacaaggcctggctggccggcgtgtggttcgtgcacagaccccaccaggtggccctgcagcagtag

SEQ ID NO: 86262 - DNA, 999 bp, synthetic construct
  misc_feature 1..999: note = Description of Artificial Sequence: Synthetic coding sequence
  source 1..999: mol_type = other DNA
atgacctggaccagcggccagctgcagagagagaagcaggccagacccggcagcggcgccgtgctggccttccccgacgacaaggacctgagagtgtacggccccgccgagagccagagcgccgtgttcggcgacgtgtgccccctgctgaccagcctgctggacggctacaacgtgtgcgtgatggcctacggccagaccggcagcggcaagagctacaccatgctgggcagacacagcgacgacggccccgtgctgcccctggacccccagagcgacctgggcatcatccccagagtggccgaggagctgttcagactgatcctggagaacaccagcagaagccccaaggtggaggtgagcatcgtggaggtgtacaacaacgacatcttcgacctgctggccaaggacagcatcgccgccgtgagcggcgtgaagagagaggtggtgaccgccaaggacggcagaaccgaggtggccctgctggccagcgaggccgtgggcagcgccagcaagctgatggagctggtgcacggcggcctgcagctgagagccaagcaccccaccctggtgcacgccgacagcagcagaagccacctgatcatcaccgtgaccctgaccaccgccagctgcagcgacagcaccgccgaccaggcctgcagcgccaccctgcccagagagcagaccgaggccggcagagccggcagaagcagaagagccagccagggcgccctggccccccagctggtgcccggcaaccccgccggccacgccgagcaggtgcaggccagactgcagctggtggacagcgccggcagcgagtgcgtgggcggcgacgccaagctgctggtgatcctgtgcatcagccccagccagagacacctggcccagaccctgcagggcctgggcttcggcatcagagccagacaggtgcagagaggccccgccagaaagaagccccccagcagccagaccgagggcaagagaagacccgactag

SEQ ID NO: 86263 - DNA, 1155 bp, synthetic construct
  misc_feature 1..1155: note = Description of Artificial Sequence: Synthetic coding sequence
  source 1..1155: mol_type = other DNA
atgacctggaccagcggccagctgcagagagagaagcaggccagacccggcagcggcgccgtgctggccttccccgacgacaaggacctgagagtgtacggccccgccgagagccagagcgccgtgttcggcgacgtgtgccccctgctgaccagcctgctggacggctacaacgtgtgcgtgatggcctacggccagaccggcagcggcaagagctacaccatgctgggcagacacagcgacgacggccccgtgctgcccctggacccccagagcgacctgggcatcatccccagagtggccgaggagctgttcagactgatcctggagaacaccagcagaagccccaaggtggaggtgagcatcgtggaggtgtacaacaacgacatcttcgacctgctggccaaggacagcatcgccgccgtgagcggcgtgaagagagaggtggtgaccgccaaggacggcagaaccgaggtggccctgctggccagcgaggccgtgggcagcgccagcaagctgatggagctggtgcacggcggcctgcagctgagagccaagcaccccaccctggtgcacgccgacagcagcagaagccacctgatcatcaccgtgaccctgaccaccgccagctgcagcgacagcaccgccgaccaggcctgcagcgccaccctgcccagagagcagaccgaggccggcagagccggcagaagcagaagagccagccagggcgccctggccccccagctggtgcccggcaaccccgccggccacgccgagcaggtgcaggccagactgcagctggtggacagcgccggcagcgagtgcgtgggcgtgagcggcgtgaccggcctggccctgagagagatggcctgcatcagcagaagcctggccgccctggccggcgtgctgggcgccctgctggagcacagaggccacgccccctacagaaacagcagactgacccacctgctgcaggactgcctgggcggcgacgccaagctgctggtgatcctgtgcatcagccccagccagagacacctggcccagaccctgcagggcctgggcttcggcatcagagccagacaggtgcagagaggccccgccagaaagaagccccccagcagccagaccgagggcaagagaagacccgactag

SEQ ID NO: 86264 - DNA, 1155 bp, synthetic construct; identical to SEQ ID NO: 86263
  misc_feature 1..1155: note = Description of Artificial Sequence: Synthetic coding sequence
  source 1..1155: mol_type = other DNA

SEQ ID NO: 86265 - DNA, 5649 bp, synthetic construct
  misc_feature 1..5649: note = Description of Artificial Sequence: Synthetic coding sequence
  source 1..5649: mol_type = other DNA
atggtgggcagaggcgtgcccctgtgcgccgcccagcccgccgtggccgagggcggccccgccagagagcccccccccctgctggaggtgagccccagaaagagactgcccgccggccccgaccaggacccctgcggcagcagacccgcccccgagggcgccggcgccggccccgagcagggccacagcgccggcggcggcggctggtgcagacactgccacaccaagctggtggagctgaagagacaggcctggaagctggtgagcggccccggcaccaccctgagagacccctgcctgagcgccctgctgctggacaagctgcccgcccccggcgccctgcccgcctgcagacccgaggccgagagaagatgcgacgtgtgcgccacccacctgcagcagctgaccagagaggccatgcacctgctgcaggcccccgccagccacgaggacctggacgccccccacggcggccccagcctggccccccccagcaccaccaccagcagcagagacacccccggccccgccggccccgccggcagacagcccggcagagccggccccgacagaaccaagggcctggcctggagccccggccccagcgtgcaggtgagcgtggcccccgccggcctgggcggcgccctgagcaccgtgaccatccaggcccagcagtgcctggagggcatgtggagcgtgagcagagtgaacagcttcctgccccccgcctgcctggccgaggccgccgtggccgccgtggccgtggccgacaccgtgagagagtgcccccccgtggccggccccgacggcctgagcaaggcctggggcagaggcggcgtgtgcaccagcgccctggtgacccccacccccggcagcgtgggcggcagcaccggccccagcgccgccgccagcttcttcatcagagccatgcagaagctgagcctggccagcaagagaaagaagccccaccccccccccccccccgccaccagaggcaccagcacctaccccaccgacttcagcggcgtgctgcagctgtggcccccccccgcccccccctgcctgctgagagccgccagcaagaccaaggacaaccccggcagcatcggcaaggtgaaggtgatgctgagaatctggcccgcccagggcgcccagagaagcgccgaggccatgagcttcctgaaggtggaccccagaaagaagcaggtgatcctgtacgaccccgccgccggcccccccggcagcgccggccccagaagagccgccaccgccgccgtgcccaagatgttcgccttcgacgccgtgttcccccaggacagcgagcaggccgaggtgtgcagcggcaccgtggccgacgtgctgcagagcgtggtgagcggcgccgacggctgcatcttcagcttcggccacatgagcctgggcaagagctacaccatgatcggcaaggacagcagcccccagagcctgggcatcgtgccctgcgccatcagctggctgttcagactgatcgaggagagaagagagagaaccggcaccagattcagcgtgagagtgagcgccgtggaggtgtgcggcagagaccagagcctgagagacctgctggccgaggtggcccccggcagcctgcaggacacccagagccccggcgtgtacctgagagaggaccccgtgtgcggcgcccagctgcagaaccagagcgagctgagagcccccaccgccgagaaggccgccttctacctggacgccgccctggccgccagaagcaccagcagagccggctgcggcgaggacgccagaagaagcagccacatgctgttcaccctgcacgtgtaccagtacagaatggagaagtgcggcagaggcggcatgagcggcggcagaagcagactgcacctgatcgacctgggcagctgcgaggccgccgccggcagagccggcgaggccgccggcggccccctgtgcctgagcctgagcgccctgggcagcgtgatcctggccctggtgaacggcgccaagcacgtgccctacagagaccacagactgaccatgctgctgagagagagcctggccaccgccggctgcagaaccaccatgatcgcccacgtgagcgacgcccccgcccagcacgccgagaccctgagcaccgtgcagctggccgccagaatccacagactgagaagaaagaaggccaagtacgccagcagcagcagcggcggcgagagcagctgcgaggagggcagagccagaagacccccccacctgagacccttccaccccagaaccgtggccctggaccccgacagaacccccccctgcctgcccggcgaccccgactacagcagcagcagcgagcagagctgcgacaccgtgatctacgtgggccccggcggcgccgccctgagcgacagagagctgaccgacaacgagggcccccccgacttcgtgcccatcatccccgccctgagcagacacagacccagcaagggccccagagacgccgaccacttcagatgcagcaccttcgccgagctgcaggagagactggagtgcatggacggcaacgagggccccagcggcggccccggcggcaccgacggcgcccaggccagccccgccagaggcggcagaaagcccagcccccccgaggccgccagccccagaaaggccgtgggcacccccatggccgccagcacccccagaggcagcagcggccccgacacccaccagggcacccccgagccctgcaaggccatcgtgtggggcgaccagagagaggacagcagcgcctggcccgagctgctggtgcccgagaaggccgccgtgagcggcggcagaagacccctgcccagccccgcccccccccccccccagctgctggaggcctgcagagcccccgaggagcccggcggcggcggcaccgacggcgtggccagaaccccccccgtgggcatgagcggccaggtggccggcagccccatgctgcccggcgccacctgccccagactggccgccggcagcagatgccccgagagaggcctgctgaccaccaccgtgaccctgcagagacccgtggagctgaacggcgaggacgagctggtgttcaccgtggtggaggagctgagcctgggcgccctggccggcgccggcagacccaccagcctggccagcttcgacagcgactgcagcctgagagccctggccagcggcagcagacccgtgagcatcatcagcagcatcaacgacgagttcgacgcctacaccagccaggcccccgagggcggccccctggagggcgccgcctgggccggcagcagccacggcagcagcatcagcagctggctgagcgaggtgagcgtgtgcaccgccgacagcagagaccccaccccccagcccagattcagccccgacagcctggccggcctggaccccggcggcccccccgccctggacggcagcctgggcgacggcagcagcggcttcctgggccccgacagacccgacagccccggccccacctggggcccctgccccggcgaggtggccgccgtggcccccagcagacccggcagagagccccaggccggccccagcagatgggccagcgccgcccagaccatccacagcagcctgcccagaaagcccagaaccgccagcgccaccaccagagtgggctgcgccagactgggccagagcccccccggcagaggcggcctgttcgaggacccctggctgctgagagtgggcgagtgcgacacccaggccgccagcgccggcagagcccccagccccaccctgggcagccccagactgcccgaggcccaggtgatgctggcctgcgcccagagagtggtggacggctgcgaggtggccgccagagccgccagaagacccgaggccgtggccagaatcccccccctgagaagaggcgccaccaccctgggcgtgaccacccccgccgtgagctggggcgacgcccccaccgaggtggtggcctgcagcggcagcctgaaggccagccccaccagcaagaagggcctggcccccaaggccggcttcctgcccagacccagcggcgccgccccccccgccccccccaccagaaagagcagcctggagcagagaagcagccccgccagcgcccccccccacgccgtgaaccccgccagagtgggcgccgccgccgtgctgagaggcgaggaggagcccagacccagcagcagagccgaccacagcgtgcccagagccaccagcagcctgaaggccagagccagcaaggtggaggccgcccacagactggccggccacgccagcctggagagatacgagggcctggcccacagcagcagcaagggcagagaggcccccggcagaccccccagagccgtgcccaagctgggcgtgccccccagcagccccacccacggccccgcccccgcctgcagaagcggcgccgccaaggccgtgggcgcccccaagccccccgtgggcggcggcaagggcagaggcctggtggccggcggcagcagagccctgggccccagcgtgaagctgagcaccgccagcgtgaccggcagaagccccggcggccccgtggccggccccagagccgcccccagagccggccccagcgtgggcgccaaggccggcagaggcaccgtgatgggcaccaagcaggccctgagagccgcccacagcagagtgcacgagctgagcgccagcggcgcccccggcagaggcggcagcagctggggcagcgccgacagcgacagcggccacgacagcggcgtgaacgtgggcgaggagagaccccccaccggccccgccctgcccagcccctacagcaaggtgaccgcccccagaagaccccagagatacagcagcggccacggcagcgacaacagcagcgtgctgagcggcgagctgccccccgccatgggcagaaccgccctgttccaccacagcggcggcagcagcggctacgagagcctgagaagagacagcgaggccaccggcagcgccagcagcgcccccgacagcatgagcgagagcggcgccgccagccccggcgccagaaccagaagcctgaagagccccaagaagagagccaccggcctgcagagaagaagactgatccccgcccccctgcccgacaccaccgccctgggcagaaagcccagcctgcccggccagtgggtggacctgcccccccccctggccggcagcctgaaggagcccttcgagatcaaggtgtacgagatcgacgacgtggagagactgcagagacccagacccacccccagagaggcccccacccagggcctggcctgcgtgagcaccagactgagactggccgagagaagacagcagagactgagagaggtgcaggccaagcacaagcacctgtgcgaggagctggccgagacccagggcagactgatgctggagcccggcagatggctggagcagttcgaggtggaccccgagctggagcccgagagcgccgagtacctggccgccctggagagagccaccgccgccctggagcagtgcgtgaacctgtgcaaggcccacgtgatgatggtgacctgcttcgacatcagcgtggccgccagcgccgccatccccggcccccaggaggtggacgtgtag

SEQ ID NO: 86266 - DNA, 5184 bp, synthetic construct
  misc_feature 1..5184: note = Description of Artificial Sequence: Synthetic coding sequence
  source 1..5184: mol_type = other DNA
atgatgatggactggaaggccgtggccgcccagaagctgaacctgagcagcaagaagaagaagcacagacccagcaccagcagcgccgccgagccccccctgttcgccaccagcttcagcggcatcctgcagaccagccccccccccgcccccccctgcctgctgagagccgtgaacaaggtgaaggacacccccggcctgggcaaggtgaaggtgatgctgagaatctgcagcaccctggccagagacaccagcgagagcagcagcttcctgaaggtggaccccagaaagaagcagatcaccctgtacgaccccctgacctgcggcggccagaacgccttccagaagagaggcaaccaggtgccccccaagatgttcgccttcgacgccgtgttcccccaggacgccagccaggccgaggtgtgcgccggcaccgtggccgaggtgatccagagcgtggtgaacggcgccgacggctgcgtgttctgcttcggccacgccaagctgggcaagagctacaccatgatcggcaaggacgacagcatgcagaacctgggcatcatcccctgcgccatcagctggctgttcaagctgatcaacgagagaaaggagaagaccggcgccagattcagcgtgagagtgagcgccgtggaggtgtggggcaaggaggagaacctgagagacctgctgagcgaggtggccaccggcagcctgcaggacggccagagccccggcgtgtacctgtgcgaggaccccatctgcggcacccagctgcagaaccagagcgagctgagagcccccaccgccgagaaggccgccttcttcctggacgccgccatcgccagcagaagaagccaccagcaggactgcgacgaggacgaccacagaaacagccacgtgttcttcaccctgcacatctaccagtacagaatggagaagagcggcaagggcggcatgagcggcggcagaagcagactgcacctgatcgacctgggcagctgcgtgaaggccctgagcaagaacagagagggcggcagcggcctgtgcctgagcctgagcgccctgggcaacgtgatcctggccctggtgaacggcagcaagcacatcccctacaaggagagcaagctggccatgctgctgagagagagcctgggcaacatgaactgcagaaccaccatgatcgcccacatcagcgccgccgtgggcagctacgccgagaccctgagcaccatccagatcgccagcagagtgctgagaatgaagaagaagaagaccaagtacaccagcagcagcagcggcggcgagagcagctgcgaggagggcagaatgagaagacccacccagctgagacccttccacaccagagccaccgtggaccccgacttccccatcgcccacctgagcagcgaccccgactacagcagcagcagcgagcagagctgcgacaccgtgatctacatcggccccaacggcaccgccctgagcgacaaggagctgaccgacaacgagggcccccccgacttcgtgcccatcgtgcccgccctgcagaagaccagaggcgacagcagacccgccgaggccggcgaggccgccgccggcaagagcgagagagactgcctgaagtgcaacaccttcgccgagctgcaggagagactggactgcatcgacggcagcgaggagcccagcagcttccccttcgaggagctgcccgcccagttcggccccgagcaggccagcagaggccccagactgagccaggccgccggcgccagccccctgagcgagagcgacaaggaggacaacggcagcgagggccagctgaccaacagagagggccccgagctgcccgccagcaagatgcagagaagccacagccccgtgcccgccgccgcccccgcccacagccccagccccgccagccccagaagcgtgcccggcagcagcagccagcacagcgccagccccctggtgcagagccccagcctgcagagcagcagagagagcctgaacagctgcggcttcgtggagggcaagcccagacccatgggcagccccagactgggcatcgccagcctgagcaagaccagcgagtacaagccccccagcagccccagccagagatgcaaggtgtacacccagaagggcgtgctgcccagccccgcccccctgccccccagcagcaaggacagcggcgtggccagcagagagagcctgctgcagcccgaggtgagaaccccccccgtgggcatgagcccccaggtgctgaagaagagcatgagcgccggcagcgagggcttccccgagacccccgtggacgacgagcagcaggccgccacccccagcgagagcaagaaggagatcctgagcaccaccatggtgaccgtgcagcagcccctggagctgaacggcgaggacgagctggtgttcaccctggtggaggagctgaccatcagcggcgtgctggacagcggcagacccaccagcatcatcagcttcaacagcgactgcagcgccagagccctggccagcggcagcagacccgtgagcatcatcagcagcatcagcgaggacctggagtgctacagcagcaccgcccccgtgagcgaggtgagcatcacccagttcctgcccctgcccaagatgagcctggacgagaaggcccaggacgccggcagcagaagaagcagcatcagcagctggctgagcgagatgagcgccggcagcgagggcgagcagagctgccacagcttcatcgcccagacctgcttcggccacggcgaggccatggccgagcccgtggccagcgagttcgtgagcagcctgcagaacaccgccgtggtgtgcagagagaagcccaaggccagccccgacaacctgctgatcctgagcgagatgggcgacgacagcttcaacaaggccgcccccatcaagggctgcaagatcagcaccgtgagcaaggccatggtgaccatcagcaacaccgccaacctgagcagctgcgagggctacatccccatgaagaccaacatcaccgtgtacccctgcatcgccatgagccccagaaacatccaggagcccgaggcccccaccgccacccccaaggccggccccaccctggcccagagcagagagagcaaggagaacagcgccaagaaggagatgaagttcgaggacccctggctgaagagagaggaggaggtgaagaaggagaccgcccaccccaacgaggagggcatgatgagatgcgagaccgccaccggccccagcaacgccgagaccagagccgagcaggagcaggacggcaagcccagccccggcgacagactgagcagcagcagcggcgaggtgagcgccagccccgtgaccgacaacttcagaagagtggtggacggctgcgagatggccctgcccggcctggccacccagagccccgtgcaccccaacaagagcgtgaagagcagcagcctgcccagagccttccagaaggccagcagacaggaggagcccgacagcctgagctactactgcgccgccgagaccaacggcgtgggcgccgccagcggcaccccccccagcaaggccaccctggagggcaaggtggccagccccaagcactgcgtgctggccagacccaagggcaccccccccctgccccccgtgagaaagagcagcctggaccagaagaacagagccagcccccagcacagcgccagcggcagcggcaccagcagccccctgaaccagcccgccgccttccccgccggcctgcccgacgagcccagcggcaagaccaaggacgccagcagcagcagcaagctgttcagcgccaagctggagcagctggccagcagaagcaacagcctgggcagagccaccgtgagccactacgagtgcctgagcctggagagagccgagagcctgagcagcgtgagcagcagactgcacgccggcaaggacggcaccatgcccagagccggcagaagcctgggcagaagcgccggcaccagcccccccagcagcggcgccagccccaaggccggccagagcaagatcagcgccgtgagcagactgctgctggccagccccagagccagaggccccagcgccagcaccaccaagaccctgagcttcagcaccaagagcctgccccaggccgtgggccagggcagcagcagcccccccggcggcaagcacaccccctggagcacccagagcctgagcagaaacagaagcagcggcctggccagcaagctgcccctgagagccgtgagcggcagaatcagcgagctgctgcagggcggcgccggcgccagaggcctgcagctgagagccggccccgaggccgaggccagaggcggcgccctggccgaggacgagcccgccgccgcccacctgctgcccagcccctacagcaagatcaccccccccagaagaccccacagatgcagcagcggccacggcagcgacaacagcagcgtgctgagcggcgagctgccccccgccatgggcaagaccgccctgttctaccacagcggcggcagcagcggctacgagagcgtgatgagagacagcgaggccaccggcagcgccagcagcgcccaggacagcaccagcgagaacagcagcagcgtgggcggcagatgcagaagcctgaagacccccaagaagagaagcaaccccggcagccagagaagaagactgatccccgccctgagcctggacaccagcagccccgtgagaaagccccccaacagcaccggcgtgagatgggtggacggccccctgagaagcagccccagaggcctgggcgagcccttcgagatcaaggtgtacgagatcgacgacgtggagagactgcagagaagaagaggcggcgccagcaaggaggccatgtgcttcaacgccaagctgaagatcctggagcacagacagcagagaatcgccgaggtgagagccaagtacgagtggctgatgaaggagctggaggccaccaagcagtacctgatgctggaccccaacaagtggctgagcgagttcgacctggagcaggtgtgggagctggacagcctggagtacctggaggccctggagtgcgtgaccgagagactggagagcagagtgaacttctgcaaggcccacctgatgatgatcacctgcttcgacatcaccagcagaagaagatag

SEQ ID NO: 86267 - DNA, 6327 bp, synthetic construct
  misc_feature 1..6327: note = Description of Artificial Sequence: Synthetic coding sequence
  source 1..6327: mol_type = other DNA
atgaacagcgtggccggcaacaaggagagactggccgtgagcaccagaggcaagaagtacggcgtgaacgaggtgtgcagccccaccaagcccgccgcccccttcagccccgagagctggtacagaaaggcctacgaggagagcagagccggcagcagacccacccccgagggcgccggcagcgccctgggcagcagcggcacccccagccccggcagcggcaccagcagccccagcagcttcaccggcagccccggccccgccagccccggcatcggcaccagcagccccggcagcctgggcggcagccccggcttcggcaccggcagccccggcagcggcagcggcggcggcagcagccccggcagcgacagaggcgtgtggtgcgagaactgcaacgccagactggtggagctgaagagacaggccctgagactgctgctgcccggccccttccccggcaaggaccccgccttcagcgccgtgatccacgacaagctgcaggtgcccaacaccatcagaaaggcctggaacgacagagacaacagatgcgacatctgcgccacccacctgaaccagctgaagcaggaggccatccagatggtgctgaccctggagcaggccgccggcagcgagcactacgacgccagcccctgcagccccccccccctgagcaacatccccaccctggtgggcagcagacacgtgggcggcctgcagcagcccagagactgggccttcgtgcccgccccctgcgccaccagcaactacaccggcttcgccaacaagcacggcagcaagcccagcagcctgggcgtgagcaacggcgccgagaagaagagcggcagccccacccaccaggccaaggtgagcctgcagatggccaccagccccagcaacggcaacatcctgaacagcgtggccatccaggcccaccagtacctggacggcacctggagcctgagcagaaccaacggcgtgaccctgtacccctaccagatcagccagctgatgaccgagagcagcagagagggcctgaccgaggccgtgctgaacagatacaacgccgacaagcccagcgcctgcagcgtgcccgccagccagggcagctgcgtggccagcgagaccagcaccggcaccagcgtggccgccagcttcttcgccagagccgcccagaagctgaacctgagcagcaagaagaagaagcacagacccagcaccagcagcgccgccgagccccccctgttcgccaccagcttcagcggcatcctgcagaccagccccccccccgcccccccctgcctgctgagagccgtgaacaaggtgaaggacacccccggcctgggcaaggtgaaggtgatgctgagaatctgcagcaccctggccagagacaccagcgagagcagcagcttcctgaaggtggaccccagaaagaagcagatcaccctgtacgaccccctgacctgcggcggccagaacgccttccagaagagaggcaaccaggtgccccccaagatgttcgccttcgacgccgtgttcccccaggacgccagccaggccgaggtgtgcgccggcaccgtggccgaggtgatccagagcgtggtgaacggcgccgacggctgcgtgttctgcttcggccacgccaagctgggcaagagctacaccatgatcggcaaggacgacagcatgcagaacctgggcatcatcccctgcgccatcagctggctgttcaagctgatcaacgagagaaaggagaagaccggcgccagattcagcgtgagagtgagcgccgtggaggtgtggggcaaggaggagaacctgagagacctgctgagcgaggtggccaccggcagcctgcaggacggccagagccccggcgtgtacctgtgcgaggaccccatctgcggcacccagctgcagaaccagagcgagctgagagcccccaccgccgagaaggccgccttcttcctggacgccgccatcgccagcagaagaagccaccagcaggactgcgacgaggacgaccacagaaacagccacgtgttcttcaccctgcacatctaccagtacagaatggagaagagcggcaagggcggcatgagcggcggcagaagcagactgcacctgatcgacctgggcagctgcgtgaaggccctgagcaagaacagagagggcggcagcggcctgtgcctgagcctgagcgccctgggcaacgtgatcctggccctggtgaacggcagcaagcacatcccctacaaggagagcaagctggccatgctgctgagagagagcctgggcaacatgaactgcagaaccaccatgatcgcccacatcagcgccgccgtgggcagctacgccgagaccctgagcaccatccagatcgccagcagagtgctgagaatgaagaagaagaagaccaagtacaccagcagcagcagcggcggcgagagcagctgcgaggagggcagaatgagaagacccacccagctgagacccttccacaccagagccaccgtggaccccgacttccccatcgcccacctgagcagcgaccccgactacagcagcagcagcgagcagagctgcgacaccgtgatctacatcggccccaacggcaccgccctgagcgacaaggagctgaccgacaacgagggcccccccgacttcgtgcccatcgtgcccgccctgcagaagaccagaggcgacagcagacccgccgaggccggcgaggccgccgccggcaagagcgagagagactgcctgaagtgcaacaccttcgccgagctgcaggagagactggactgcatcgacggcagcgaggagcccagcagcttccccttcgaggagctgcccgcccagttcggccccgagcaggccagcagaggccccagactgagccaggccgccggcgccagccccctgagcgagagcgacaaggaggacaacggcagcgagggccagctgaccaacagagagggccccgagctgcccgccagcaagatgcagagaagccacagccccgtgcccgccgccgcccccgcccacagccccagccccgccagccccagaagcgtgcccggcagcagcagccagcacagcgccagccccctggtgcagagccccagcctgcagagcagcagagagagcctgaacagctgcggcttcgtggagggcaagcccagacccatgggcagccccagactgggcatcgccagcctgagcaagaccagcgagtacaagccccccagcagccccagccagagatgcaaggtgtacacccagaagggcgtgctgcccagccccgcccccctgccccccagcagcaaggacagcggcgtggccagcagagagagcctgctgcagcccgaggtgagaaccccccccgtgggcatgagcccccaggtgctgaagaagagcatgagcgccggcagcgagggcttccccgagacccccgtggacgacgagcagcaggccgccacccccagcgagagcaagaaggagatcctgagcaccaccatggtgaccgtgcagcagcccctggagctgaacggcgaggacgagctggtgttcaccctggtggaggagctgaccatcagcggcgtgctggacagcggcagacccaccagcatcatcagcttcaacagcgactgcagcgccagagccctggccagcggcagcagacccgtgagcatcatcagcagcatcagcgaggacctggagtgctacagcagcaccgcccccgtgagcgaggtgagcatcacccagttcctgcccctgcccaagatgagcctggacgagaaggcccaggacgccggcagcagaagaagcagcatcagcagctggctgagcgagatgagcgccggcagcgagggcgagcagagctgccacagcttcatcgcccagacctgcttcggccacggcgaggccatggccgagcccgtggccagcgagttcgtgagcagcctgcagaacaccgccgtggtgtgcagagagaagcccaaggccagccccgacaacctgctgatcctgagcgagatgggcgacgacagcttcaacaaggccgcccccatcaagggctgcaagatcagcaccgtgagcaaggccatggtgaccatcagcaacaccgccaacctgagcagctgcgagggctacatccccatgaagaccaacatcaccgtgtacccctgcatcgccatgagccccagaaacatccaggagcccgaggcccccaccgccacccccaaggccggccccaccctggcccagagcagagagagcaaggagaacagcgccaagaaggagatgaagttcgaggacccctggctgaagagagaggaggaggtgaagaaggagaccgcccaccccaacgaggagggcatgatgagatgcgagaccgccaccggccccagcaacgccgagaccagagccgagcaggagcaggacggcaagcccagccccggcgacagactgagcagcagcagcggcgaggtgagcgccagccccgtgaccgacaacttcagaagagtggtggacggctgcgagatggccctgcccggcctggccacccagagccccgtgcaccccaacaagagcgtgaagagcagcagcctgcccagagccttccagaaggccagcagacaggaggagcccgacagcctgagctactactgcgccgccgagaccaacggcgtgggcgccgccagcggcaccccccccagcaaggccaccctggagggcaaggtggccagccccaagcactgcgtgctggccagacccaagggcaccccccccctgccccccgtgagaaagagcagcctggaccagaagaacagagccagcccccagcacagcgccagcggcagcggcaccagcagccccctgaaccagcccgccgccttccccgccggcctgcccgacgagcccagcggcaagaccaaggacgccagcagcagcagcaagctgttcagcgccaagctggagcagctggccagcagaagcaacagcctgggcagagccaccgtgagccactacgagtgcctgagcctggagagagccgagagcctgagcagcgtgagcagcagactgcacgccggcaaggacggcaccatgcccagagccggcagaagcctgggcagaagcgccggcaccagcccccccagcagcggcgccagccccaaggccggccagagcaagatcagcgccgtgagcagactgctgctggccagccccagagccagaggccccagcgccagcaccaccaagaccctgagcttcagcaccaagagcctgccccaggccgtgggccagggcagcagcagcccccccggcggcaagcacaccccctggagcacccagagcctgagcagaaacagaagcagcggcctggccagcaagctgcccctgagagccgtgagcggcagaatcagcgagctgctgcagggcggcgccggcgccagaggcctgcagctgagagccggccccgaggccgaggccagaggcggcgccctggccgaggacgagcccgccgccgcccacctgctgcccagcccctacagcaagatcaccccccccagaagaccccacagatgcagcagcggccacggcagcgacaacagcagcgtgctgagcggcgagctgccccccgccatgggcaagaccgccctgttctaccacagcggcggcagcagcggctacgagagcgtgatgagagacagcgaggccaccggcagcgccagcagcgcccaggacagcaccagcgagaacagcagcagcgtgggcggcagatgcagaagcctgaagacccccaagaagagaagcaaccccggcagccagagaagaagactgatccccgccctgagcctggacaccagcagccccgtgagaaagccccccaacagcaccggcgtgagatgggtggacggccccctgagaagcagccccagaggcctgggcgagcccttcgagatcaaggtgtacgagatcgacgacgtggagagactgcagagaagaagaggcggcgccagcaaggaggccatgtgcttcaacgccaagctgaagatcctggagcacagacagcagagaatcgccgaggtgagagccaagtacgagtggctgatgaaggagctggaggccaccaagcagtacctgatgctggaccccaacaagtggctgagcgagttcgacctggagcaggtgtgggagctggacagcctggagtacctggaggccctggagtgcgtgaccgagagactggagagcagagtgaacttctgcaaggcccacctgatgatgatcacctgcttcgacatcaccagcagaagaagatag

SEQ ID NO: 86268 - DNA, 5175 bp, synthetic construct
  misc_feature 1..5175: note = Description of Artificial Sequence: Synthetic coding sequence
  source 1..5175: mol_type = other DNA
gactggaagaccaaggccgcccagaagctgaacctgagcagcaagaagaagaagcacagacccagcaccagcagcgccgccgagccccccctgttcgccaccagcttcagcggcatcctgcagaccagccccccccccgcccccccctgcctgctgagagccgtgaacaaggtgaaggacacccccggcctgggcaaggtgaaggtgatgctgagaatctgcagcaccctggccagagacaccagcgagagcagcagcttcctgaaggtggaccccagaaagaagcagatcaccctgtacgaccccctgacctgcggcggccagaacgccttccagaagagaggcaaccaggtgccccccaagatgttcgccttcgacgccgtgttcccccaggacgccagccaggccgaggtgtgcgccggcaccgtggccgaggtgatccagagcgtggtgaacggcgccgacggctgcgtgttctgcttcggccacgccaagctgggcaagagctacaccatgatcggcaaggacgacagcatgcagaacctgggcatcatcccctgcgccatcagctggctgttcaagctgatcaacgagagaaaggagaagaccggcgccagattcagcgtgagagtgagcgccgtggaggtgtggggcaaggaggagaacctgagagacctgctgagcgaggtggccaccggcagcctgcaggacggccagagccccggcgtgtacctgtgcgaggaccccatctgcggcacccagctgcagaaccagagcgagctgagagcccccaccgccgagaaggccgccttcttcctggacgccgccatcgccagcagaagaagccaccagcaggactgcgacgaggacgaccacagaaacagccacgtgttcttcaccctgcacatctaccagtacagaatggagaagagcggcaagggcggcatgagcggcggcagaagcagactgcacctgatcgacctgggcagctgcgtgaaggccctgagcaagaacagagagggcggcagcggcctgtgcctgagcctgagcgccctgggcaacgtgatcctggccctggtgaacggcagcaagcacatcccctacaaggagagcaagctggccatgctgctgagagagagcctgggcaacatgaactgcagaaccaccatgatcgcccacatcagcgccgccgtgggcagctacgccgagaccctgagcaccatccagatcgccagcagagtgctgagaatgaagaagaagaagaccaagtacaccagcagcagcagcggcggcgagagcagctgcgaggagggcagaatgagaagacccacccagctgagacccttccacaccagagccaccgtggaccccgacttccccatcgcccacctgagcagcgaccccgactacagcagcagcagcgagcagagctgcgacaccgtgatctacatcggccccaacggcaccgccctgagcgacaaggagctgaccgacaacgagggcccccccgacttcgtgcccatcgtgcccgccctgcagaagaccagaggcgacagcagacccgccgaggccggcgaggccgccgccggcaagagcgagagagactgcctgaagtgcaacaccttcgccgagctgcaggagagactggactgcatcgacggcagcgaggagcccagcagcttccccttcgaggagctgcccgcccagttcggccccgagcaggccagcagaggccccagactgagccaggccgccggcgccagccccctgagcgagagcgacaaggaggacaacggcagcgagggccagctgaccaacagagagggccccgagctgcccgccagcaagatgcagagaagccacagccccgtgcccgccgccgcccccgcccacagccccagccccgccagccccagaagcgtgcccggcagcagcagccagcacagcgccagccccctggtgcagagccccagcctgcagagcagcagagagagcctgaacagctgcggcttcgtggagggcaagcccagacccatgggcagccccagactgggcatcgccagcctgagcaagaccagcgagtacaagccccccagcagccccagccagagatgcaaggtgtacacccagaagggcgtgctgcccagccccgcccccctgccccccagcagcaaggacagcggcgtggccagcagagagagcctgctgcagcccgaggtgagaaccccccccgtgggcatgagcccccaggtgctgaagaagagcatgagcgccggcagcgagggcttccccgagacccccgtggacgacgagcagcaggccgccacccccagcgagagcaagaaggagatcctgagcaccaccatggtgaccgtgcagcagcccctggagctgaacggcgaggacgagctggtgttcaccctggtggaggagctgaccatcagcggcgtgctggacagcggcagacccaccagcatcatcagcttcaacagcgactgcagcgccagagccctggccagcggcagcagacccgtgagcatcatcagcagcatcagcgaggacctggagtgctacagcagcaccgcccccgtgagcgaggtgagcatcacccagttcctgcccctgcccaagatgagcctggacgagaaggcccaggacgccggcagcagaagaagcagcatcagcagctggctgagcgagatgagcgccggcagcgagggcgagcagagctgccacagcttcatcgcccagacctgcttcggccacggcgaggccatggccgagcccgtggccagcgagttcgtgagcagcctgcagaacaccgccgtggtgtgcagagagaagcccaaggccagccccgacaacctgctgatcctgagcgagatgggcgacgacagcttcaacaaggccgcccccatcaagggctgcaagatcagcaccgtgagcaaggccatggtgaccatcagcaacaccgccaacctgagcagctgcgagggctacatccccatgaagaccaacatcaccgtgtacccctgcatcgccatgagccccagaaacatccaggagcccgaggcccccaccgccacccccaaggccggccccaccctggcccagagcagagagagcaaggagaacagcgccaagaaggagatgaagttcgaggacccctggctgaagagagaggaggaggtgaagaaggagaccgcccaccccaacgaggagggcatgatgagatgcgagaccgccaccggccccagcaacgccgagaccagagccgagcaggagcaggacggcaagcccagccccggcgacagactgagcagcagcagcggcgaggtgagcgccagccccgtgaccgacaacttcagaagagtggtggacggctgcgagatggccctgcccggcctggccacccagagccccgtgcaccccaacaagagcgtgaagagcagcagcctgcccagagccttccagaaggccagcagacaggaggagcccgacagcctgagctactactgcgccgccgagaccaacggcgtgggcgccgccagcggcaccccccccagcaaggccaccctggagggcaaggtggccagccccaagcactgcgtgctggccagacccaagggcaccccccccctgccccccgtgagaaagagcagcctggaccagaagaacagagccagcccccagcacagcgccagcggcagcggcaccagcagccccctgaaccagcccgccgccttccccgccggcctgcccgacgagcccagcggcaagaccaaggacgccagcagcagcagcaagctgttcagcgccaagctggagcagctggccagcagaagcaacagcctgggcagagccaccgtgagccactacgagtgcctgagcctggagagagccgagagcctgagcagcgtgagcagcagactgcacgccggcaaggacggcaccatgcccagagccggcagaagcctgggcagaagcgccggcaccagcccccccagcagcggcgccagccccaaggccggccagagcaagatcagcgccgtgagcagactgctgctggccagccccagagccagaggccccagcgccagcaccaccaagaccctgagcttcagcaccaagagcctgccccaggccgtgggccagggcagcagcagcccccccggcggcaagcacaccccctggagcacccagagcctgagcagaaacagaagcagcggcctggccagcaagctgcccctgagagccgtgagcggcagaatcagcgagctgctgcagggcggcgccggcgccagaggcctgcagctgagagccggccccgaggccgaggccagaggcggcgccctggccgaggacgagcccgccgccgcccacctgctgcccagcccctacagcaagatcaccccccccagaagaccccacagatgcagcagcggccacggcagcgacaacagcagcgtgctgagcggcgagctgccccccgccatgggcaagaccgccctgttctaccacagcggcggcagcagcggctacgagagcgtgatgagagacagcgaggccaccggcagcgccagcagcgcccaggacagcaccagcgagaacagcagcagcgtgggcggcagatgcagaagcctgaagacccccaagaagagaagcaaccccggcagccagagaagaagactgatccccgccctgagcctggacaccagcagccccgtgagaaagccccccaacagcaccggcgtgagatgggtggacggccccctgagaagcagccccagaggcctgggcgagcccttcgagatcaaggtgtacgagatcgacgacgtggagagactgcagagaagaagaggcggcgccagcaaggaggccatgtgcttcaacgccaagctgaagatcctggagcacagacagcagagaatcgccgaggtgagagccaagtacgagtggctgatgaaggagctggaggccaccaagcagtacctgatgctggaccccaacaagtggctgagcgagttcgacctggagcaggtgtgggagctggacagcctggagtacctggaggccctggagtgcgtgaccgagagactggagagcagagtgaacttctgcaaggcccacctgatgatgatcacctgcttcgacatcaccagcagaagaagatag

SEQ ID NO: 86269 - DNA, 2016 bp, synthetic construct
  misc_feature 1..2016: note = Description of Artificial Sequence: Synthetic coding sequence
  source 1..2016: mol_type = other DNA
atgatcgacttcgacgacgtggccgccatcaaccccgagctgctgcagctgctgcccctgcaccccaaggacaacctgcccctgcaggagaacgtgaccatccagaagcagaagagaagaagcgtgaacagcaagatccccgcccccaaggagagcctgagaagcagaagcaccagaatgagcaccgtgagcgagctgagaatcaccgcccaggagaacgacatggaggtggagctgcccgccgccgccaacagcagaaagcagttcagcgtgccccccgcccccaccagacccagctgccccgccgtggccgagatccccctgagaatggtgagcgaggagatggaggagcaggtgcacagcatcagaggcagcagcagcgccaaccccgtgaacagcgtgagaagaaagagctgcctggtgaaggaggtggagaagatgaagaacaagagagaggagaagaaggcccagaacagcgagatgagaatgaagagagcccaggagtacgacagcagcttccccaactgggagttcgccagaatgatcaaggagttcagagccaccctggagtgccaccccctgaccatgaccgaccccatcgaggagcacagaatctgcgtgtgcgtgagaaagagacccctgaacaagcaggagctggccaagaaggagatcgacgtgatcagcatccccagcaagtgcctgctgctggtgcacgagcccaagctgaaggtggacctgaccaagtacctggagaaccaggccttctgcttcgacttcgccttcgacgagaccgccagcaacgaggtggtgtacagattcaccgccagacccctggtgcagaccatcttcgagggcggcaaggccacctgcttcgcctacggccagaccggcagcggcaagacccacaccatgggcggcgacctgagcggcaaggcccagaacgccagcaagggcatctacgccatggccagcagagacgtgttcctgctgaagaaccagccctgctacagaaagctgggcctggaggtgtacgtgaccttcttcgagatctacaacggcaagctgttcgacctgctgaacaagaaggccaagctgagagtgctggaggacggcaagcagcaggtgcaggtggtgggcctgcaggagcacctggtgaacagcgccgacgacgtgatcaagatgatcgacatgggcagcgcctgcagaaccagcggccagaccttcgccaacagcaacagcagcagaagccacgcctgcttccagatcatcctgagagccaagggcagaatgcacggcaagttcagcctggtggacctggccggcaacgagagaggcgccgacaccagcagcgccgacagacagaccagaatggagggcgccgagatcaacaagagcctgctggccctgaaggagtgcatcagagccctgggccagaacaaggcccacacccccttcagagagagcaagctgacccaggtgctgagagacagcttcatcggcgagaacagcagaacctgcatgatcgccaccatcagccccggcatcagcagctgcgagtacaccctgaacaccctgagatacgccgacagagtgaaggagctgagcccccacagcggccccagcggcgagcagctgatccagatggagaccgaggagatggaggcctgcagcaacggcgccctgatccccggcaacctgagcaaggaggaggaggagctgagcagccagatgagcagcttcaacgaggccatgacccagatcagagagctggaggagaaggccatggaggagctgaaggagatcatccagcagggccccgactggctggagctgagcgagatgaccgagcagcccgactacgacctggagaccttcgtgaacaaggccgagagcgccctggcccagcaggccaagcacttcagcgccctgagagacgtgatcaaggccctgagactggccatgcagctggaggagcaggccagcagacagatcagcagcaagaagagaccccagtag

SEQ ID NO: 86270 - DNA, 2055 bp, synthetic construct
  misc_feature 1..2055: note = Description of Artificial Sequence: Synthetic coding sequence
  source 1..2055: mol_type = other DNA
atggccatggacagcagcctgcaggccagactgttccccggcctggccatcaagatccagagaagcaacggcctgatccacagcgccaacgtgagaaccgtgaacctggagaagagctgcgtgagcgtggagtgggccgagggcggcgccaccaagggcaaggagatcgacttcgacgacgtggccgccatcaaccccgagctgctgcagctgctgcccctgcaccccaaggacaacctgcccctgcaggagaacgtgaccatccagaagcagaagagaagaagcgtgaacagcaagatccccgcccccaaggagagcctgagaagcagaagcaccagaatgagcaccgtgagcgagctgagaatcaccgcccaggagaacgacatggaggtggagctgcccgccgccgccaacagcagaaagcagttcagcgtgcccctgagaagaaagagctgcctggtgaaggaggtggagaagatgaagaacaagagagaggagaagaaggcccagaacagcgagatgagaatgaagagagcccaggagtacgacagcagcttccccaactgggagttcgccagaatgatcaaggagttcagagccaccctggagtgccaccccctgaccatgaccgaccccatcgaggagcacagaatctgcgtgtgcgtgagaaagagacccctgaacaagcaggagctggccaagaaggagatcgacgtgatcagcatccccagcaagtgcctgctgctggtgcacgagcccaagctgaaggtggacctgaccaagtacctggagaaccaggccttctgcttcgacttcgccttcgacgagaccgccagcaacgaggtggtgtacagattcaccgccagacccctggtgcagaccatcttcgagggcggcaaggccacctgcttcgcctacggccagaccggcagcggcaagacccacaccatgggcggcgacctgagcggcaaggcccagaacgccagcaagggcatctacgccatggccagcagagacgtgttcctgctgaagaaccagccctgctacagaaagctgggcctggaggtgtacgtgaccttcttcgagatctacaacggcaagctgttcgacctgctgaacaagaaggccaagctgagagtgctggaggacggcaagcagcaggtgcaggtggtgggcctgcaggagcacctggtgaacagcgccgacgacgtgatcaagatgatcgacatgggcagcgcctgcagaaccagcggccagaccttcgccaacagcaacagcagcagaagccacgcctgcttccagatcatcctgagagccaagggcagaatgcacggcaagttcagcctggtggacctggccggcaacgagagaggcgccgacaccagcagcgccgacagacagaccagaatggagggcgccgagatcaacaagagcctgctggccctgaaggagtgcatcagagccctgggccagaacaaggcccacacccccttcagagagagcaagctgacccaggtgctgagagacagcttcatcggcgagaacagcagaacctgcatgatcgccaccatcagccccggcatcagcagctgcgagtacaccctgaacaccctgagatacgccgacagagtgaaggagctgagcccccacagcggccccagcggcgagcagctgatccagatggagaccgaggagatggaggcctgcagcaacggcgccctgatccccggcaacctgagcaaggaggaggaggagctgagcagccagatgagcagcttcaacgaggccatgacccagatcagagagctggaggagaaggccatggaggagctgaaggagatcatccagcagggccccgactggctggagctgagcgagatgaccgagcagcccgactacgacctggagaccttcgtgaacaaggccgagagcgccctggcccagcaggccaagcacttcagcgccctgagagacgtgatcaaggccctgagactggccatgcagctggaggagcaggccagcagacagatcagcagcaagaagagaccccagtag

SEQ ID NO: 86271 - DNA, 1839 bp, synthetic construct
  misc_feature 1..1839: note = Description of Artificial Sequence: Synthetic coding sequence
  source 1..1839: mol_type = other DNA
atgagcaccgtgagcgagctgagaatcaccgcccaggagaacgacatggaggtggagctgcccgccgccgccaacagcagaaagcagttcagcgtgccccccgcccccaccagacccagctgccccgccgtggccgagatccccctgagaatggtgagcgaggagatggaggagcaggtgcacagcatcagaggcagcagcagcgccaaccccgtgaacagcgtgagaagaaagagctgcctggtgaaggaggtggagaagatgaagaacaagagagaggagaagaaggcccagaacagcgagatgagaatgaagagagcccaggagtacgacagcagcttccccaactgggagttcgccagaatgatcaaggagttcagagccaccctggagtgccaccccctgaccatgaccgaccccatcgaggagcacagaatctgcgtgtgcgtgagaaagagacccctgaacaagcaggagctggccaagaaggagatcgacgtgatcagcatccccagcaagtgcctgctgctggtgcacgagcccaagctgaaggtggacctgaccaagtacctggagaaccaggccttctgcttcgacttcgccttcgacgagaccgccagcaacgaggtggtgtacagattcaccgccagacccctggtgcagaccatcttcgagggcggcaaggccacctgcttcgcctacggccagaccggcagcggcaagacccacaccatgggcggcgacctgagcggcaaggcccagaacgccagcaagggcatctacgccatggccagcagagacgtgttcctgctgaagaaccagccctgctacagaaagctgggcctggaggtgtacgtgaccttcttcgagatctacaacggcaagctgttcgacctgctgaacaagaaggccaagctgagagtgctggaggacggcaagcagcaggtgcaggtggtgggcctgcaggagcacctggtgaacagcgccgacgacgtgatcaagatgatcgacatgggcagcgcctgcagaaccagcggccagaccttcgccaacagcaacagcagcagaagccacgcctgcttccagatcatcctgagagccaagggcagaatgcacggcaagttcagcctggtggacctggccggcaacgagagaggcgccgacaccagcagcgccgacagacagaccagaatggagggcgccgagatcaacaagagcctgctggccctgaaggagtgcatcagagccctgggccagaacaaggcccacacccccttcagagagagcaagctgacccaggtgctgagagacagcttcatcggcgagaacagcagaacctgcatgatcgccaccatcagccccggcatcagcagctgcgagtacaccctgaacaccctgagatacgccgacagagtgaaggagctgagcccccacagcggccccagcggcgagcagctgatccagatggagaccgaggagatggaggcctgcagcaacggcgccctgatccccggcaacctgagcaaggaggaggaggagctgagcagccagatgagcagcttcaacgaggccatgacccagatcagagagctggaggagaaggccatggaggagctgaaggagatcatccagcagggccccgactggctggagctgagcgagatgaccgagcagcccgactacgacctggagaccttcgtgaacaaggccgagagcgccctggcccagcaggccaagcacttcagcgccctgagagacgtgatcaaggccctgagactggccatgcagctggaggagcaggccagcagacagatcagcagcaagaagagaccccagtag

SEQ ID NO: 86272 - DNA, 2178 bp, synthetic construct
  misc_feature 1..2178: note = Description of Artificial Sequence: Synthetic coding sequence
  source 1..2178: mol_type = other DNA
atggccatggacagcagcctgcaggccagactgttccccggcctggccatcaagatccagagaagcaacggcctgatccacagcgccaacgtgagaaccgtgaacctggagaagagctgcgtgagcgtggagtgggccgagggcggcgccaccaagggcaaggagatcgacttcgacgacgtggccgccatcaaccccgagctgctgcagctgctgcccctgcaccccaaggacaacctgcccctgcaggagaacgtgaccatccagaagcagaagagaagaagcgtgaacagcaagatccccgcccccaaggagagcctgagaagcagaagcaccagaatgagcaccgtgagcgagctgagaatcaccgcccaggagaacgacatggaggtggagctgcccgccgccgccaacagcagaaagcagttcagcgtgccccccgcccccaccagacccagctgccccgccgtggccgagatccccctgagaatggtgagcgaggagatggaggagcaggtgcacagcatcagaggcagcagcagcgccaaccccgtgaacagcgtgagaagaaagagctgcctggtgaaggaggtggagaagatgaagaacaagagagaggagaagaaggcccagaacagcgagatgagaatgaagagagcccaggagtacgacagcagcttccccaactgggagttcgccagaatgatcaaggagttcagagccaccctggagtgccaccccctgaccatgaccgaccccatcgaggagcacagaatctgcgtgtgcgtgagaaagagacccctgaacaagcaggagctggccaagaaggagatcgacgtgatcagcatccccagcaagtgcctgctgctggtgcacgagcccaagctgaaggtggacctgaccaagtacctggagaaccaggccttctgcttcgacttcgccttcgacgagaccgccagcaacgaggtggtgtacagattcaccgccagacccctggtgcagaccatcttcgagggcggcaaggccacctgcttcgcctacggccagaccggcagcggcaagacccacaccatgggcggcgacctgagcggcaaggcccagaacgccagcaagggcatctacgccatggccagcagagacgtgttcctgctgaagaaccagccctgctacagaaagctgggcctggaggtgtacgtgaccttcttcgagatctacaacggcaagctgttcgacctgctgaacaagaaggccaagctgagagtgctggaggacggcaagcagcaggtgcaggtggtgggcctgcaggagcacctggtgaacagcgccgacgacgtgatcaagatgatcgacatgggcagcgcctgcagaaccagcggccagaccttcgccaacagcaacagcagcagaagccacgcctgcttccagatcatcctgagagccaagggcagaatgcacggcaagttcagcctggtggacctggccggcaacgagagaggcgccgacaccagcagcgccgacagacagaccagaatggagggcgccgagatcaacaagagcctgctggccctgaaggagtgcatcagagccctgggccagaacaaggcccacacccccttcagagagagcaagctgacccaggtgctgagagacagcttcatcggcgagaacagcagaacctgcatgatcgccaccatcagccccggcatcagcagctgcgagtacaccctgaacaccctgagatacgccgacagagtgaaggagctgagcccccacagcggccccagcggcgagcagctgatccagatggagaccgaggagatggaggcctgcagcaacggcgccctgatccccggcaacctgagcaaggaggaggaggagctgagcagccagatgagcagcttcaacgaggccatgacccagatcagagagctggaggagaaggccatggaggagctgaaggagatcatccagcagggccccgactggctggagctgagcgagatgaccgagcagcccgactacgacctggagaccttcgtgaacaaggccgagagcgccctggcccagcaggccaagcacttcagcgccctgagagacgtgatcaaggccctgagactggccatgcagctggaggagcaggccagcagacagatcagcagcaagaagagaccccagtag

SEQ ID NO: 86273 - DNA, 324 bp, synthetic construct
  misc_feature 1..324: note = Description of Artificial Sequence: Synthetic coding sequence
  source 1..324: mol_type = other DNA
tgaaaggagtgcatcagagccctgggccagaacaaggcccacacccccttcagagagagcaagctgacccaggtgctgagagacagcttcatcggcgagaacagcagaacctgcatgatcgccaccatcagccccggcatcagcagctgcgagtacaccctgaacaccctgagatacgccgacagacagggctgccacagcatccccctggagccccaggccagcaagcccggcagatgccacatccccctgctgagcaaggaggaggaggagctgagcagccagatgagcagcttcaacgaggccatgacccagatcagatag

SEQ ID NO: 86274 - DNA, 1011 bp, synthetic construct
  misc_feature 1..1011: note = Description of Artificial Sequence: Synthetic coding sequence
  source 1..1011: mol_type = other DNA
atggccatggacagcagcctgcaggccagactgttccccggcctggccatcaagatccagagaagcaacggcctgatccacagcgccaacgtgagaaccgtgaacctggagaagagctgcgtgagcgtggagtgggccgagggcggcgccaccaagggcaaggagatcgacttcgacgacgtggccgccatcaaccccgagctgctgcagctgctgcccctgcaccccaaggacaacctgcccctgcaggagaacgtgaccatccagaagcagaagagaagaagcgtgaacagcaagatccccgcccccaaggagagcctgagaagcagaagcaccagaatgagcaccgtgagcgagctgagaatcaccgcccaggagaacgacatggaggtggagctgcccgccgccgccaacagcagaaagcagttcagcgtgcccctgagaagaaagagctgcctggtgaaggaggtggagaagatgaagaacaagagagaggagaagaaggcccagaacagcgagatgagaatgaagagagcccaggagtacgacagcagcttccccaactgggagttcgccagaatgatcaaggagttcagagccaccctggagtgccaccccctgaccatgaccgaccccatcgaggagcacagaatctgcgtgtgcgtgagaaagagacccctgaacaagcaggagctggccaagaaggagatcgacgtgatcagcatccccagcaagtgcctgctgctggtgcacgagcccaagctgaaggtggacctgaccaagtacctggagaaccaggccttctgcttcgacttcgccttcgacgagaccgccagcaacgaggtggtgtacagattcaccgccagacccctggtgcagaccatcttcgagggcggcaaggccacctgcttcgcctacggccagaccggcagcggcaagacccacaccatgggcggcgacctgagcggcaaggcccagaacgccagcaagggcatctacgccatggcctag

SEQ ID NO: 86275 - DNA, 864 bp, synthetic construct
  misc_feature 1..864: note = Description of Artificial Sequence: Synthetic coding sequence
  source 1..864: mol_type = other DNA
atggtgagaagcggcgtgcccagaagcagaggcctggtgagcggcctgatccacagcgccaacgtgagaaccgtgaacctggagaagagctgcgtgagcgtggagtgggccgagggcggcgccaccaagggcaaggagatcgacttcgacgacgtggccgccatcaaccccgagctgctgcagctgctgcccctgcaccccaaggacaacctgcccctgcaggagaacgtgaccatccagaagcagaagagaagaagcgtgaacagcaagatccccgcccccaaggagagcctgagaagcagaagcaccagaatgagcaccgtgagcgagctgagaatcaccgcccaggagaacgacatggaggtggagctgcccgccgccgccaacagcagaaagcagttcagcgtgccccccgcccccaccagacccagctgccccgccgtggccgagatccccctgagaatggtgagcgaggagatggaggagcaggtgcacagcatcagaggcagcagcagcgccaaccccgtgaacagcgtgagaagaaagagctgcctggtgaaggaggtggagaagatgaagaacaagagagaggagaagaaggcccagaacagcgagatgagaatgaagagagcccaggagtacgacagcagcttccccaactgggagttcgccagaatgatcaaggagttcagagccaccctggagtgccaccccctgaccatgaccgaccccatcgaggagcacagaatctgcgtgtgcgtgagaaagagacccctgaacaagcaggagctggccaagaaggagatcgacgtgatcagcatccccagcaagtgcctgctgctggtgcacgagcccaagctgtag

SEQ ID NO: 86276 - DNA, 2244 bp, synthetic construct
  misc_feature 1..2244: note = Description of Artificial Sequence: Synthetic coding sequence
  source 1..2244: mol_type = other DNA
atgagcaagctgaagagcagcgagagcgtgagagtggtggtgagatgcagacccatgaacggcaaggagaaggccgccagctacgacaaggtggtggacgtggacgtgaagctgggccaggtgagcgtgaagaaccccaagggcaccgcccacgagatgcccaagaccttcaccttcgacgccgtgtacgactggaacgccaagcagttcgagctgtacgacgagaccttcagacccctggtggacagcgtgctgcagggcttcaacggcaccatcttcgcctacggccagaccggcaccggcaagacctacaccatggagggcatcagaggcgaccccgagaagagaggcgtgatccccaacagcttcgaccacatcttcacccacatcagcagaagccagaaccagcagtacctggtgagagccagctacctggagatctaccaggaggagatcagagacctgctgagcaaggaccagaccaagagactggagctgaaggagagacccgacaccggcgtgtacgtgaaggacctgagcagcttcgtgaccaagagcgtgaaggagatcgagcacgtgatgaacgtgggcaaccagaacagaagcgtgggcgccaccaacatgaacgagcacagcagcagaagccacgccatcttcgtgatcaccatcgagtgcagcgaggtgggcctggacggcgagaaccacatcagagtgggcaagctgaacctggtggacctggccggcagcgagagacaggccaagaccggcgcccagggcgagagactgaaggaggccaccaagatcaacctgagcctgagcgccctgggcaacgtgatcagcgccctggtggacggcaagagcacccacatcccctacagagacagcaagctgaccagactgctgcaggacagcctgggcggcaacgccaagaccgtgatggtggccaacgtgggccccgccagctacaacgtggaggagaccctgaccaccctgagatacgccaacagagccaagaacatcaagaacaagcccagagtgaacgaggaccccaaggacgccctgctgagagagttccaggaggagatcgccagactgaaggcccagctggagaagagaagcatcggcagaagaaagagaagagagaagagaagagagggcggcggcagcggcggcggcggcgaggaggaggaggaggagggcgaggagggcgaggaggagggcgacgacaaggacgactactggagagagcagcaggagaagctggagatcgagaagagagccatcgtggaggaccacagcctggtggccgaggagaagatgagactgctgaaggagaaggagaagaagatggaggacctgagaagagagaaggacgccgccgagatgctgggcgccaagatcaaggccatggagagcaagctgctggtgggcggcaagaacatcgtggaccacaccaacgagcagcagaagatcctggagcagaagagacaggagatcgccgagcagaagagaagagagagagagatccagcagcagatggagagcagagacgaggagaccctggagctgaaggagacctacagcagcctgcagcaggaggtggacatcaagaccaagaagctgaagaagctgttcagcaagctgcaggccgtgaaggccgagatccacgacctgcaggaggagcacatcaaggagagacaggagctggagcagacccagaacgagctgaccagagagctgaagctgaagcacctgatcatcgagaacttcatccccctggaggagaagagcaagatcatgaacagagccttcttcgacgaggaggaggaccactggaagctgcaccccatcaccagactggagaaccagcagatgatgaagagacccgtgagcgccgtgggctacaagagacccctgagccagcacgccagaatgagcatgatgatcagacccgaggccagatacagagccgagaacatcgtgctgctggagctggacatgcccagcagaaccaccagagactacgagggccccgccatcgcccccaaggtgcaggccgccctggacgccgccctgcaggacgaggacgagatccaggtggacgccagcagcttcgagagcaccgccaacaagaagagcaaggccagacccaagagcggcagaaagagcggcagcagcagcagcagcagcggcacccccgccagccagctgtacccccagagcagaggcctggtgcccaagtag

SEQ ID NO: 86277 - DNA, 1122 bp, synthetic construct
  misc_feature 1..1122: note = Description of Artificial Sequence: Synthetic coding sequence
  source 1..1122: mol_type = other DNA
atggtggccaacgtgggccccgccagctacaacgtggaggagaccctgaccaccctgagatacgccaacagagccaagaacatcaagaacaagcccagagtgaacgaggaccccaaggacgccctgctgagagagttccaggaggagatcgccagactgaaggcccagctggagaagagaagcatcgaggagaagatgagactgctgaaggagaaggagaagaagatggaggacctgagaagagagaaggacgccgccgagatgctgggcgccaagatcaaggccatggagagcaagctgctggtgggcggcaagaacatcgtggaccacaccaacgagcagcagaagatcctggagcagaagagacaggagatcgccgagcagaagagaagagagagagagatccagcagcagatggagagcagagacgaggagaccctggagctgaaggagacctacagcagcctgcagcaggaggtggacatcaagaccaagaagctgaagaagctgttcagcaagctgcaggccgtgaaggccgagatccacgacctgcaggaggagcacatcaaggagagacaggagctggagcagacccagaacgagctgaccagagagctgaagctgaagcacctgatcatcgagaacttcatccccctggaggagaagagcaagatcatgaacagagccttcttcgacgaggaggaggaccactggaagctgcaccccatcaccagactggagaaccagcagatgatgaagagacccgtgagcgccgtgggctacaagagacccctgagccagcacgccagaatgagcatgatgatcagacccgaggccagatacagagccgagaacatcgtgctgctggagctggacatgcccagcagaaccaccagagactacgagggccccgccatcgcccccaaggtgcaggccgccctggacgccgccctgcaggacgaggacgagatccaggtggacgccagcagcttcgagagcaccgccaacaagaagagcaaggccagacccaagagcggcagaaagagcggcagcagcagcagcagcagcggcacccccgccagccagctgtacccccagagcagaggcctggtgcccaagtag

SEQ ID NO: 86278 - DNA, 2382 bp, synthetic construct
  misc_feature 1..2382: note = Description of Artificial Sequence: Synthetic coding sequence
  source 1..2382: mol_type = other DNA
atggccagcaagaccaaggccagcgaggccctgaaggtggtggccagatgcagacccctgagcagaaaggaggaggccgccggccacgagcagatcctgaccatggacgtgaagctgggccaggtgaccctgagaaaccccagagccgcccccggcgagctgcccaagaccttcaccttcgacgccgtgtacgacgccagcagcaagcaggccgacctgtacgacgagaccgtgagacccctgatcgacagcgtgctgcagggcttcaacggcaccgtgttcgcctacggccagaccggcaccggcaagacctacaccatgcagggcacctgggtggagcccgagctgagaggcgtgatccccaacgccttcgagcacatcttcacccacatcagcagaagccagaaccagcagtacctggtgagagccagctacctggagatctaccaggaggagatcagagacctgctgagcaaggagcccggcaagagactggagctgaaggagaaccccgagaccggcgtgtacatcaaggacctgagcagcttcgtgaccaagaacgtgaaggagatcgagcacgtgatgaacctgggcaaccagaccagagccgtgggcagcacccacatgaacgaggtgagcagcagaagccacgccatcttcatcatcaccgtggagtgcagcgagagaggcagcgacggccaggaccacatcagagtgggcaagctgaacctggtggacctggccggcagcgagagacagaacaaggccggccccaacaccgccggcggcgccgccacccccagcagcggcggcggcggcggcggcggcggcagcggcggcggcgccggcggcgagagacccaaggaggccagcaagatcaacctgagcctgagcgccctgggcaacgtgatcgccgccctggccggcaacagaagcacccacatcccctacagagacagcaagctgaccagactgctgcaggacagcctgggcggcaacgccaagaccatcatggtggccaccctgggccccgccagccacagctacgacgagagcctgagcaccctgagattcgccaacagagccaagaacatcaagaacaagccccaggtgaacgaggaccccaaggacaccctgctgagagagttccaggaggagatcgccagactgaaggcccagctggagaagagaggcatgctgggcaagagacccagaagaaagagcagcagaagaaagaaggccgtgagcgccccccccggctaccccgagggccccgtgatcgaggcctgggtggccgaggaggaggacgacaacaacaacaaccacagacccccccagcccatcctggagagcgccctggagaagaacatggagaactacctgcaggagcagaaggagagactggaggaggagaaggccgccatccaggacgacagaagcctggtgagcgaggagaagcagaagctgctggaggagaaggagaagatgctggaggacctgagaagagagcagcaggccaccgagctgctggccgccaagtacaaggccatggagagcaagctgctgatcggcggcagaaacatcatggaccacaccaacgagcagcagaagatgctggagctgaagagacaggagatcgccgagcagaagagaagagagagagagatgcagcaggagatgatgctgagagacgaggagaccatggagctgagaggcacctacaccagcctgcagcaggaggtggaggtgaagaccaagaagctgaagaagctgtacgccaagctgcaggccgtgaaggccgagatccaggaccagcacgacgagtacatcagagtgagacaggacctggaggaggcccagaacgagcagaccagagagctgaagctgaagtacctgatcatcgagaacttcatcccccccgaggagaagaacaagatcatgaacagactgttcctggactgcgaggaggagcagtggaagttccagcccctggtgcccgccggcgtgagcagcagccagatgaagaagagacccaccagcgccgtgggctacaagagacccatcagccagtacgccagagtggccatggccatgggcagccaccccagatacagagccgagaacatcatgttcctggagctggacgtgagcccccccgccgtgttcgagatggagttcagccacgaccaggagcaggaccccagagccctgcacatggagagactgatgagactggacagcttcctggagagacccagcaccagcaaggtgagaaagagcagaagctggtgccagagcccccagagacccccccccagcaccacccacgccagcctggccagcgccagcctgagacccgccaccgtggccgaccacgagtag

SEQ ID NO: 86279 - DNA, 2382 bp, synthetic construct; identical to SEQ ID NO: 86278
  misc_feature 1..2382: note = Description of Artificial Sequence: Synthetic coding sequence
  source 1..2382: mol_type = other DNA

SEQ ID NO: 86280 - DNA, 1800 bp, synthetic construct
  misc_feature 1..1800: note = Description of Artificial Sequence: Synthetic coding sequence
  source 1..1800: mol_type = other DNA
atgaacctgggcaaccagaccagagccgtgggcagcacccacatgaacgaggtgagcagcagaagccacgccatcttcatcatcaccgtggagtgcagcgagagaggcagcgacggccaggaccacatcagagtgggcaagctgaacctggtggacctggccggcagcgagagacagaacaaggccggccccaacaccgccggcggcgccgccacccccagcagcggcggcggcggcggcggcggcggcagcggcggcggcgccggcggcgagagacccaaggaggccagcaagatcaacctgagcctgagcgccctgggcaacgtgatcgccgccctggccggcaacagaagcacccacatcccctacagagacagcaagctgaccagactgctgcaggacagcctgggcggcaacgccaagaccatcatggtggccaccctgggccccgccagccacagctacgacgagagcctgagcaccctgagattcgccaacagagccaagaacatcaagaacaagccccaggtgaacgaggaccccaaggacaccctgctgagagagttccaggaggagatcgccagactgaaggcccagctggagaagagaggcatgctgggcaagagacccagaagaaagagcagcagaagaaagaaggccgtgagcgccccccccggctaccccgagggccccgtgatcgaggcctgggtggccgaggaggaggacgacaacaacaacaaccacagacccccccagcccatcctggagagcgccctggagaagaacatggagaactacctgcaggagcagaaggagagactggaggaggagaaggccgccatccaggacgacagaagcctggtgagcgaggagaagcagaagctgctggaggagaaggagaagatgctggaggacctgagaagagagcagcaggccaccgagctgctggccgccaagtacaaggccatggagagcaagctgctgatcggcggcagaaacatcatggaccacaccaacgagcagcagaagatgctggagctgaagagacaggagatcgccgagcagaagagaagagagagagagatgcagcaggagatgatgctgagagacgaggagaccatggagctgagaggcacctacaccagcctgcagcaggaggtggaggtgaagaccaagaagctgaagaagctgtacgccaagctgcaggccgtgaaggccgagatccaggaccagcacgacgagtacatcagagtgagacaggacctggaggaggcccagaacgagcagaccagagagctgaagctgaagtacctgatcatcgagaacttcatcccccccgaggagaagaacaagatcatgaacagactgttcctggactgcgaggaggagcagtggaagttccagcccctggtgcccgccggcgtgagcagcagccagatgaagaagagacccaccagcgccgtgggctacaagagacccatcagccagtacgccagagtggccatggccatgggcagccaccccagatacagagccgagaacatcatgttcctggagctggacgtgagcccccccgccgtgttcgagatggagttcagccacgaccaggagcaggaccccagagccctgcacatggagagactgatgagactggacagcttcctggagagacccagcaccagcaaggtgagaaagagcagaagctggtgccagagcccccagagacccccccccagcaccacccacgccagcctggccagcgccagcctgagacccgccaccgtggccgaccacgagtag

SEQ ID NO: 86281 - DNA, 3384 bp, synthetic construct
  misc_feature 1..3384: note = Description of Artificial Sequence: Synthetic coding sequence
  source 1..3384: mol_type = other DNA
atgaaggaggaggtgaagggcatccccgtgagagtggccctgagatgcagacccctggtgcccaaggagatcagcgagggctgccagatgtgcctgagcttcgtgcccggcgagccccaggtggtggtgggcaccgacaagagcttcacctacgacttcgtgttcgaccccagcaccgagcaggaggaggtgttcaacaccgccgtggcccccctgatcaagggcgtgttcaagggctacaacgccaccgtgctggcctacggccagaccggcagcggcaagacctacagcatgggcggcgcctacaccgccgagcaggagaacgagcccaccgtgggcgtgatccccagagtgatccagctgctgttcaaggagatcgacaagaagagcgacttcgagttcaccctgaaggtgagctacctggagatctacaacgaggagatcctggacctgctgtgccccagcagagagaaggcccagatcaacatcagagaggaccccaaggagggcatcaagatcgtgggcctgaccgagaagaccgtgctggtggccctggacaccgtgagctgcctggagcagggcaacaacagcagaaccgtggccagcaccgccatgaacagccagagcagcagaagccacgccatcttcaccatcagcctggagcagagaaagaagagcgacaagaacagcagcttcagaagcaagctgcacctggtggacctggccggcagcgagagacagaagaagaccaaggccgagggcgacagactgaaggagggcatcaacatcaacagaggcctgctgtgcctgggcaacgtgatcagcgccctgggcgacgacaagaagggcggcttcgtgccctacagagacagcaagctgaccagactgctgcaggacagcctgggcggcaacagccacaccctgatgatcgcctgcgtgagccccgccgacagcaacctggaggagaccctgaacaccctgagatacgccgacagagccagaaagatcaagaacaagcccatcgtgaacatcgacccccagaccgccgagctgaaccacctgaagcagcaggtgcagcagctgcaggtgctgctgctgcaggcccacggcggcaccctgcccggcagcatcaccgtggagcccagcgagaacctgcagagcctgatggagaagaaccagagcctggtggaggagaacgagaagctgagcagaggcctgagcgaggccgccggccagaccgcccagatgctggagagaatcatcctgaccgagcaggccaacgagaagatgaacgccaagctggaggagctgagacagcacgccgcctgcaagctggacctgcagaagctggtggagaccctggaggaccaggagctgaaggagaacgtggagatcatctgcaacctgcagcagctgatcacccagctgagcgacgagaccgtggcctgcatggccgccgccatcgacaccgccgtggagcaggaggcccaggtggagaccagccccgagaccagcagaagcagcgacgccttcaccacccagcacgccctgagacaggcccagatgagcaaggagctggtggagctgaacaaggccctggccctgaaggaggccctggccagaaagatgacccagaacgacagccagctgcagcccatccagtaccagtaccaggacaacatcaaggagctggagctggaggtgatcaacctgcagaaggagaaggaggagctggtgctggagctgcagaccgccaagaaggacgccaaccaggccaagctgagcgagagaagaagaaagagactgcaggagctggagggccagatcgccgacctgaagaagaagctgaacgagcagagcaagctgctgaagctgaaggagagcaccgagagaaccgtgagcaagctgaaccaggagatcagaatgatgaagaaccagagagtgcagctgatgagacagatgaaggaggacgccgagaagttcagacagtggaagcagaagaaggacaaggaggtgatccagctgaaggagagagacagaaagagacagtacgagctgctgaagctggagagaaacttccagaagcagagcaacgtgctgagaagaaagaccgaggaggccgccgccgccaacaagagactgaaggacgccctgcagaagcagagagaggtggccgacaagagaaaggagacccagagcagaggcatggagggcaccgccgccagagtgaagaactggctgggcaacgagatcgaggtgatggtgagcaccgaggaggccaagagacacctgaacgacctgctggaggacagaaagatcctggcccaggacgtggcccagctgaaggagaagaaggagagcggcgagaaccccccccccaagctgagaagaagaaccttcagcctgaccgaggtgagaggccaggtgagcgagagcgaggacagcatcaccaagcagatcgagagcctggagaccgagatggagttcagaagcgcccagatcgccgacctgcagcagaagctgctggacgccgagagcgaggacagacccaagcagagatgggagaacatcgccaccatcctggaggccaagtgcgccctgaagtacctgatcggcgagctggtgagcagcaagatccaggtgagcaagctggagagcagcctgaagcagagcaagaccagctgcgccgacatgcagaagatgctgttcgaggagagaaaccacttcgccgagatcgagaccgagctgcaggccgagctggtgagaatggagcagcagcaccaggagaaggtgctgtacctgctgagccagctgcagcagagccagatggccgagaagcagctggaggagagcgtgagcgagaaggagcagcagctgctgagcaccctgaagtgccaggacgaggagctggagaagatgagagaggtgtgcgagcagaaccagcagctgctgagagagaacgagatcatcaagcagaagctgaccctgctgcaggtggccagcagacagaagcacctgcccaaggacaccctgctgagccccgacagcagcttcgagtacgtgccccccaagcccaagcccagcagagtgaaggagaagttcctggagcagagcatggacatcgaggacctgaagtactgcagcgagcacagcgtgaacgagcacgaggacggcgacggcgacgacgacgagggcgacgacgaggagtggaagcccaccaagctggtgaaggtgagcagaaagaacatccagggcgtgctgctgctgacccccgtgatcagcgccctgtgggaggccgaggccagaggcctgctggaggccagaagcagcagacccgcctgggccacctggagagaccccgtgagcaccaagcccaagaactag

SEQ ID NO: 86282 - DNA, 3699 bp, synthetic construct
  misc_feature 1..3699: note = Description of Artificial Sequence: Synthetic coding sequence
  source 1..3699: mol_type = other DNA
atgaaggaggaggtgaagggcatccccgtgagagtggccctgagatgcagacccctggtgcccaaggagatcagcgagggctgccagatgtgcctgagcttcgtgcccggcgagccccaggtggtggtgggcaccgacaagagcttcacctacgacttcgtgttcgaccccagcaccgagcaggaggaggtgttcaacaccgccgtggcccccctgatcaagggcgtgttcaagggctacaacgccaccgtgctggcctacggccagaccggcagcggcaagacctacagcatgggcggcgcctacaccgccgagcaggagaacgagcccaccgtgggcgtgatccccagagtgatccagctgctgttcaaggagatcgacaagaagagcgacttcgagttcaccctgaaggtgagctacctggagatctacaacgaggagatcctggacctgctgtgccccagcagagagaaggcccagatcaacatcagagaggaccccaaggagggcatcaagatcgtgggcctgaccgagaagaccgtgctggtggccctggacaccgtgagctgcctggagcagggcaacaacagcagaaccgtggccagcaccgccatgaacagccagagcagcagaagccacgccatcttcaccatcagcctggagcagagaaagaagagcgacaagaacagcagcttcagaagcaagctgcacctggtggacctggccggcagcgagagacagaagaagaccaaggccgagggcgacagactgaaggagggcatcaacatcaacagaggcctgctgtgcctgggcaacgtgatcagcgccctgggcgacgacaagaagggcggcttcgtgccctacagagacagcaagctgaccagactgctgcaggacagcctgggcggcaacagccacaccctgatgatcgcctgcgtgagccccgccgacagcaacctggaggagaccctgaacaccctgagatacgccgacagagccagaaagatcaagaacaagcccatcgtgaacatcgacccccagaccgccgagctgaaccacctgaagcagcaggtgcagcagctgcaggtgctgctgctgcaggcccacggcggcaccctgcccggcagcatcaccgtggagcccagcgagaacctgcagagcctgatggagaagaaccagagcctggtggaggagaacgagaagctgagcagaggcctgagcgaggccgccggccagaccgcccagatgctggagagaatcatcctgaccgagcaggccaacgagaagatgaacgccaagctggaggagctgagacagcacgccgcctgcaagctggacctgcagaagctggtggagaccctggaggaccaggagctgaaggagaacgtggagatcatctgcaacctgcagcagctgatcacccagctgagcgacgagaccgtggcctgcatggccgccgccatcgacaccgccgtggagcaggaggcccaggtggagaccagccccgagaccagcagaagcagcgacgccttcaccacccagcacgccctgagacaggcccagatgagcaaggagctggtggagctgaacaaggccctggccctgaaggaggccctggccagaaagatgacccagaacgacagccagctgcagcccatccagtaccagtaccaggacaacatcaaggagctggagctggaggtgatcaacctgcagaaggagaaggaggagctggtgctggagctgcagaccgccaagaaggacgccaaccaggccaagctgagcgagagaagaagaaagagactgcaggagctggagggccagatcgccgacctgaagaagaagctgaacgagcagagcaagctgctgaagctgaaggagagcaccgagagaaccgtgagcaagctgaaccaggagatcagaatgatgaagaaccagagagtgcagctgatgagacagatgaaggaggacgccgagaagttcagacagtggaagcagaagaaggacaaggaggtgatccagctgaaggagagagacagaaagagacagtacgagctgctgaagctggagagaaacttccagaagcagagcaacgtgctgagaagaaagaccgaggaggccgccgccgccaacaagagactgaaggacgccctgcagaagcagagagaggtggccgacaagagaaaggagacccagagcagaggcatggagggcaccgccgccagagtgaagaactggctgggcaacgagatcgaggtgatggtgagcaccgaggaggccaagagacacctgaacgacctgctggaggacagaaagatcctggcccaggacgtggcccagctgaaggagaagaaggagagcggcgagaaccccccccccaagctgagaagaagaaccttcagcctgaccgaggtgagaggccaggtgagcgagagcgaggacagcatcaccaagcagatcgagagcctggagaccgagatggagttcagaagcgcccagatcgccgacctgcagcagaagctgctggacgccgagagcgaggacagacccaagcagagatgggagaacatcgccaccatcctggaggccaagtgcgccctgaagtacctgatcggcgagctggtgagcagcaagatccaggtgagcaagctggagagcagcctgaagcagagcaagaccagctgcgccgacatgcagaagatgctgttcgaggagagaaaccacttcgccgagatcgagaccgagctgcaggccgagctggtgagaatggagcagcagcaccaggagaaggtgctgtacctgctgagccagctgcagcagagccagatggccgagaagcagctggaggagagcgtgagcgagaaggagcagcagctgctgagcaccctgaagtgccaggacgaggagctggagaagatgagagaggtgtgcgagcagaaccagcagctgctgagagagaacgagatcatcaagcagaagctgaccctgctgcaggtggccagcagacagaagcacctgcccaaggacaccctgctgagccccgacagcagcttcgagtacgtgccccccaagcccaagcccagcagagtgaaggagaagttcctggagcagagcatggacatcgaggacctgaagtactgcagcgagcacagcgtgaacgagcacgaggacggcgacggcgacgacgacgagggcgacgacgaggagtggaagcccaccaagctggtgaaggtgagcagaaagaacatccagggctgcagctgcaagggctggtgcggcaacaagcagtgcggctgcagaaagcagaagagcgactgcggcgtggactgctgctgcgaccccaccaagtgcagaaacagacagcagggcaaggacagcctgggcaccgtggagagaacccaggacagcgagggcagcttcaagctggaggaccccaccgaggtgacccccggcctgagcttcttcaaccccgtgtgcgccacccccaacagcaagatcctgaaggagatgtgcgacgtggagcaggtgctgagcaagaagaccccccccgcccccagccccttcgacctgcccgagctgaagcacgtggccaccgagtaccaggagaacaaggcccccggcaagaagaagaagagagccctggccagcaacaccagcttcttcagcggctgcagccccatcgaggaggaggcccactag

SEQ ID NO: 86283 - DNA, 1605 bp, synthetic construct
  misc_feature 1..1605: note = Description of Artificial Sequence: Synthetic coding sequence
  source 1..1605: mol_type = other DNA
atgtgcagcgacgtgaagagagaggccgccgccgccaacaagagactgaaggacgccctgcagaagcagagagaggtggccgacaagagaaaggagacccagagcagaggcatggagggcaccgccgccagagtgaagaactggctgggcaacgagatcgaggtgatggtgagcaccgaggaggccaagagacacctgaacgacctgctggaggacagaaagatcctggcccaggacgtggcccagctgaaggagaagaaggagagcggcgagaaccccccccccaagctgagaagaagaaccttcagcctgaccgaggtgagaggccaggtgagcgagagcgaggacagcatcaccaagcagatcgagagcctggagaccgagatggagttcagaagcgcccagatcgccgacctgcagcagaagctgctggacgccgagagcgaggacagacccaagcagagatgggagaacatcgccaccatcctggaggccaagtgcgccctgaagtacctgatcggcgagctggtgagcagcaagatccaggtgagcaagctggagagcagcctgaagcagagcaagaccagctgcgccgacatgcagaagatgctgttcgaggagagaaaccacttcgccgagatcgagaccgagctgcaggccgagctggtgagaatggagcagcagcaccaggagaaggtgctgtacctgctgagccagctgcagcagagccagatggccgagaagcagctggaggagagcgtgagcgagaaggagcagcagctgctgagcaccctgaagtgccaggacgaggagctggagaagatgagagaggtgtgcgagcagaaccagcagctgctgagagagaacgagatcatcaagcagaagctgaccctgctgcaggtggccagcagacagaagcacctgcccaaggacaccctgctgagccccgacagcagcttcgagtacgtgccccccaagcccaagcccagcagagtgaaggagaagttcctggagcagagcatggacatcgaggacctgaagtactgcagcgagcacagcgtgaacgagcacgaggacggcgacggcgacgacgacgagggcgacgacgaggagtggaagcccaccaagctggtgaaggtgagcagaaagaacatccagggctgcagctgcaagggctggtgcggcaacaagcagtgcggctgcagaaagcagaagagcgactgcggcgtggactgctgctgcgaccccaccaagtgcagaaacagacagcagggcaaggacagcctgggcaccgtggagagaacccaggacagcgagggcagcttcaagctggaggaccccaccgaggtgacccccggcctgagcttcttcaaccccgtgtgcgccacccccaacagcaagatcctgaaggagatgtgcgacgtggagcaggtgctgagcaagaagaccccccccgcccccagccccttcgacctgcccgagctgaagcacgtggccaccgagtaccaggagaacaaggcccccggcaagaagaagaagagagccctggccagcaacaccagcttcttcagcggctgcagccccatcgaggaggaggcccactag

SEQ ID NO: 86284 - DNA, 3705 bp, synthetic construct
  misc_feature 1..3705: note = Description of Artificial Sequence: Synthetic coding sequence
  source 1..3705: mol_type = other DNA
atgaaggaggaggtgaagggcatccccgtgagagtggccctgagatgcagacccctggtgcccaaggagatcagcgagggctgccagatgtgcctgagcttcgtgcccggcgagacccaggtggtggtgggcaccgacaagagcttcacctacgacttcgtgttcgacccctgcaccgagcaggaggaggtgttcaacaaggccgtggcccccctgatcaagggcatcttcaagggctacaacgccaccgtgctggcctacggccagaccggcagcggcaagacctacagcatgggcggcgcctacaccgccgagcaggagaacgagcccaccgtgggcatcatccccagagtgatccagctgctgttcaaggagatcgacaagaagagcgacttcgagttcaccctgaaggtgagctacctggagatctacaacgaggagatcctggacctgctgtgccccagcagagagaaggcccagatcaacatcagagaggaccccaaggagggcatcaagatcgtgggcctgaccgagaagaccgtgctggtggccctggacaccgtgagctgcctggagcagggcaacaacagcagaaccgtggccagcaccgccatgaacagccagagcagcagaagccacgccatcttcaccatcagcatcgagcagagaaagaagagcgacaagaactgcagcttcagaagcaagctgcacctggtggacctggccggcagcgagagacagaagaagaccaaggccgagggcgacagactgaaggagggcatcaacatcaacagaggcctgctgtgcctgggcaacgtgatcagcgccctgggcgacgacaagaagggcagcttcgtgccctacagagacagcaagctgaccagactgctgcaggacagcctgggcggcaacagccacaccctgatgatcgcctgcgtgagccccgccgacagcaacctggaggagaccctgagcaccctgagatacgccgacagagccagaaagatcaagaacaagcccatcgtgaacatcgacccccacaccgccgagctgaaccacctgaagcagcaggtgcagcagctgcaggtgctgctgctgcaggcccacggcggcaccctgcccggcagcatcaacgccgagcccagcgagaacctgcagagcctgatggagaagaaccagagcctggtggaggagaacgagaagctgagcagatgcctgagcaaggccgccggccagaccgcccagatgctggagagaatcatcctgaccgagcaggtgaacgagaagctgaacgccaagctggaggagctgagacagcacgtggcctgcaagctggacctgcagaagctggtggagaccctggaggaccaggagctgaaggagaacgtggagatcatctgcaacctgcagcagctgatcacccagctgagcgacgagaccgtggcctgcaccgccgccgccatcgacaccgccgtggaggaggaggcccaggtggagaccagccccgagaccagcagaagcagcgacgccttcaccacccagcacgccctgcaccaggcccagatgagcaaggaggtggtggagctgaacaacgccctggccctgaaggaggccctggtgagaaagatgacccagaacgacaaccagctgcagcccatccagttccagtaccaggacaacatcaagaacctggagctggaggtgatcaacctgcagaaggagaaggaggagctggtgagagagctgcagaccgccaagaagaacgtgaaccaggccaagctgagcgagcacagacacaagctgctgcaggagctggagggccagatcgccgacctgaagaagaagctgaacgagcagagcaagctgctgaagctgaaggagagcaccgagagaaccgtgagcaagctgaaccaggagatctggatgatgaagaaccagagagtgcagctgatgagacagatgaaggaggacgccgagaagttcagacagtggaagcagaagaaggacaaggaggtgatccagctgaaggagagagacagaaagagacagtacgagctgctgaagctggagagaaacttccagaagcagagcagcgtgctgagaagaaagaccgaggaggccgccgccgccaacaagagactgaaggacgccctgcagaagcagagagaggtgaccgacaagagaaaggagacccagagccacggcaaggagggcatcgccgccagagtgagaaactggctgggcaacgagatcgaggtgatggtgagcaccgaggaggccaagagacacctgaacgacctgctggaggacagaaagatcctggcccaggacgtggtgcagctgaaggagaagaaggagagcagagagaaccccccccccaagctgagaaagtgcaccttcagcctgagcgaggtgcacggccaggtgctggagagcgaggactgcatcaccaagcagatcgagagcctggagaccgagatggagctgagaagcgcccagatcgccgacctgcagcagaagctgctggacgccgagagcgaggacagacccaagcagtgctgggagaacatcgccaccatcctggaggccaagtgcgccctgaagtacctgatcggcgagctggtgagcagcaagatccacgtgaccaagctggagaacagcctgagacagagcaaggccagctgcgccgacatgcagaagatgctgttcgaggagcagaaccacttcagcgagatcgagaccgagctgcaggccgagctggtgagaatggagcagcagcaccaggagaaggtgctgtacctggtgagccagctgcaggagagccagatggccgagaagcagctggagaagagcgccagcgagaaggagcagcagctggtgagcaccctgcagtgccaggacgaggagctggagaagatgagagaggtgtgcgagcagaaccagcagctgctgcaggagaacgagatcatcaagcagaagctgatcctgctgcaggtggccagcagacagaagcacctgcccaacgacaccctgctgagccccgacagcagcttcgagtacatcccccccaagcccaagcccagcagagtgaaggagaagttcctggagcagagcatggacatcgaggacctgaagtactgcagcgagcacagcgtgaacgagcacgaggacggcgacggcgacggcgacagcgacgagggcgacgacgaggagtggaagcccaccaagctggtgaaggtgagcagaaagaacatccagggctgcagctgcaagggctggtgcggcaacaagcagtgcggctgcagaaagcagaagagcgactgcggcgtggactgcagctgcgaccccaccaagtgcagaaacagacagcagggcaaggacagcctgggcaccgtggagcagacccaggacagcgagggcagcttcaagctggaggaccccaccgaggtgacccccggcctgagcttcttcaaccccgtgtgcgccacccccaacagcaagatcctgaaggagatgtgcgacatggagcaggtgctgagcaagaagaccgcccccgcccccagccccttcgacctgcccgagagcaagcacggcgccaccgagtaccagcagaacaagccccccggcaagaagaagaagagagccctggccagcaacaccagcttcttcagcggctgcagccccatcgaggaggaggcccactag

SEQ ID NO: 86285 - DNA, 3099 bp, synthetic construct
  misc_feature 1..3099: note = Description of Artificial Sequence: Synthetic coding sequence
  source 1..3099: mol_type = other DNA
atggccgagaccaacaacgagtgcagcatcaaggtgctgtgcagattcagacccctgaaccaggccgagatcctgagaggcgacaagttcatccccatcttccagggcgacgacagcgtggtgatcggcggcaagccctacgtgttcgacagagtgttcccccccaacaccacccaggagcaggtgtaccacgcctgcgccatgcagatcgtgaaggacgtgctggccggctacaacggcaccatcttcgcctacggccagaccagcagcggcaagacccacaccatggagggcaagctgcacgacccccagctgatgggcatcatccccagaatcgccagagacatcttcaaccacatctacagcatggacgagaacctggagttccacatcaaggtgagctacttcgagatctacctggacaagatcagagacctgctggacgtgaccaagaccaacctgagcgtgcacgaggacaagaacagagtgcccttcgtgaagggctgcaccgagagattcgtgagcagccccgaggagatcctggacgtgatcgacgagggcaagagcaacagacacgtggccgtgaccaacatgaacgagcacagcagcagaagccacagcatcttcctgatcaacatcaagcaggagaacatggagaccgagcagaagctgagcggcaagctgtacctggtggacctggccggcagcgagaaggtgagcaagaccggcgccgagggcgccgtgctggacgaggccaagaacatcaacaagagcctgagcgccctgggcaacgtgatcagcgccctggccgagggcaccaagagctacgtgccctacagagacagcaagatgaccagaatcctgcaggacagcctgggcggcaactgcagaaccaccatgttcatctgctgcagccccagcagctacaacgacgccgagaccaagagcaccctgatgttcggccagagagccaagaccatcaagaacaccgccagcgtgaacctggagctgaccgccgagcagtggaagaagaagtacgagaaggagaaggagaagaccaaggcccagaaggagaccatcgccaagctggaggccgagctgagcagatggagaaacggcgagaacgtgcccgagaccgagagactggccggcgaggaggccgccctgggcgccgagctgtgcgaggagacccccgtgaacgacaacagcagcatcgtggtgagaatcgcccccgaggagagacagaagtacgaggaggagatcagaagactgtacaagcagctggacgacaaggacgacgagatcaaccagcagagccagctgatcgagaagctgaagcagcagatgctggaccaggaggagctgctggtgagcaccagaggcgacaacgagaaggtgcagagagagctgagccacctgcagagcgagaacgacgccgccaaggacgaggtgaaggaggtgctgcaggccctggaggagctggccgtgaactacgaccagaagagccaggaggtggaggagaagagccagcagaaccagctgctggtggacgagctgagccagaaggtggccaccatgctgagcctggagagcgagctgcagagactgcaggaggtgagcggccaccagagaaagagaatcgccgaggtgctgaacggcctgatgaaggacctgagcgagttcagcgtgatcgtgggcaacggcgagatcaagctgcccgtggagatcagcggcgccatcgaggaggagttcaccgtggccagactgtacatcagcaagatcaagagcgaggtgaagagcgtggtgaagagatgcagacagctggagaacctgcaggtggagtgccacagaaagatggaggtgaccggcagagagctgagcagctgccagctgctgatcagccagcacgaggccaagatcagaagcctgaccgagtacatgcagagcgtggagctgaagaagagacacctggaggagagctacgacagcctgagcgacgagctggccaagctgcaggcccaggagaccgtgcacgaggtggccctgaaggacaaggagcccgacacccaggacgccgacgaggtgaagaaggccctggagctgcagatggagagccacagagaggcccaccacagacagctggccagactgagagacgagatcaacgagaagcagaagaccatcgacgagctgaaggacctgaaccagaagctgcagctggagctggagaagctgcaggccgactacgagaagctgaagagcgaggagcacgagaagagcaccaagctgcaggagctgaccttcctgtacgagagacacgagcagagcaagcaggacctgaagggcctggaggagaccgtggccagagagctgcagaccctgcacaacctgagaaagctgttcgtgcaggacgtgaccaccagagtgaagaagagcgccgagatggagcccgaggacagcggcggcatccacagccagaagcagaagatcagcttcctggagaacaacctggagcagctgaccaaggtgcacaagcagctggtgagagacaacgccgacctgagatgcgagctgcccaagctggagaagagactgagagccaccgccgagagagtgaaggccctggagggcgccctgaaggaggccaaggagggcgccatgaaggacaagagaagataccagcaggaggtggacagaatcaaggaggccgtgagatacaagagcagcggcaagagaggccacagcgcccagatcgccaagcccgtgagacccggccactaccccgccagcagccccaccaacccctacggcaccagaagccccgagtgcatcagctacaccaacagcctgttccagaactaccagaacctgtacctgcaggccacccccagcagcaccagcgacatgtacttcgccaacagctgcaccagcagcggcgccaccagcagcggcggccccctggccagctaccagaaggccaacatggacaacggcaacgccaccgacatcaacgacaacagaagcgacctgccctgcggctacgaggccgaggaccaggccaagctgttccccctgcaccaggagaccgccgccagctag

SEQ ID NO: 86286 - DNA, 381 bp, synthetic construct
  misc_feature 1..381: note = Description of Artificial Sequence: Synthetic coding sequence
  source 1..381: mol_type = other DNA
aagagcagcggcaagagaggccacagcgcccagatcgccaagcccgtgagacccggccactaccccgccagcagccccaccaacccctacggcaccagaagccccgagtgcatcagctacaccaacagcctgttccagaactaccagaacctgtacctgcaggccacccccagcagcaccagcgacatgtacttcgccaacagctgcaccagcagcggcgccaccagcagcggcggccccctggccagctaccagaaggccaacatggacaacggcaacgccaccgacatcaacgacaacagaagcgacctgccctgcggctacgaggccgaggaccaggccaagctgttccccctgcaccaggagaccgccgccagctag

SEQ ID NO: 86287 - DNA, 2892 bp, synthetic construct
  misc_feature 1..2892: note = Description of Artificial Sequence: Synthetic coding sequence
  source 1..2892: mol_type = other DNA
atggccgacctggccgagtgcaacatcaaggtgatgtgcagattcagacccctgaacgagagcgaggtgaacagaggcgacaagtacatcgccaagttccagggcgaggacaccgtggtgatcgccagcaagccctacgccttcgacagagtgttccagagcagcaccagccaggagcaggtgtacaacgactgcgccaagaagatcgtgaaggacgtgctggagggctacaacggcaccatcttcgcctacggccagaccagcagcggcaagacccacaccatggagggcaagctgcacgaccccgagggcatgggcatcatccccagaatcgtgcaggacatcttcaactacatctacagcatggacgagaacctggagttccacatcaaggtgagctacttcgagatctacctggacaagatcagagacctgctggacgtgagcaagaccaacctgagcgtgcacgaggacaagaacagagtgccctacgtgaagggctgcaccgagagattcgtgtgcagccccgacgaggtgatggacaccatcgacgagggcaagagcaacagacacgtggccgtgaccaacatgaacgagcacagcagcagaagccacagcatcttcctgatcaacgtgaagcaggagaacacccagaccgagcagaagctgagcggcaagctgtacctggtggacctggccggcagcgagaaggtgagcaagaccggcgccgagggcgccgtgctggacgaggccaagaacatcaacaagagcctgagcgccctgggcaacgtgatcagcgccctggccgagggcagcacctacgtgccctacagagacagcaagatgaccagaatcctgcaggacagcctgggcggcaactgcagaaccaccatcgtgatctgctgcagccccagcagctacaacgagagcgagaccaagagcaccctgctgttcggccagagagccaagaccatcaagaacaccgtgtgcgtgaacgtggagctgaccgccgagcagtggaagaagaagtacgagaaggagaaggagaagaacaagatcctgagaaacaccatccagtggctggagaacgagctgaacagatggagaaacggcgagaccgtgcccatcgacgagcagttcgacaaggagaaggccaacctggaggccttcaccgtggacaaggacatcaccctgaccaacgacaagcccgccaccgccatcggcgtgatcggcaacttcaccgacgccgagagaagaaagtgcgaggaggagatcgccaagctgtacaagcagctggacgacaaggacgaggagatcaaccagcagagccagctggtggagaagctgaagacccagatgctggaccaggaggagctgctggccagcaccagaagagaccaggacaacatgcaggccgagctgaacagactgcaggccgagaacgacgccagcaaggaggaggtgaaggaggtgctgcaggccctggaggagctggccgtgaactacgaccagaagagccaggaggtggaggacaagaccaaggagtacgagctgctgagcgacgagctgaaccagaagagcgccaccctggccagcatcgacgccgagctgcagaagctgaaggagatgaccaaccaccagaagaagagagccgccgagatgatggccagcctgctgaaggacctggccgagatcggcatcgccgtgggcaacaacgacgtgaagcagcccgagggcaccggcatgatcgacgaggagttcaccgtggccagactgtacatcagcaagatgaagagcgaggtgaagaccatggtgaagagatgcaagcagctggagagcacccagaccgagagcaacaagaagatggaggagaacgagaaggagctggccgcctgccagctgagaatcagccagcacgaggccaagatcaagagcctgaccgagtacctgcagaacgtggagcagaagaagagacagctggaggagagcgtggacgccctgagcgaggagctggtgcagctgagagcccaggagaaggtgcacgagatggagaaggagcacctgaacaaggtgcagaccgccaacgaggtgaagcaggccgtggagcagcagatccagagccacagagagacccaccagaagcagatcagcagcctgagagacgaggtggaggccaaggccaagctgatcaccgacctgcaggaccagaaccagaagatgatgctggagcaggagagactgagagtggagcacgagaagctgaaggccaccgaccaggagaagagcagaaagctgcacgagctgaccgtgatgcaggacagaagagagcaggccagacaggacctgaagggcctggaggagaccgtggccaaggagctgcagaccctgcacaacctgagaaagctgttcgtgcaggacctggccaccagagtgaagaagagcgccgagatcgacagcgacgacaccggcggcagcgccgcccagaagcagaagatcagcttcctggagaacaacctggagcagctgaccaaggtgcacaagcagctggtgagagacaacgccgacctgagatgcgagctgcccaagctggagaagagactgagagccaccgccgagagagtgaaggccctggagagcgccctgaaggaggccaaggagaacgccagcagagacagaaagagataccagcaggaggtggacagaatcaaggaggccgtgagaagcaagaacatggccagaagaggccacagcgcccagatcgccaagcccatcagacccggccagcaccccgccgccagccccacccaccccagcgccatcagaggcggcggcgccttcgtgcagaacagccagcccgtggccgtgagaggcggcggcggcaagcaggtgtag

SEQ ID NO: 86288 - DNA, 2583 bp, synthetic construct
  misc_feature 1..2583: note = Description of Artificial Sequence: Synthetic coding sequence
  source 1..2583: mol_type = other DNA
ggcaagctgcacgacccccagctgatgggcatcatccccagaatcgcccacgacatcttcgaccacatctacagcatggacgagaacctggagttccacatcaaggtgagctacttcgagatctacctggacaagatcagagacctgctggacgtgagcaagaccaacctggccgtgcacgaggacaagaacagagtgccctacgtgaagggctgcaccgagagattcgtgagcagccccgaggaggtgatggacgtgatcgacgagggcaaggccaacagacacgtggccgtgaccaacatgaacgagcacagcagcagaagccacagcatcttcctgatcaacatcaagcaggagaacgtggagaccgagaagaagctgagcggcaagctgtacctggtggacctggccggcagcgagaaggtgagcaagaccggcgccgagggcgccgtgctggacgaggccaagaacatcaacaagagcctgagcgccctgggcaacgtgatcagcgccctggccgagggcaccaagacccacgtgccctacagagacagcaagatgaccagaatcctgcaggacagcctgggcggcaactgcagaaccaccatcgtgatctgctgcagccccagcgtgttcaacgaggccgagaccaagagcaccctgatgttcggccagagagccaagaccatcaagaacaccgtgagcgtgaacctggagctgaccgccgaggagtggaagaagaagtacgagaaggagaaggagaagaacaagaccctgaagaacgtgatccagcacctggagatggagctgaacagatggagaaacggcgaggccgtgcccgaggacgagcagatcagcgccaaggaccagaagaacctggagccctgcgacaacacccccatcatcgacaacatcgcccccgtggtggccggcatcagcaccgaggagaaggagaagtacgacgaggagatcagcagcctgtacagacagctggacgacaaggacgacgagatcaaccagcagagccagctggccgagaagctgaagcagcagatgctggaccaggacgagctgctggccagcaccagaagagactacgagaagatccaggaggagctgaccagactgcagatcgagaacgaggccgccaaggacgaggtgaaggaggtgctgcaggccctggaggagctggccgtgaactacgaccagaagagccaggaggtggaggacaagaccagagccaacgagcagctgaccgacgagctggcccagaagaccaccaccctgaccaccacccagagagagctgagccagctgcaggagctgagcaaccaccagaagaagagagccaccgagatcctgaacctgctgctgaaggacctgggcgagatcggcggcatcatcggcaccaacgacgtgaagaccctggccgacgtgaacggcgtgatcgaggaggagttcaccatggccagactgtacatcagcaagatgaagagcgaggtgaagagcctggtgaacagaagcaagcagctggagagcgcccagatggacagcaacagaaagatgaacgccagcgagagagagctggccgcctgccagctgctgatcagccagcacgaggccaagatcaagagcctgaccgactacatgcagaacatggagcagaagagaagacagctggaggagagccaggacagcctgagcgaggagctggccaagctgagagcccaggagaagatgcacgaggtgagcttccaggacaaggagaaggagcacctgaccagactgcaggacgccgaggagatgaagaaggccctggagcagcagatggagagccacagagaggcccaccagaagcagctgagcagactgagagacgagatcgaggagaagcagaagatcatcgacgagatcagagacctgaaccagaagctgcagctggagcaggagaagctgagcagcgactacaacaagctgaagatcgaggaccaggagagagagatgaagctggagaagctgctgctgctgaacgacaagagagagcaggccagagaggacctgaagggcctggaggagaccgtgagcagagagctgcagaccctgcacaacctgagaaagctgttcgtgcaggacctgaccaccagagtgaagaagagcgtggagctggacaacgacgacggcggcggcagcgccgcccagaagcagaagatcagcttcctggagaacaacctggagcagctgaccaaggtgcacaagcagctggtgagagacaacgccgacctgagatgcgagctgcccaagctggagaagagactgagagccaccgccgagagagtgaaggccctggagagcgccctgaaggaggccaaggagaacgccatgagagacagaaagagataccagcaggaggtggacagaatcaaggaggccgtgagagccaagaacatggccagaagagcccacagcgcccagatcgccaagcccatcagacccggccactaccccgccagcagccccaccgccgtgcacgccatcagaggcggcggcggcagcagcagcaacagcacccactaccagaagtag

SEQ ID NO: 86289 - DNA, 2178 bp, synthetic construct
  misc_feature 1..2178: note = Description of Artificial Sequence: Synthetic coding sequence
  source 1..2178: mol_type = other DNA
atggccacctacatccacgtgagcaagaccggcgccgagggcgccgtgctggacgaggccaagaacatcaacaagagcctgagcgccctgggcaacgtgatcagcgccctggccgagggcaccaagacccacgtgccctacagagacagcaagatgaccagaatcctgcaggacagcctgggcggcaactgcagaaccaccatcgtgatctgctgcagccccagcgtgttcaacgaggccgagaccaagagcaccctgatgttcggccagagagccaagaccatcaagaacaccgtgagcgtgaacctggagctgaccgccgaggagtggaagaagaagtacgagaaggagaaggagaagaacaagaccctgaagaacgtgatccagcacctggagatggagctgaacagatggagaaacggcgaggccgtgcccgaggacgagcagatcagcgccaaggaccagaagaacctggagccctgcgacaacacccccatcatcgacaacatcgcccccgtggtggccggcatcagcaccgaggagaaggagaagtacgacgaggagatcagcagcctgtacagacagctggacgacaaggacgacgagatcaaccagcagagccagctggccgagaagctgaagcagcagatgctggaccaggacgagctgctggccagcaccagaagagactacgagaagatccaggaggagctgaccagactgcagatcgagaacgaggccgccaaggacgaggtgaaggaggtgctgcaggccctggaggagctggccgtgaactacgaccagaagagccaggaggtggaggacaagaccagagccaacgagcagctgaccgacgagctggcccagaagaccaccaccctgaccaccacccagagagagctgagccagctgcaggagctgagcaaccaccagaagaagagagccaccgagatcctgaacctgctgctgaaggacctgggcgagatcggcggcatcatcggcaccaacgacgtgaagaccctggccgacgtgaacggcgtgatcgaggaggagttcaccatggccagactgtacatcagcaagatgaagagcgaggtgaagagcctggtgaacagaagcaagcagctggagagcgcccagatggacagcaacagaaagatgaacgccagcgagagagagctggccgcctgccagctgctgatcagccagcacgaggccaagatcaagagcctgaccgactacatgcagaacatggagcagaagagaagacagctggaggagagccaggacagcctgagcgaggagctggccaagctgagagcccaggagaagatgcacgaggtgagcttccaggacaaggagaaggagcacctgaccagactgcaggacgccgaggagatgaagaaggccctggagcagcagatggagagccacagagaggcccaccagaagcagctgagcagactgagagacgagatcgaggagaagcagaagatcatcgacgagatcagagacctgaaccagaagctgcagctggagcaggagaagctgagcagcgactacaacaagctgaagatcgaggaccaggagagagagatgaagctggagaagctgctgctgctgaacgacaagagagagcaggccagagaggacctgaagggcctggaggagaccgtgagcagagagctgcagaccctgcacaacctgagaaagctgttcgtgcaggacctgaccaccagagtgaagaagagcgtggagctggacaacgacgacggcggcggcagcgccgcccagaagcagaagatcagcttcctggagaacaacctggagcagctgaccaaggtgcacaagcagctggtgagagacaacgccgacctgagatgcgagctgcccaagctggagaagagactgagagccaccgccgagagagtgaaggccctggagagcgccctgaaggaggccaaggagaacgccatgagagacagaaagagataccagcaggaggtggacagaatcaaggaggccgtgagagccaagaacatggccagaagagcccacagcgcccagatcgccaagcccatcagacccggccactaccccgccagcagccccaccgccgtgcacgccatcagaggcggcggcggcagcagcagcaacagcacccactaccagaagtag

SEQ ID NO: 86290 - DNA, 2589 bp, synthetic construct
  misc_feature 1..2589: note = Description of Artificial Sequence: Synthetic coding sequence
  source 1..2589: mol_type = other DNA
atgtggggcaagctgcacgacccccagctgatgggcatcatccccagaatcgcccacgacatcttcgaccacatctacagcatggacgagaacctggagttccacatcaaggtgagctacttcgagatctacctggacaagatcagagacctgctggacgtgagcaagaccaacctggccgtgcacgaggacaagaacagagtgccctacgtgaagggctgcaccgagagattcgtgagcagccccgaggaggtgatggacgtgatcgacgagggcaaggccaacagacacgtggccgtgaccaacatgaacgagcacagcagcagaagccacagcatcttcctgatcaacatcaagcaggagaacgtggagaccgagaagaagctgagcggcaagctgtacctggtggacctggccggcagcgagaaggtgagcaagaccggcgccgagggcgccgtgctggacgaggccaagaacatcaacaagagcctgagcgccctgggcaacgtgatcagcgccctggccgagggcaccaagacccacgtgccctacagagacagcaagatgaccagaatcctgcaggacagcctgggcggcaactgcagaaccaccatcgtgatctgctgcagccccagcgtgttcaacgaggccgagaccaagagcaccctgatgttcggccagagagccaagaccatcaagaacaccgtgagcgtgaacctggagctgaccgccgaggagtggaagaagaagtacgagaaggagaaggagaagaacaagaccctgaagaacgtgatccagcacctggagatggagctgaacagatggagaaacggcgaggccgtgcccgaggacgagcagatcagcgccaaggaccagaagaacctggagccctgcgacaacacccccatcatcgacaacatcgcccccgtggtggccggcatcagcaccgaggagaaggagaagtacgacgaggagatcagcagcctgtacagacagctggacgacaaggacgacgagatcaaccagcagagccagctggccgagaagctgaagcagcagatgctggaccaggacgagctgctggccagcaccagaagagactacgagaagatccaggaggagctgaccagactgcagatcgagaacgaggccgccaaggacgaggtgaaggaggtgctgcaggccctggaggagctggccgtgaactacgaccagaagagccaggaggtggaggacaagaccagagccaacgagcagctgaccgacgagctggcccagaagaccaccaccctgaccaccacccagagagagctgagccagctgcaggagctgagcaaccaccagaagaagagagccaccgagatcctgaacctgctgctgaaggacctgggcgagatcggcggcatcatcggcaccaacgacgtgaagaccctggccgacgtgaacggcgtgatcgaggaggagttcaccatggccagactgtacatcagcaagatgaagagcgaggtgaagagcctggtgaacagaagcaagcagctggagagcgcccagatggacagcaacagaaagatgaacgccagcgagagagagctggccgcctgccagctgctgatcagccagcacgaggccaagatcaagagcctgaccgactacatgcagaacatggagcagaagagaagacagctggaggagagccaggacagcctgagcgaggagctggccaagctgagagcccaggagaagatgcacgaggtgagcttccaggacaaggagaaggagcacctgaccagactgcaggacgccgaggagatgaagaaggccctggagcagcagatggagagccacagagaggcccaccagaagcagctgagcagactgagagacgagatcgaggagaagcagaagatcatcgacgagatcagagacctgaaccagaagctgcagctggagcaggagaagctgagcagcgactacaacaagctgaagatcgaggaccaggagagagagatgaagctggagaagctgctgctgctgaacgacaagagagagcaggccagagaggacctgaagggcctggaggagaccgtgagcagagagctgcagaccctgcacaacctgagaaagctgttcgtgcaggacctgaccaccagagtgaagaagagcgtggagctggacaacgacgacggcggcggcagcgccgcccagaagcagaagatcagcttcctggagaacaacctggagcagctgaccaaggtgcacaagcagctggtgagagacaacgccgacctgagatgcgagctgcccaagctggagaagagactgagagccaccgccgagagagtgaaggccctggagagcgccctgaaggaggccaaggagaacgccatgagagacagaaagagataccagcaggaggtggacagaatcaaggaggccgtgagagccaagaacatggccagaagagcccacagcgcccagatcgccaagcccatcagacccggccactaccccgccagcagccccaccgccgtgcacgccatcagaggcggcggcggcagcagcagcaacagcacccactaccagaagtag

SEQ ID NO: 86291 - DNA, 2874 bp, synthetic construct
  misc_feature 1..2874: note = Description of Artificial Sequence: Synthetic coding sequence
  source 1..2874: mol_type = other DNA
atggccgaccccgccgagtgcagcatcaaggtgatgtgcagattcagacccctgaacgaggccgagatcctgagaggcgacaagttcatccccaagttcaagggcgacgagaccgtggtgatcggccagggcaagccctacgtgttcgacagagtgctgccccccaacaccacccaggagcaggtgtacaacgcctgcgccaagcagatcgtgaaggacgtgctggagggctacaacggcaccatcttcgcctacggccagaccagcagcggcaagacccacaccatggagggcaagctgcacgacccccagctgatgggcatcatccccagaatcgcccacgacatcttcgaccacatctacagcatggacgagaacctggagttccacatcaaggtgagctacttcgagatctacctggacaagatcagagacctgctggacgtgagcaagaccaacctggccgtgcacgaggacaagaacagagtgccctacgtgaagggctgcaccgagagattcgtgagcagccccgaggaggtgatggacgtgatcgacgagggcaaggccaacagacacgtggccgtgaccaacatgaacgagcacagcagcagaagccacagcatcttcctgatcaacatcaagcaggagaacgtggagaccgagaagaagctgagcggcaagctgtacctggtggacctggccggcagcgagaaggtgagcaagaccggcgccgagggcgccgtgctggacgaggccaagaacatcaacaagagcctgagcgccctgggcaacgtgatcagcgccctggccgagggcaccaagacccacgtgccctacagagacagcaagatgaccagaatcctgcaggacagcctgggcggcaactgcagaaccaccatcgtgatctgctgcagccccagcgtgttcaacgaggccgagaccaagagcaccctgatgttcggccagagagccaagaccatcaagaacaccgtgagcgtgaacctggagctgaccgccgaggagtggaagaagaagtacgagaaggagaaggagaagaacaagaccctgaagaacgtgatccagcacctggagatggagctgaacagatggagaaacggcgaggccgtgcccgaggacgagcagatcagcgccaaggaccagaagaacctggagccctgcgacaacacccccatcatcgacaacatcgcccccgtggtggccggcatcagcaccgaggagaaggagaagtacgacgaggagatcagcagcctgtacagacagctggacgacaaggacgacgagatcaaccagcagagccagctggccgagaagctgaagcagcagatgctggaccaggacgagctgctggccagcaccagaagagactacgagaagatccaggaggagctgaccagactgcagatcgagaacgaggccgccaaggacgaggtgaaggaggtgctgcaggccctggaggagctggccgtgaactacgaccagaagagccaggaggtggaggacaagaccagagccaacgagcagctgaccgacgagctggcccagaagaccaccaccctgaccaccacccagagagagctgagccagctgcaggagctgagcaaccaccagaagaagagagccaccgagatcctgaacctgctgctgaaggacctgggcgagatcggcggcatcatcggcaccaacgacgtgaagaccctggccgacgtgaacggcgtgatcgaggaggagttcaccatggccagactgtacatcagcaagatgaagagcgaggtgaagagcctggtgaacagaagcaagcagctggagagcgcccagatggacagcaacagaaagatgaacgccagcgagagagagctggccgcctgccagctgctgatcagccagcacgaggccaagatcaagagcctgaccgactacatgcagaacatggagcagaagagaagacagctggaggagagccaggacagcctgagcgaggagctggccaagctgagagcccaggagaagatgcacgaggtgagcttccaggacaaggagaaggagcacctgaccagactgcaggacgccgaggagatgaagaaggccctggagcagcagatggagagccacagagaggcccaccagaagcagctgagcagactgagagacgagatcgaggagaagcagaagatcatcgacgagatcagagacctgaaccagaagctgcagctggagcaggagaagctgagcagcgactacaacaagctgaagatcgaggaccaggagagagagatgaagctggagaagctgctgctgctgaacgacaagagagagcaggccagagaggacctgaagggcctggaggagaccgtgagcagagagctgcagaccctgcacaacctgagaaagctgttcgtgcaggacctgaccaccagagtgaagaagagcgtggagctggacaacgacgacggcggcggcagcgccgcccagaagcagaagatcagcttcctggagaacaacctggagcagctgaccaaggtgcacaagcagctggtgagagacaacgccgacctgagatgcgagctgcccaagctggagaagagactgagagccaccgccgagagagtgaaggccctggagagcgccctgaaggaggccaaggagaacgccatgagagacagaaagagataccagcaggaggtggacagaatcaaggaggccgtgagagccaagaacatggccagaagagcccacagcgcccagatcgccaagcccatcagacccggccactaccccgccagcagccccaccgccgtgcacgccatcagaggcggcggcggcagcagcagcaacagcacccactaccagaagtag

SEQ ID NO: 86292 - DNA, 219 bp, synthetic construct
  misc_feature 1..219: note = Description of Artificial Sequence: Synthetic coding sequence
  source 1..219: mol_type = other DNA
atggccgaccccgccgagtgcagcatcaaggtgatgtgcagattcagacccctgaacgaggccgagatcctgagaggcgacaagttcatccccaagttcaagggcgacgagaccgtggtgatcggccagggcaagccctacgtgttcgacagagtgctgccccccaacaccacccaggagcaggtgtacaacgcctgcgccaagcagatcgtgaagtag

SEQ ID NO: 86293 - DNA, 552 bp, synthetic construct
  misc_feature 1..552: note = Description of Artificial Sequence: Synthetic coding sequence
  source 1..552: mol_type = other DNA
atggagcagagactggccgagttcagagccgccagaaagagagccggcctggccgcccagccccccgccgccagccagggcgcccagacccccggcgagaaggccgaggccgccgccaccctgaaggccgcccccggctggctgaagagattcctggtgtggaagcccagacccgccagcgccagagcccagcccggcctggtgcaggaggccgcccagccccagggcagcaccagcgagaccccctggaacaccgccatccccctgcccagctgctgggaccagagcttcctgaccaacatcaccttcctgaaggtgctgctgtggctggtgctgctgggcctgttcgtggagctggagttcggcctggcctacttcgtgctgagcctgttctactggatgtacgtgggcaccagaggccccgaggagaagaaggagggcgagaagagcgcctacagcgtgttcaaccccggctgcgaggccatccagggcaccctgaccgccgagcagctggagagagagctgcagctgagacccctggccggcagatag

SEQ ID NO: 86294 - DNA, 2445 bp, synthetic construct
  misc_feature 1..2445: note = Description of Artificial Sequence: Synthetic coding sequence
  source 1..2445: mol_type = other DNA
atggtgaagcagaccatccagatcttcgccagagtgaagccccccgtgagaaagcaccagcagggcatctacagcatcgacgaggacgagaagctgatccccagcctggagatcatcctgcccagagacctggccgacggcttcgtgaacaacaagagagagagctacaagttcaagttccagagaatcttcgaccaggacgccaaccaggagaccgtgttcgagaacatcgccaagcccgtggccggcagcgtgctggccggctacaacggcaccatcttcgcctacggccagaccggcagcggcaagaccttcaccatcaccggcggcgccgagagatacagcgacagaggcatcatccccagaaccctgagctacatcttcgagcagctgcagaaggacagcagcaagatctacaccacccacatcagctacctggagatctacaacgagtgcggctacgacctgctggaccccagacacgaggccagcagcctggaggacctgcccaaggtgaccatcctggaggaccccgaccagaacatccacctgaagaacctgaccctgcaccaggccaccaccgaggaggaggccctgaacctgctgttcctgggcgacaccaacagaatgatcgccgagacccccatgaaccaggccagcaccagaagccactgcatcttcaccatccacctgagcagcaaggagcccggcagcgccaccgtgagacacgccaagctgcacctggtggacctggccggcagcgagagagtggccaagaccggcgtgggcggccacctgctgaccgaggccaagtacatcaacctgagcctgcactacctggagcaggtgatcatcgccctgagcgagaagcacagaagccacatcccctacagaaacagcatgatgaccagcgtgctgagagacagcctgggcggcaactgcatgaccaccatgatcgccaccctgagcctggagaagagaaacctggacgagagcatcagcacctgcagattcgcccagagagtggccctgatcaagaacgaggccgtgctgaacgaggagatcaaccccagactggtgatcaagagactgcagaaggagatccaggagctgaaggacgagctggccatggtgaccggcgagcagagaaccgaggccctgaccgaggccgagctgctgcagctggagaagctgatcaccagcttcctggaggaccaggacagcgacagcagactggaggtgggcgccgacatgagaaaggtgcaccactgcttccaccacctgaagaagctgctgaacgacaagaagatcctggagaacaacaccgtgagcagcgagagcaaggaccaggactgccaggagcccctgaaggaggaggagtacagaaagctgagagacatcctgaagcagagagacaacgagatcaacatcctggtgaacatgctgaagaaggagaagaagaaggcccaggaggccctgcacctggccggcatggacagaagagagttcagacagagccagagcccccccttcagactgggcaaccccgaggagggccagagaatgagactgagcagcgcccccagccaggcccaggacttcagcatcctgggcaagagaagcagcctgctgcacaagaagatcggcatgagagaggagatgagcctgggctgccaggaggccttcgagatcttcaagagagaccacgccgacagcgtgaccatcgacgacaacaagcagatcctgaagcagagattcagcgaggccaaggccctgggcgagagcatcaacgaggccagaagcaagatcggccacctgaaggaggagatcacccagagacacatccagcaggtggccctgggcatcagcgagaacatggccgtgcccctgatgcccgaccagcaggaggagaagctgagaagccagctggaggaggagaagagaagatacaagaccatgttcaccagactgaaggccctgaaggtggagatcgagcacctgcagctgctgatggacaaggccaaggtgaagctgcagaaggagttcgaggtgtggtgggccgaggaggccaccaacctgcaggtgaacagccccgccgtgaacagcctggaccacaccaagcccttcctgcagaccagcgacagccagcacgagtggagccagctgctgagcaacaagagcagcggcggctgggaggtgcaggaccagggcaccggcagattcgacgtgtgcgacgtgaacgccagaaagatcctgcccagcccctgccccagcccccacagccagaagcagagcagcaccagcacccccctggaggacagcatccccaagagacccgtgagcagcatccccctgaccggcgacagccagaccgacagcgacatcatcgccttcatcaaggccagacagagcatcctgcagaagcagtgcctgggcagcaactag

SEQ ID NO: 86295 - DNA, 498 bp, synthetic construct
  misc_feature 1..498: note = Description of Artificial Sequence: Synthetic coding sequence
  source 1..498: mol_type = other DNA
atgatcgccgagacccccatgaaccaggccagcaccagaagccactgcatcttcaccatccacctgagcagcaaggagcccggcagcgccaccgtgagacacgccaagctgcacctggtggacctggccggcagcgagagagtggccaagaccggcgtgggcggccacctgctgaccgaggccaagtacatcaacctgagcctgcactacctggagcaggtgatcatcgccctgagcgagaagcacagaagccacatcccctacagaaacagcatgatgaccagcgtgctgagagacagcctgggcggcaactgcatgaccaccatgatcgccaccctgagcctggagaagagaaacctggacgagagcatcagcacctgcagattcgcccagagagtggccctgatcaagaacgaggccgtgctgaacgaggagatcaaccccagactgaaggcccccagcagcagcgacggcgtgctgttctgcagaaaccagtag

SEQ ID NO: 86296 - DNA, 1962 bp, synthetic construct
  misc_feature 1..1962: note = Description of Artificial Sequence: Synthetic coding sequence
  source 1..1962: mol_type = other DNA
atggccagcagcctgtacgacctgaagaaggtgaccatcctggaggaccccgaccagaacatccacctgaagaacctgaccctgcaccaggccaccaccgaggaggaggccctgaacctgctgttcctgggcgacaccaacagaatgatcgccgagacccccatgaaccaggccagcaccagaagccactgcatcttcaccatccacctgagcagcaaggagcccggcagcgccaccgtgagacacgccaagctgcacctggtggacctggccggcagcgagagagtggccaagaccggcgtgggcggccacctgctgaccgaggccaagtacatcaacctgagcctgcactacctggagcaggtgatcatcgccctgagcgagaagcacagaagccacatcccctacagaaacagcatgatgaccagcgtgctgagagacagcctgggcggcaactgcatgaccaccatgatcgccaccctgagcctggagaagagaaacctggacgagagcatcagcacctgcagattcgcccagagagtggccctgatcaagaacgaggccgtgctgaacgaggagatcaaccccagactggtgatcaagagactgcagaaggagatccaggagctgaaggacgagctggccatggtgaccggcgagcagagaaccgaggccctgaccgaggccgagctgctgcagctggagaagctgatcaccagcttcctggaggaccaggacagcgacagcagactggaggtgggcgccgacatgagaaaggtgcaccactgcttccaccacctgaagaagctgctgaacgacaagaagatcctggagaacaacaccgtgagcagcgagagcaaggaccaggactgccaggagcccctgaaggaggaggagtacagaaagctgagagacatcctgaagcagagagacaacgagatcaacatcctggtgaacatgctgaagaaggagaagaagaaggcccaggaggccctgcacctggccggcatggacagaagagagttcagacagagccagagcccccccttcagactgggcaaccccgaggagggccagagaatgagactgagcagcgcccccagccaggcccaggacttcagcatcctgggcaagagaagcagcctgctgcacaagaagatcggcatgagagaggagatgagcctgggctgccaggaggccttcgagatcttcaagagagaccacgccgacagcgtgaccatcgacgacaacaagcagatcctgaagcagagattcagcgaggccaaggccctgggcgagagcatcaacgaggccagaagcaagatcggccacctgaaggaggagatcacccagagacacatccagcaggtggccctgggcatcagcgagaacatggccgtgcccctgatgcccgaccagcaggaggagaagctgagaagccagctggaggaggagaagagaagatacaagaccatgttcaccagactgaaggccctgaaggtggagatcgagcacctgcagctgctgatggacaaggccaaggtgaagctgcagaaggagttcgaggtgtggtgggccgaggaggccaccaacctgcaggtgaacagccccgccgtgaacagcctggaccacaccaagcccttcctgcagaccagcgacagccagcacgagtggagccagctgctgagcaacaagagcagcggcggctgggaggtgcaggaccagggcaccggcagattcgacgtgtgcgacgtgaacgccagaaagatcctgcccagcccctgccccagcccccacagccagaagcagagcagcaccagcacccccctggaggacagcatccccaagagacccgtgagcagcatccccctgaccggcgacagccagaccgacagcgacatcatcgccttcatcaaggccagacagagcatcctgcagaagcagtgcctgggcagcaactag

SEQ ID NO: 86297 - DNA, 2394 bp, synthetic construct
  misc_feature 1..2394: note = Description of Artificial Sequence: Synthetic coding sequence
  source 1..2394: mol_type = other DNA
atggtgaagcagaccatccagatcttcgccagagtgaagccccccgtgagaaagcaccagcagggcatctacagcatcgacgaggacgagaagctgatccccagcctggagatcatcctgcccagagacctggccgacggcttcgtgaacaacaagagagagagctacaagttcaagttccagagaatcttcgaccaggacgccaaccaggagaccgtgttcgagaacatcgccaagcccgtggccggcagcgtgctggccggctacaacggcaccatcttcgcctacggccagaccggcagcggcaagaccttcaccatcaccggcggcgccgagagatacagcgacagaggcatcatccccagaaccctgagctacatcttcgagcagctgcagaaggacagcagcaagatctacaccacccacatcagctacctggagatctacaacgagtgcggctacgacctgctggaccccagacacgaggccagcagcctggaggacctgcccaaggtgaccatcctggaggaccccgaccagaacatccacctgaagaacctgaccctgcaccaggccaccaccgaggaggaggccctgaacctgctgttcctgggcgacaccaacagaatgatcgccgagacccccatgaaccaggccagcaccagaagccactgcatcttcaccatccacctgagcagcaaggagcccggcagcgccaccgtgagacacgccaagctgcacctggtggacctggccggcagcgagagagtggccaagaccggcgtgggcggccacctgctgaccgaggccaagtacatcaacctgagcctgcactacctggagcaggtgatcatcgccctgagcgagaagcacagaagccacatcccctacagaaacagcatgatgaccagcgtgctgagagacagcctgggcggcaactgcatgaccaccatgatcgccaccctgagcctggagaagagaaacctggacgagagcatcagcacctgcagattcgcccagagagtggccctgatcaagaacgaggccgtgctgaacgaggagatcaaccccagactggtgatcaagagactgcagaaggagatccaggagctgaaggacgagctggccatggtgaccggcgagcagagaaccgaggccctgaccgaggccgagctgctgcagctggagaagctgatcaccagcttcctggaggaccaggacagcgacagcagactggaggtgggcgccgacatgagaaaggtgcaccactgcttccaccacctgaagaagctgctgaacgacaagaagatcctggagaacaacaccgtgagcagcgagagcaaggaccaggactgccaggagcccctgaaggaggaggagtacagaaagctgagagacatcctgaagcagagagacaacgagatcaacatcctggtgaacatgctgaagaaggagaagaagaaggcccaggaggccctgcacctggccggcatggacagaagagagttcagacagagccagagcccccccttcagactgggcaaccccgaggagggccagagaatgagactgagcagcgcccccagccaggcccaggacttcagcatcctgggcaagagaagcagcctgctgcacaagaagatcggcatgagagaggagatgagcctgggctgccaggaggccttcgagatcttcaagagagaccacgccgacagcgtgaccatcgacgacaacaagcagatcctgaagcagagattcagcgaggccaaggccctgggcgagagcatcaacgaggccagaagcaagatcggcatcagcgagaacatggccgtgcccctgatgcccgaccagcaggaggagaagctgagaagccagctggaggaggagaagagaagatacaagaccatgttcaccagactgaaggccctgaaggtggagatcgagcacctgcagctgctgatggacaaggccaaggtgaagctgcagaaggagttcgaggtgtggtgggccgaggaggccaccaacctgcaggtgaacagccccgccgtgaacagcctggaccacaccaagcccttcctgcagaccagcgacagccagcacgagtggagccagctgctgagcaacaagagcagcggcggctgggaggtgcaggaccagggcaccggcagattcgacgtgtgcgacgtgaacgccagaaagatcctgcccagcccctgccccagcccccacagccagaagcagagcagcaccagcacccccctggaggacagcatccccaagagacccgtgagcagcatccccctgaccggcgacagccagaccgacagcgacatcatcgccttcatcaaggccagacagagcatcctgcagaagcagtgcctgggcagcaactag

SEQ ID NO: 86298 - DNA, 2394 bp, synthetic construct
  misc_feature 1..2394: note = Description of Artificial Sequence: Synthetic coding sequence
  source 1..2394: mol_type = other DNA
atggtgaagcagaccatccagatcttcgccagagtgaagccccccgtgagaaagcaccagcagggcatctacagcatcgacgaggacgagaagctgatccccagcctggagatcatcctgcccagagacctggccgacggcttcgtgaacaacaagagagagagctacaagttcaagttccagagaatcttcgaccaggacgccaaccaggagaccgtgttcgagaacatcgccaagcccgtggccggcagcgtgctggccggctacaacggcaccatcttcgcctacggccagaccggcagcggcaagaccttcaccatcaccggcggcgccgagagatacagcgacagaggcatcatccccagaaccctgagctacatcttcgagcagctgcagaaggacagcagcaagatctacaccacccacatcagctacctggagatctacaacgagtgcggctacgacctgctggaccccagacacgaggccagcagcctggaggacctgcccaaggtgaccatcctggaggaccccgaccagaacatccacctgaagaacctgaccctgcaccaggccaccaccgaggaggaggccctgaacctgctgttcctgggcgacaccaacagaatgatcgccgagacccccatgaaccaggccagcaccagaagccactgcatcttcaccatccacctgagcagcaaggagcccggcagcgccaccgtgagacacgccaagctgcacctggtggacctggccggcagcgagagagtggccaagaccggcgtgggcggccacctgctgaccgaggccaagtacatcaacctgagcctgcactacctggagcaggtgatcatcgccctgagcgagaagcacagaagccacatcccctacagaaacagcatgatgaccagcgtgctgagagacagcctgggcggcaactgcatgaccaccatgatcgccaccctgagcctggagaagagaaacctggacgagagcatcagcacctgcagattcgcccagagagtggccctgatcaagaacgaggccgtgctgaacgaggagatcaaccccagactggtgatcaagagactgcagaaggagatccaggagctgaaggacgagctggccatggtgaccggcgagcagagaaccgaggccctgaccgaggccgagctgctgcagctggagaagctgatcaccagcttcctggaggaccaggacagcgacagcagactggaggtgggcgccgacatgagaaaggtgcaccactgcttccaccacctgaagaagctgctgaacgacaagaagatcctggagaacaacaccgtgagcagcgagagcaaggaccaggactgccaggagcccctgaaggaggaggagtacagaaagctgagagacatcctgaagcagagagacaacgagatcaacatcctggtgaacatgctgaagaaggagaagaagaaggcccaggaggccctgcacctggccggcatggacagaagagagttcagacagagccagagcccccccttcagactgggcaaccccgaggagggccagagaatgagactgagcagcgcccccagccaggcccaggacttcagcatcctgggcaagagaagcagcctgctgcacaagaagatcggcatgagagaggagatgagcctgggctgccaggaggccttcgagatcttcaagagagaccacgccgacagcgtgaccatcgacgacaacaagcagatcctgaagcagagattcagcgaggccaaggccctgggcgagagcatcaacgaggccagaagcaagatcggccacctgaaggaggagatcacccagagacacatccagcaggtggccctgggcatcagcgagaacatggccgtgcccctgatgcccgaccagcaggaggagaagctgagaagccagctggaggaggagaagagaagatacaagaccatgttcaccagactgaaggccctgaaggtggagatcgagcacctgcagctgctgatggacaaggccaaggtgaagctgcagaaggagttcgaggtgtggtgggccgaggaggccaccaacctgcaggtgaacagccccgccgtgaacagcctggaccacaccaagcccttcctgcagaccagcgacagccagcacgagtggagccagctgctgagcaacaagagcgacgtgaacgccagaaagatcctgcccagcccctgccccagcccccacagccagaagcagagcagcaccagcacccccctggaggacagcatccccaagagacccgtgagcagcatccccctgaccggcgacagccagaccgacagcgacatcatcgccttcatcaaggccagacagagcatcctgcagaagcagtgcctgggcagcaactag

SEQ ID NO: 86299 - DNA, 747 bp, synthetic construct
  misc_feature 1..747: note = Description of Artificial Sequence: Synthetic coding sequence
  source 1..747: mol_type = other DNA
atgagagaggagatgagcctgggctgccaggaggccttcgagatcttcaagagagaccacgccgacagcgtgaccatcgacgacaacaagcagatcctgaagcagagattcagcgaggccaaggccctgggcgagagcatcaacgaggccagaagcaagatcggccacctgaaggaggagatcacccagagacacatccagcaggtggccctgggcatcagcgagaacatggccgtgcccctgatgcccgaccagcaggaggagaagctgagaagccagctggaggaggagaagagaagatacaagaccatgttcaccagactgaaggccctgaaggtggagatcgagcacctgcagctgctgatggacaaggccaaggtgaagctgcagaaggagttcgaggtgtggtgggccgaggaggccaccaacctgcaggtgaacagccccgccgtgaacagcctggaccacaccaagcccttcctgcagaccagcgacagccagcacgagtggagccagctgctgagcaacaagagcgacgtgaacgccagaaagatcctgcccagcccctgccccagcccccacagccagaagcagagcagcaccagcacccccctggaggacagcatccccaagagacccgtgagcagcatccccctgaccggcgacagccagaccgacagcgacatcatcgccttcatcaaggccagacagagcatcctgcagaagcagtgcctgggcagcaactag

SEQ ID NO: 86300 - DNA, 486 bp, synthetic construct
  misc_feature 1..486: note = Description of Artificial Sequence: Synthetic coding sequence
  source 1..486: mol_type = other DNA
acccccatgaaccaggccagcaccagaagccactgcatcttcaccatccacctgagcagcaaggagcccggcagcgccaccgtgagacacgccaagctgcacctggtggacctggccggcagcgagagagtggccaagaccggcgtgggcggccacctgctgaccgaggccaagtacatcaacctgagcctgcactacctggagcaggtgatcatcgccctgagcgagaagcacagaagccacatcccctacagaaacagcatgatgaccagcgtgctgagagacagcctgggcggcaactgcatgaccaccatgatcgccaccctgagcctggagaagagaaacctggacgagagcatcagcacctgcagattcgcccagagagtggccctgatcaagaacgaggccgtgctgaacgaggagatcaaccccagactgaaggcccccagcagcagcgacggcgtgctgttctgcagaaaccagtag

SEQ ID NO: 86301 - DNA, 2070 bp, synthetic construct
  misc_feature 1..2070: note = Description of Artificial Sequence: Synthetic coding sequence
  source 1..2070: mol_type = other DNA
tgaggcgccgagagatacagcgacagaggcatcatccccagaaccctgagctacatcttcgagcagctgcagaaggacagcagcaagatctacaccacccacatcagctacctggagatctacaacgagtgcggctacgacctgctggaccccagacacgaggccagcagcctggaggacctgcccaaggtgaccatcctggaggaccccgaccagaacatccacctgaagaacctgaccctgcaccaggccaccaccgaggaggaggccctgaacctgctgttcctgggcgacaccaacagaatgatcgccgagacccccatgaaccaggccagcaccagaagccactgcatcttcaccatccacctgagcagcaaggagcccggcagcgccaccgtgagacacgccaagctgcacctggtggacctggccggcagcgagagagtggccaagaccggcgtgggcggccacctgctgaccgaggccaagtacatcaacctgagcctgcactacctggagcaggtgatcatcgccctgagcgagaagcacagaagccacatcccctacagaaacagcatgatgaccagcgtgctgagagacagcctgggcggcaactgcatgaccaccatgatcgccaccctgagcctggagaagagaaacctggacgagagcatcagcacctgcagattcgcccagagagtggccctgatcaagaacgaggccgtgctgaacgaggagatcaaccccagactggtgatcaagagactgcagaaggagatccaggagctgaaggacgagctggccatggtgaccggcgagcagagaaccgaggccctgaccgaggccgagctgctgcagctggagaagctgatcaccagcttcctggaggaccaggacagcgacagcagactggaggtgggcgccgacatgagaaaggtgcaccactgcttccaccacctgaagaagctgctgaacgacaagaagatcctggagaacaacaccgtgagcagcgagagcaaggaccaggactgccaggagcccctgaaggaggaggagtacagaaagctgagagacatcctgaagcagagagacaacgagatcaacatcctggtgaacatgctgaagaaggagaagaagaaggcccaggaggccctgcacctggccggcatggacagaagagagttcagacagagccagagcccccccttcagactgggcaaccccgaggagggccagagaatgagactgagcagcgcccccagccaggcccaggacttcagcatcctgggcaagagaagcagcctgctgcacaagaagatcggcatgagagaggagatgagcctgggctgccaggaggccttcgagatcttcaagagagaccacgccgacagcgtgaccatcgacgacaacaagcagatcctgaagcagagattcagcgaggccaaggccctgggcgagagcatcaacgaggccagaagcaagatcggccacctgaaggaggagatcacccagagacacatccagcaggtggccctgggcatcagcgagaacatggccgtgcccctgatgcccgaccagcaggaggagaagctgagaagccagctggaggaggagaagagaagatacaagaccatgttcaccagactgaaggccctgaaggtggagatcgagcacctgcagctgctgatggacaaggccaaggtgaagctgcagaaggagttcgaggtgtggtgggccgaggaggccaccaacctgcaggtgaacagccccgccgtgaacagcctggaccacaccaagcccttcctgcagaccagcgacagccagcacgagtggagccagctgctgagcaacaagagcgacgtgaacgccagaaagatcctgcccagcccctgccccagcccccacagccagaagcagagcagcaccagcacccccctggaggacagcatccccaagagacccgtgagcagcatccccctgaccggcgacagccagaccgacagcgacatcatcgccttcatcaaggccagacagagcatcctgcagaagcagtgcctgggcagcaactag

SEQ ID NO: 86302 - DNA, 2277 bp, synthetic construct
  misc_feature 1..2277: note = Description of Artificial Sequence: Synthetic coding sequence
  source 1..2277: mol_type = other DNA
atggtgaagcagaccatccagatcttcgccagagtgaagccccccgtgagaaagcaccagcagggcatctacagcatcgacgaggacgagaagctgatccccagcctggagatcatcctgcccagagacctggccgacggcttcgtgaacaacaagagagagagctacaagttcaagttccagagaatcttcgaccaggacgccaaccaggagaccgtgttcgagaacatcgccaagcccgtggccggcagcgtgctggccggctacaacggcaccatcttcgcctacggccagaccggcagcggcaagaccttcaccatcaccggcggcgccgagagatacagcgacagaggcatcatccccagaaccctgagctacatcttcgagcagctgcagaaggacagcagcaagatctacaccacccacatcagctacctggagatctacaacgagtgcggctacgacctgctggaccccagacacgaggccagcagcctggaggacctgcccaaggtgaccatcctggaggaccccgaccagaacatccacctgaagaacctgaccctgcaccaggccaccaccgaggaggaggccctgaacctgctgttcctgggcgacaccaacagaatgatcgccgagacccccatgaaccaggccagcaccagaagccactgcatcttcaccatccacctgagcagcaaggagcccggcagcgccaccgtgagacacgccaagctgcacctggtggacctggccggcagcgagagagtggccaagaccggcgtgggcggccacctgctgaccgaggccaagtacatcaacctgagcctgcactacctggagcaggtgatcatcgccctgagcgagaagcacagaagccacatcccctacagaaacagcatgatgaccagcgtgctgagagacagcctgggcggcaactgcatgaccaccatgatcgccaccctgagcctggagaagagaaacctggacgagagcatcagcacctgcagattcgcccagagagtggccctgatcaagaacgaggccgtgctgaacgaggagatcaaccccagactggtgatcaagagactgcagaaggagatccaggagctgaaggacgagctggccatggtgaccggcgagcagagaaccgaggccctgaccgaggccgagctgctgcagctggagaagctgatcaccagcttcctggaggaccaggacagcgacagcagactggaggtgggcgccgacatgagaaaggtgcaccactgcttccaccacctgaagaagctgctgaacgacaagaagatcctggagaacaacaccgtgagcagcgagagcaaggaccaggactgccaggagcccctgaaggaggaggagtacagaaagctgagagacatcctgaagcagagagacaacgagatcagcatcctgagcgaggtgatgaagaagctgcccctgagctggttcgagagaggcatgagagaggagatgagcctgggctgccaggaggccttcgagatcttcaagagagaccacgccgacagcgtgaccatcgacgacaacaagcagatcctgaagcagagattcagcgaggccaaggccctgggcgagagcatcaacgaggccagaagcaagatcggccacctgaaggaggagatcacccagagacacatccagcaggtggccctgggcatcagcgagaacatggccgtgcccctgatgcccgaccagcaggaggagaagctgagaagccagctggaggaggagaagagaagatacaagaccatgttcaccagactgaaggccctgaaggtggagatcgagcacctgcagctgctgatggacaaggccaaggtgaagctgcagaaggagttcgaggtgtggtgggccgaggaggccaccaacctgcaggtgaacagccccgccgtgaacagcctggaccacaccaagcccttcctgcagaccagcgacagccagcacgagtggagccagctgctgagcaacaagagcagcggcggctgggaggtgcaggaccagggcaccggcagattcgacgtgtgcgacgtgaacgccagaaagatcctgcccagcccctgccccagcccccacagccagaagcagagcagcaccagcacccccctggaggacagcatccccaagagacccgtgagcagcatccccctgaccggcgacagccagaccgacagcgacatcatcgccttcatcaaggccagacagagcatcctgcagaagcagtgcctgggcagcaactag

SEQ ID NO: 86303 - DNA, 516 bp, synthetic construct
  misc_feature 1..516: note = Description of Artificial Sequence: Synthetic coding sequence
  source 1..516: mol_type = other DNA
atgagagaggagatgagcctgggctgccaggaggccttcgagatcttcaagagagaccacgccgacagcgtgaccatcgacgacaacaagcagatcctgaagcagagattcagcgaggccaaggccctgggcgagagcatcaacgaggccagaagcaagatcggccacctgaaggaggagatcacccagagacacatccagcaggtggccctgggcatcagcgagaacatggccgtgcccctgatgcccgaccagcaggaggagaagctgagaagccagctggaggaggagaagagaagatacaagaccatgttcaccagactgaaggccctgaaggtggagatcgagcacctgcagctgctgatggacaaggccaaggtgaagctgcagaaggagttcgaggtgtggtgggccgaggaggccaccaacctgcaggtgaacagccccgccgtgaacagcctggaccacaccaagagcaagatcaaggccctggccgacagcatgagcggcctgtag

SEQ ID NO: 86304 - DNA, 882 bp, synthetic construct
  misc_feature 1..882: note = Description of Artificial Sequence: Synthetic coding sequence
  source 1..882: mol_type = other DNA
atgagagaggagatgagcctgggctgccaggaggccttcgagatcttcaagagagaccacgccgacagcgtgaccatcgacgacaacaagcagatcctgaagcagagattcagcgaggccaaggccctgggcgagagcatcaacgaggccagaagcaagatcggccacctgaaggaggagatcacccagagacacatccagcaggtggccctgggcatcagcgagaacatggccgtgcccctgatgcccgaccagcaggaggagaagctgagaagccagctggaggaggagaagagaagatacaagaccatgttcaccagactgaaggccctgaaggtggagatcgagcacctgcagctgctgatggacaaggccaaggtgaagctgcagaaggagttcgaggtgtggtgggccgaggaggccaccaacctgcaggtgaacagccccgccgtgaacagcctggaccacaccaagcccttcctgcagaccagcgacagccagcacgagtggagccagctgctgagcaacaagagcagcggcggctgggaggtgcaggaccagggcaccggcagattcgacgtgtgcgacgtgaacgccagaaagatcctgcccagcccctgccccagcccccacagccagaagcagagcagcaccagcacccccctggaggacagcatccccaagagacccgtgagcagcatccccctgaccggcgacagccagaccgacagcgacatcatcgccttcatcaaggccagacagagcatcctgcagaagcagtacctgcagctgctgtgcagcctgttccccaagagcgccgtgagcagcgcccaggccagcaccaacagaaagggcctgagcgacgtgctggtgaccagatag

SEQ ID NO: 86305 - DNA, 4032 bp, synthetic construct
  misc_feature 1..4032: note = Description of Artificial Sequence: Synthetic coding sequence
  source 1..4032: mol_type = other DNA
atgggcctggaggcccagagactgcccggcgccgaggaggcccccgtgagagtggccctgagagtgagacccctgctgcccaaggagctgctgcacggccaccagagctgcctgcaggtggagcccggcctgggcagagtgaccctgggcagagacagacacttcggcttccacgtggtgctggccgaggacgccggccaggaggccgtgtaccaggcctgcgtgcagcccctgctggaggccttcttcgagggcttcaacgccaccgtgttcgcctacggccagaccggcagcggcaagacctacaccatgggcgaggccagcgtggccagcctgctggaggacgagcagggcatcgtgcccagagccatggccgaggccttcaagctgatcgacgagaacgacctgctggactgcctggtgcacgtgagctacctggaggtgtacaaggaggagttcagagacctgctggaggtgggcaccgccagcagagacatccagctgagagaggacgagagaggcaacgtggtgctgtgcggcgtgaaggaggtggacgtggagggcctggacgaggtgctgagcctgctggagatgggcaacgccgccagacacaccggcgccacccacctgaaccacctgagcagcagaagccacaccgtgttcaccgtgaccctggagcagagaggcagagcccccagcagactgcccagacccgcccccggccagctgctggtgagcaagttccacttcgtggacctggccggcagcgagagagtgctgaagaccggcagcaccggcgagagactgaaggagagcatccagatcaacagcagcctgctggccctgggcaacgtgatcagcgccctgggcgacccccagagaagaggcagccacatcccctacagagacagcaagatcaccagaatcctgaaggacagcctgggcggcaacgccaagaccgtgatgatcgcctgcgtgagccccagcagcagcgacttcgacgagaccctgaacaccctgaactacgccagcagagcccagaacatcagaaacagagccaccgtgaactggagacccgaggccgagagaccccccgaggagaccgccagcggcgccagaggcccccccagacacagaagcgagaccagaatcatccacagaggcagaagagcccccggccccgccaccgccagcgccgccgccgccatgagactgggcgccgagtgcgccagatacagagcctgcaccgacgccgcctacagcctgctgagagagctgcaggccgagcccggcctgcccggcgccgccgccagaaaggtgagagactggctgtgcgccgtggagggcgagagaagcgccctgagcagcgccagcggccccgacagcggcatcgagagcgccagcgtggaggaccaggccgcccagggcgccggcggcagaaaggaggacgagggcgcccagcagctgctgaccctgcagaaccaggtggccagactggaggaggagaacagagacttcctggccgccctggaggacgccatggagcagtacaagctgcagagcgacagactgagagagcagcaggaggagatggtggagctgagactgagactggagctggtgagacccggctggggcggccccagactgctgaacggcctgccccccggcagcttcgtgcccagaccccacaccgcccccctgggcggcgcccacgcccacgtgctgggcatggtgccccccgcctgcctgcccggcgacgaggtgggcagcgagcagagaggcgagcaggtgaccaacggcagagaggccggcgccgagctgctgaccgaggtgaacagactgggcagcggcagcagcgccgccagcgaggaggaggaggaggaggaggagccccccagaagaaccctgcacctgagaagaaacagaatcagcaactgcagccagagagccggcgccagacccggcagcctgcccgagagaaagggccccgagctgtgcctggaggagctggacgccgccatccccggcagcagagccgtgggcggcagcaaggccagagtgcaggccagacaggtgccccccgccaccgccagcgagtggagactggcccaggcccagcagaagatcagagagctggccatcaacatcagaatgaaggaggagctgatcggcgagctggtgagaaccggcaaggccgcccaggccctgaacagacagcacagccagagaatcagagagctggagcaggaggccgagcaggtgagagccgagctgagcgagggccagagacagctgagagagctggagggcaaggagctgcaggacgccggcgagagaagcagactgcaggagttcagaagaagagtggccgccgcccagagccaggtgcaggtgctgaaggagaagaagcaggccaccgagagactggtgagcctgagcgcccagagcgagaagagactgcaggagctggagagaaacgtgcagctgatgagacagcagcagggccagctgcagagaagactgagagaggagaccgagcagaagagaagactggaggccgagatgagcaagagacagcacagagtgaaggagctggagctgaagcacgagcagcagcagaagatcctgaagatcaagaccgaggagatcgccgccttccagagaaagagaagaagcggcagcaacggcagcgtggtgagcctggagcagcagcagaagatcgaggagcagaagaagtggctggaccaggagatggagaaggtgctgcagcagagaagagccctggaggagctgggcgaggagctgcacaagagagaggccatcctggccaagaaggaggccctgatgcaggagaagaccggcctggagagcaagagactgagaagcagccaggccctgaacgaggacatcgtgagagtgagcagcagactggagcacctggagaaggagctgagcgagaagagcggccagctgagacagggcagcgcccagagccagcagcagatcagaggcgagatcgacagcctgagacaggagaaggacagcctgctgaagcagagactggagatcgacggcaagctgagacagggcagcctgctgagccccgaggaggagagaaccctgttccagctggacgaggccatcgaggccctggacgccgccatcgagtacaagaacgaggccatcacctgcagacagagagtgctgagagccagcgccagcctgctgagccagtgcgagatgaacctgatggccaagctgagctacctgagcagcagcgagaccagagccctgctgtgcaagtacttcgacaaggtggtgaccctgagagaggagcagcaccagcagcagatcgccttcagcgagctggagatgcagctggaggagcagcagagactggtgtactggctggaggtggccctggagagacagagactggagatggacagacagctgaccctgcagcagaaggagcacgagcagaacatgcagctgctgctgcagcagagcagagaccacctgggcgagggcctggccgacagcagaagacagtacgaggccagaatccaggccctggagaaggagctgggcagatacatgtggatcaaccaggagctgaagcagaagctgggcggcgtgaacgccgtgggccacagcagaggcggcgagaagagaagcctgtgcagcgagggcagacaggcccccggcaacgaggacgagctgcacctggcccccgagctgctgtggctgagccccctgaccgagggcgcccccagaaccagagaggagaccagagacctggtgcacgcccccctgcccctgacctggaagagaagcagcctgtgcggcgaggagcagggcagccccgaggagctgagacagagagaggccgccgagcccctggtgggcagagtgctgcccgtgggcgaggccggcctgccctggaacttcggccccctgagcaagcccagaagagagctgagaagagccagccccggcatgatcgacgtgagaaagaaccccctgtag

SEQ ID NO: 86306 - DNA, 2022 bp, synthetic construct
  misc_feature 1..2022: note = Description of Artificial Sequence: Synthetic coding sequence
  source 1..2022: mol_type = other DNA
atggacccccagagaagccccctgctggaggtgaagggcaacatcgagctgaagagacccctgatcaaggcccccagccagctgcccctgagcggcagcagactgaagagaagacccgaccagatggaggacggcctggagcccgagaagaagagaaccagaggcctgggcgccaccaccaagatcaccaccagccaccccagagtgcccagcctgaccaccgtgccccagacccagggccagaccaccgcccagaaggtgagcaagaagaccggccccagatgcagcaccgccatcgccaccggcctgaagaaccagaagcccgtgcccgccgtgcccgtgcagaagagcggcaccagcggcgtgccccccatggccggcggcaagaagcccagcaagagacccgcctgggacctgaagggccagctgtgcgacctgaacgccgagctgaagagatgcagagagagaacccagaccctggaccaggagaaccagcagctgcaggaccagctgagagacgcccagcagcaggtgaaggccctgggcaccgagagaaccaccctggagggccacctggccaaggtgcaggcccaggccgagcagggccagcaggagctgaagaacctgagagcctgcgtgctggagctggaggagagactgagcacccaggagggcctggtgcaggagctgcagaagaagcaggtggagctgcaggaggagagaagaggcctgatgagccagctggaggagaaggagagaagactgcagaccagcgaggccgccctgagcagcagccaggccgaggtggccagcctgagacaggagaccgtggcccaggccgccctgctgaccgagagagaggagagactgcacggcctggagatggagagaagaagactgcacaaccagctgcaggagctgaagggcaacatcagagtgttctgcagagtgagacccgtgctgcccggcgagcccacccccccccccggcctgctgctgttccccagcggccccggcggccccagcgacccccccaccagactgagcctgagcagaagcgacgagagaagaggcaccctgagcggcgcccccgccccccccaccagacacgacttcagcttcgacagagtgttcccccccggcagcggccaggacgaggtgttcgaggagatcgccatgctggtgcagagcgccctggacggctaccccgtgtgcatcttcgcctacggccagaccggcagcggcaagaccttcaccatggagggcggccccggcggcgacccccagctggagggcctgatccccagagccctgagacacctgttcagcgtggcccaggagctgagcggccagggctggacctacagcttcgtggccagctacgtggagatctacaacgagaccgtgagagacctgctggccaccggcaccagaaagggccagggcggcgagtgcgagatcagaagagccggccccggcagcgaggagctgaccgtgaccaacgccagatacgtgcccgtgagctgcgagaaggaggtggacgccctgctgcacctggccagacagaacagagccgtggccagaaccgcccagaacgagagaagcagcagaagccacagcgtgttccagctgcagatcagcggcgagcacagcagcagaggcctgcagtgcggcgcccccctgagcctggtggacctggccggcagcgagagactggaccccggcctggccctgggccccggcgagagagagagactgagagagacccaggccatcaacagcagcctgagcaccctgggcctggtgatcatggccctgagcaacaaggagagccacgtgccctacagaaacagcaagctgacctacctgctgcagaacagcctgggcggcagcgccaagatgctgatgttcgtgaacatcagccccctggaggagaacgtgagcgagagcctgaacagcctgagattcgccagcaaggtgaaccagtgcgtgatcggcaccgcccaggccaacagaaagtag

SEQ ID NO: 86307 - DNA, 612 bp, synthetic construct
  misc_feature 1..612: note = Description of Artificial Sequence: Synthetic coding sequence
  source 1..612: mol_type = other DNA
atggacccccagagaagccccctgctggaggtgaagggcaacatcgagctgaagagacccctgatcaaggcccccagccagctgcccctgagcggcagcagactgaagagaagacccgaccagatggaggacggcctggagcccgagaagaagagaaccagaggcctgggcgccaccaccaagatcaccaccagccaccccagagtgcccagcctgaccaccgtgccccagacccagggccagaccaccggccccagcagccaccccctgccctggcagtgccaccaccagcccttcctggtgaccgaccccggcggcagaagctggggccccggccagaagtggcacagactgcacctgtggtgcaccagcgcccagaaggtgagcaagaagaccggccccagatgcagcaccgccatcgccaccggcctgaagaaccagaagcccgtgcccgccgtgcccgtgcagaagagcggcaccagcggcgtgccccccatggccggcggcaagaagcccagcaagagacccgcctgggacctgaagggccagctgtgcgacctgaacgccgagctgaagagatgcagagagagaacccagaccctggaccagtag

SEQ ID NO: 86308 - DNA, 612 bp, synthetic construct
  misc_feature 1..612: note = Description of Artificial Sequence: Synthetic coding sequence
  source 1..612: mol_type = other DNA
atggacccccagagaagccccctgctggaggtgaagggcaacatcgagctgaagagacccctgatcaaggcccccagccagctgcccctgagcggcagcagactgaagagaagacccgaccagatggaggacggcctggagcccgagaagaagagaaccagaggcctgggcgccaccaccaagatcaccaccagccaccccagagtgcccagcctgaccaccgtgccccagacccagggccagaccaccggccccagcagccaccccctgccctggcagtgccaccaccagcccttcctggagaccgaccccggcggcagaagctggggccccggccagaagtggcacagactgcacctgtggtgcaccagcgcccagaaggtgagcaagaagaccggccccagatgcagcaccgccatcgccaccggcctgaagaaccagaagcccgtgcccgccgtgcccgtgcagaagagcggcaccagcggcgtgccccccatggccggcggcaagaagcccagcaagagacccgcctgggacctgaagggccagctgtgcgacctgaacgccgagctgaagagatgcagagagagaacccagaccctggaccagtag

SEQ ID NO: 86309 - DNA, 2022 bp, synthetic construct; identical to SEQ ID NO: 86306
  misc_feature 1..2022: note = Description of Artificial Sequence: Synthetic coding sequence
  source 1..2022: mol_type = other DNA

SEQ ID NO: 86310 - DNA, 2022 bp, synthetic construct; identical to SEQ ID NO: 86306
  misc_feature 1..2022: note = Description of Artificial Sequence: Synthetic coding sequence
  source 1..2022: mol_type = other DNA

SEQ ID NO: 86311 - DNA, 612 bp, synthetic construct; identical to SEQ ID NO: 86308
  misc_feature 1..612: note = Description of Artificial Sequence: Synthetic coding sequence
  source 1..612: mol_type = other DNA

SEQ ID NO: 86312 - DNA, 2502 bp, synthetic construct
  misc_feature 1..2502: note = Description of Artificial Sequence: Synthetic coding sequence
  source 1..2502: mol_type = other DNA
atggtgcccagcagaagaacctggaacctgggcgccacccccagcctgagaggcctgtggagagtgggcagagcccccgagcccgagcccggcatggccagacccgcccccgcccccgccagccccgccgccagacccttcccccacaccggccccggcagactgagaaccggcagaggcaaggacacccccgtgtgcggcgacgaggacagcagcgccagaagcgccgccagacccgccctggcccagtgcagagccctgagcgtggactgggccggccccggcagcccccacggcctgtacctgaccctgcaggtggagcacctgaaggagaagctgatcagccaggcccaggaggtgagcagactgagaagcgagctgggcggcaccgacctggagaagcacagagacctgctgatggtggagaacgagagactgagacaggagatgagaagatgcgaggccgagctgcaggagctgagaaccaagcccgccggcccctgccccggctgcgagcacagccaggagagcgcccagctgagagacaagctgagccagctgcagctggagatggccgagagcaagggcatgctgagcgagctgaacctggaggtgcagcagaagaccgacagactggccgaggtggagctgagactgaaggactgcctggccgagaaggcccaggaggaggagagactgagcagaagactgagagacagccacgagaccatcgccagcctgagagcccagagcccccccgtgaagtacgtgatcaagaccgtggaggtggagagcagcaagaccaagcaggccctgagcgagagccaggccagaaaccagcacctgcaggagcaggtggccatgcagagacaggtgctgaaggagatggagcagcagctgcagagcagccaccagctgaccgccagactgagagcccagatcgccatgtacgagagcgagctggagagagcccacggccagatgctggaggagatgcagagcctggaggaggacaagaacagagccatcgaggaggccttcgccagagcccaggtggagatgaaggccgtgcacgagaacctggccggcgtgagaaccaacctgctgaccctgcagcccgccctgagaaccctgaccaacgactacaacggcctgaagagacaggtgagaggcttccccctgctgctgcaggaggccctgagaagcgtgaaggccgagatcggccaggccatcgaggaggtgaacagcaacaaccaggagctgctgagaaagtacagaagagagctgcagctgagaaagaagtgccacaacgagctggtgagactgaagggcaacatcagagtgatcgccagagtgagacccgtgaccaaggaggacggcgagggccccgaggccaccaacgccgtgaccttcgacgccgacgacgacagcatcatccacctgctgcacaagggcaagcccgtgagcttcgagctggacaaggtgttcagcccccaggccagccagcaggacgtgttccaggaggtgcaggccctggtgaccagctgcatcgacggcttcaacgtgtgcatcttcgcctacggccagaccggcgccggcaagacctacaccatggagggcaccgccgagaaccccggcatcaaccagagagccctgcagctgctgttcagcgaggtgcaggagaaggccagcgactgggagtacaccatcaccgtgagcgccgccgagatctacaacgaggtgctgagagacctgctgggcaaggagccccaggagaagctggagatcagactgtgccccgacggcagcggccagctgtacgtgcccggcctgaccgagttccaggtgcagagcgtggacgacatcaacaaggtgttcgagttcggccacaccaacagaaccaccgagttcaccaacctgaacgagcacagcagcagaagccacgccctgctgatcgtgaccgtgagaggcgtggactgcagcaccggcctgagaaccaccggcaagctgaacctggtggacctggccggcagcgagagagtgggcaagagcggcgccgagggcagcagactgagagaggcccagcacatcaacaagagcctgagcgccctgggcgacgtgatcgccgccctgagaagcagacagggccacgtgcccttcagaaacagcaagctgacctacctgctgcaggacagcctgagcggcgacagcaagaccctgatggtggtgcaggtgagccccgtggagaagaacaccagcgagaccctgtacagcctgaagttcgccgagagagtgagaagcgtggagctgggccccggcctgagaagagccgagctgggcagctggagcagccaggagcacctggagtgggagcccgcctgccagaccccccagcccagcgccagagcccacagcgcccccagcagcggcaccagcagcagacccggcagcatcagaagaaagctgcagcccagcggcaagagcagacccctgcccgtgtag

SEQ ID NO: 86313 - DNA, 2064 bp, synthetic construct
  misc_feature 1..2064: note = Description of Artificial Sequence: Synthetic coding sequence
  source 1..2064: mol_type = other DNA
atggtggagaacgagagactgagacaggagatgagaagatgcgaggccgagctgcaggagctgagaaccaagcccgccggcccctgccccggctgcgagcacagccaggagagcgcccagctgagagacaagctgagccagctgcagctggagatggccgagagcaagggcatgctgagcgagctgaacctggaggtgcagcagaagaccgacagactggccgaggtggagctgagactgaaggactgcctggccgagaaggcccaggaggaggagagactgagcagaagactgagagacagccacgagaccatcgccagcctgagagcccagagcccccccgtgaagtacgtgatcaagaccgtggaggtggagagcagcaagaccaagcaggccctgagcgagagccaggccagaaaccagcacctgcaggagcaggtggccatgcagagacaggtgctgaaggagatggagcagcagctgcagagcagccaccagctgaccgccagactgagagcccagatcgccatgtacgagagcgagctggagagagcccacggccagatgctggaggagatgcagagcctggaggaggacaagaacagagccatcgaggaggccttcgccagagcccaggtggagatgaaggccgtgcacgagaacctggccggcgtgagaaccaacctgctgaccctgcagcccgccctgagaaccctgaccaacgactacaacggcctgaagagacaggtgagaggcttccccctgctgctgcaggaggccctgagaagcgtgaaggccgagatcggccaggccatcgaggaggtgaacagcaacaaccaggagctgctgagaaagtacagaagagagctgcagctgagaaagaagtgccacaacgagctggtgagactgaagggcaacatcagagtgatcgccagagtgagacccgtgaccaaggaggacggcgagggccccgaggccaccaacgccgtgaccttcgacgccgacgacgacagcatcatccacctgctgcacaagggcaagcccgtgagcttcgagctggacaaggtgttcagcccccaggccagccagcaggacgtgttccaggaggtgcaggccctggtgaccagctgcatcgacggcttcaacgtgtgcatcttcgcctacggccagaccggcgccggcaagacctacaccatggagggcaccgccgagaaccccggcatcaaccagagagccctgcagctgctgttcagcgaggtgcaggagaaggccagcgactgggagtacaccatcaccgtgagcgccgccgagatctacaacgaggtgctgagagacctgctgggcaaggagccccaggagaagctggagatcagactgtgccccgacggcagcggccagctgtacgtgcccggcctgaccgagttccaggtgcagagcgtggacgacatcaacaaggtgttcgagttcggccacaccaacagaaccaccgagttcaccaacctgaacgagcacagcagcagaagccacgccctgctgatcgtgaccgtgagaggcgtggactgcagcaccggcctgagaaccaccggcaagctgaacctggtggacctggccggcagcgagagagtgggcaagagcggcgccgagggcagcagactgagagaggcccagcacatcaacaagagcctgagcgccctgggcgacgtgatcgccgccctgagaagcagacagggccacgtgcccttcagaaacagcaagctgacctacctgctgcaggacagcctgagcggcgacagcaagaccctgatggtggtgcaggtgagccccgtggagaagaacaccagcgagaccctgtacagcctgaagttcgccgagagagtgagaagcgtggagctgggccccggcctgagaagagccgagctgggcagctggagcagccaggagcacctggagtgggagcccgcctgccagaccccccagcccagcgccagagcccacagcgcccccagcagcggcaccagcagcagacccggcagcatcagaagaaagctgcagcccagcgcctag

SEQ ID NO: 86314 - DNA, 2481 bp, synthetic construct
  misc_feature 1..2481: note = Description of Artificial Sequence: Synthetic coding sequence
  source 1..2481: mol_type = other DNA
atggtgcccagcagaagaacctggaacctgggcgccacccccagcctgagaggcctgtggagagtgggcagagcccccgagcccgagcccggcatggccagacccgcccccgcccccgccagccccgccgccagacccttcccccacaccggccccggcagactgagaaccggcagaggcaaggacacccccgtgtgcggcgacgaggacagcagcgccagaagcgccgccagacccgccctggcccagtgcagagccctgagcgtggactgggccggccccggcagcccccacggcctgtacctgaccctgcaggtggagcacctgaaggagaagctgatcagccaggcccaggaggtgagcagactgagaagcgagctgggcggcaccgacctggagaagcacagagacctgctgatggtggagaacgagagactgagacaggagatgagaagatgcgaggccgagctgcaggagctgagaaccaagcccgccggcccctgccccggctgcgagcacagccaggagagcgcccagctgagagacaagctgagccagctgcagctggagatggccgagagcaagggcatgctgagcgagctgaacctggaggtgcagcagaagaccgacagactggccgaggtggagctgagactgaaggactgcctggccgagaaggcccaggaggaggagagactgagcagaagactgagagacagccacgagaccatcgccagcctgagagcccagagcccccccgtgaagtacgtgatcaagaccgtggaggtggagagcagcaagaccaagcaggccctgagcgagagccaggccagaaaccagcacctgcaggagcaggtggccatgcagagacaggtgctgaaggagatggagcagcagctgcagagcagccaccagctgaccgccagactgagagcccagatcgccatgtacgagagcgagctggagagagcccacggccagatgctggaggagatgcagagcctggaggaggacaagaacagagccatcgaggaggccttcgccagagcccaggtggagatgaaggccgtgcacgagaacctggccggcgtgagaaccaacctgctgaccctgcagcccgccctgagaaccctgaccaacgactacaacggcctgaagagacaggtgagaggcttccccctgctgctgcaggaggccctgagaagcgtgaaggccgagatcggccaggccatcgaggaggtgaacagcaacaaccaggagctgctgagaaagtacagaagagagctgcagctgagaaagaagtgccacaacgagctggtgagactgaagggcaacatcagagtgatcgccagagtgagacccgtgaccaaggaggacggcgagggccccgaggccaccaacgccgtgaccttcgacgccgacgacgacagcatcatccacctgctgcacaagggcaagcccgtgagcttcgagctggacaaggtgttcagcccccaggccagccagcaggacgtgttccaggaggtgcaggccctggtgaccagctgcatcgacggcttcaacgtgtgcatcttcgcctacggccagaccggcgccggcaagacctacaccatggagggcaccgccgagaaccccggcatcaaccagagagccctgcagctgctgttcagcgaggtgcaggagaaggccagcgactgggagtacaccatcaccgtgagcgccgccgagatctacaacgaggtgctgagagacctgctgggcaaggagccccaggagaagctggagatcagactgtgccccgacggcagcggccagctgtacgtgcccggcctgaccgagttccaggtgcagagcgtggacgacatcaacaaggtgttcgagttcggccacaccaacagaaccaccgagttcaccaacctgaacgagcacagcagcagaagccacgccctgctgatcgtgaccgtgagaggcgtggactgcagcaccggcctgagaaccaccggcaagctgaacctggtggacctggccggcagcgagagagtgggcaagagcggcgccgagggcagcagactgagagaggcccagcacatcaacaagagcctgagcgccctgggcgacgtgatcgccgccctgagaagcagacagggccacgtgcccttcagaaacagcaagctgacctacctgctgcaggacagcctgagcggcgacagcaagaccctgatggtggtgcaggtgagccccgtggagaagaacaccagcgagaccctgtacagcctgaagttcgccgagagagtgagaagcgtggagctgggccccggcctgagaagagccgagctgggcagctggagcagccaggagcacctggagtgggagcccgcctgccagaccccccagcccagcgccagagcccacagcgcccccagcagcggcaccagcagcagacccggcagcatcagaagaaagctgcagcccagcgcctag

SEQ ID NO: 86315 - DNA, 2307 bp, synthetic construct
  misc_feature 1..2307: note = Description of Artificial Sequence: Synthetic coding sequence
  source 1..2307: mol_type = other DNA
atggtgctgagaatggtggaggccatgagccagctgcaggacgagaagacccagctgcaggaggagctggtggtgctgcaggagagactggccctgagagacagcgaccagcaggccaccagcacccagctgcagaaccaggtggagcacctgaaggagaagctgatcagccaggcccaggaggtgagcagactgagaagcgagctgggcggcaccgacctggagaagcacagagacctgctgatggtggagaacgagagactgagacaggagatgagaagatgcgaggccgagctgcaggagctgagaaccaagcccgccggcccctgccccggctgcgagcacagccaggagagcgcccagctgagagacaagctgagccagctgcagctggagatggccgagagcaagggcatgctgagcgagctgaacctggaggtgcagcagaagaccgacagactggccgaggtggagctgagactgaaggactgcctggccgagaaggcccaggaggaggagagactgagcagaagactgagagacagccacgagaccatcgccagcctgagagcccagagcccccccgtgaagtacgtgatcaagaccgtggaggtggagagcagcaagaccaagcaggccctgagcgagagccaggccagaaaccagcacctgcaggagcaggtggccatgcagagacaggtgctgaaggagatggagcagcagctgcagagcagccaccagctgaccgccagactgagagcccagatcgccatgtacgagagcgagctggagagagcccacggccagatgctggaggagatgcagagcctggaggaggacaagaacagagccatcgaggaggccttcgccagagcccaggtggagatgaaggccgtgcacgagaacctggccggcgtgagaaccaacctgctgaccctgcagcccgccctgagaaccctgaccaacgactacaacggcctgaagagacaggtgagaggcttccccctgctgctgcaggaggccctgagaagcgtgaaggccgagatcggccaggccatcgaggaggtgaacagcaacaaccaggagctgctgagaaagtacagaagagagctgcagctgagaaagaagtgccacaacgagctggtgagactgaagggcaacatcagagtgatcgccagagtgagacccgtgaccaaggaggacggcgagggccccgaggccaccaacgccgtgaccttcgacgccgacgacgacagcatcatccacctgctgcacaagggcaagcccgtgagcttcgagctggacaaggtgttcagcccccaggccagccagcaggacgtgttccaggaggtgcaggccctggtgaccagctgcatcgacggcttcaacgtgtgcatcttcgcctacggccagaccggcgccggcaagacctacaccatggagggcaccgccgagaaccccggcatcaaccagagagccctgcagctgctgttcagcgaggtgcaggagaaggccagcgactgggagtacaccatcaccgtgagcgccgccgagatctacaacgaggtgctgagagacctgctgggcaaggagccccaggagaagctggagatcagactgtgccccgacggcagcggccagctgtacgtgcccggcctgaccgagttccaggtgcagagcgtggacgacatcaacaaggtgttcgagttcggccacaccaacagaaccaccgagttcaccaacctgaacgagcacagcagcagaagccacgccctgctgatcgtgaccgtgagaggcgtggactgcagcaccggcctgagaaccaccggcaagctgaacctggtggacctggccggcagcgagagagtgggcaagagcggcgccgagggcagcagactgagagaggcccagcacatcaacaagagcctgagcgccctgggcgacgtgatcgccgccctgagaagcagacagggccacgtgcccttcagaaacagcaagctgacctacctgctgcaggacagcctgagcggcgacagcaagaccctgatggtggtgcaggtgagccccgtggagaagaacaccagcgagaccctgtacagcctgaagttcgccgagagagtgagaagcgtggagctgggccccggcctgagaagagccgagctgggcagctggagcagccaggagcacctggagtgggagcccgcctgccagaccccccagcccagcgccagagcccacagcgcccccagcagcggcaccagcagcagacccggcagcatcagaagaaagctgcagcccagcgcctag

SEQ ID NO: 86316 - DNA, 2175 bp, synthetic construct
  misc_feature 1..2175: note = Description of Artificial Sequence: Synthetic coding sequence
  source 1..2175: mol_type = other DNA
atgatcaaggtggagcacctgaaggagaagctgatcagccaggcccaggaggtgagcagactgagaagcgagctgggcggcaccgacctggagaagcacagagacctgctgatggtggagaacgagagactgagacaggagatgagaagatgcgaggccgagctgcaggagctgagaaccaagcccgccggcccctgccccggctgcgagcacagccaggagagcgcccagctgagagacaagctgagccagctgcagctggagatggccgagagcaagggcatgctgagcgagctgaacctggaggtgcagcagaagaccgacagactggccgaggtggagctgagactgaaggactgcctggccgagaaggcccaggaggaggagagactgagcagaagactgagagacagccacgagaccatcgccagcctgagagcccagagcccccccgtgaagtacgtgatcaagaccgtggaggtggagagcagcaagaccaagcaggccctgagcgagagccaggccagaaaccagcacctgcaggagcaggtggccatgcagagacaggtgctgaaggagatggagcagcagctgcagagcagccaccagctgaccgccagactgagagcccagatcgccatgtacgagagcgagctggagagagcccacggccagatgctggaggagatgcagagcctggaggaggacaagaacagagccatcgaggaggccttcgccagagcccaggtggagatgaaggccgtgcacgagaacctggccggcgtgagaaccaacctgctgaccctgcagcccgccctgagaaccctgaccaacgactacaacggcctgaagagacaggtgagaggcttccccctgctgctgcaggaggccctgagaagcgtgaaggccgagatcggccaggccatcgaggaggtgaacagcaacaaccaggagctgctgagaaagtacagaagagagctgcagctgagaaagaagtgccacaacgagctggtgagactgaagggcaacatcagagtgatcgccagagtgagacccgtgaccaaggaggacggcgagggccccgaggccaccaacgccgtgaccttcgacgccgacgacgacagcatcatccacctgctgcacaagggcaagcccgtgagcttcgagctggacaaggtgttcagcccccaggccagccagcaggacgtgttccaggaggtgcaggccctggtgaccagctgcatcgacggcttcaacgtgtgcatcttcgcctacggccagaccggcgccggcaagacctacaccatggagggcaccgccgagaaccccggcatcaaccagagagccctgcagctgctgttcagcgaggtgcaggagaaggccagcgactgggagtacaccatcaccgtgagcgccgccgagatctacaacgaggtgctgagagacctgctgggcaaggagccccaggagaagctggagatcagactgtgccccgacggcagcggccagctgtacgtgcccggcctgaccgagttccaggtgcagagcgtggacgacatcaacaaggtgttcgagttcggccacaccaacagaaccaccgagttcaccaacctgaacgagcacagcagcagaagccacgccctgctgatcgtgaccgtgagaggcgtggactgcagcaccggcctgagaaccaccggcaagctgaacctggtggacctggccggcagcgagagagtgggcaagagcggcgccgagggcagcagactgagagaggcccagcacatcaacaagagcctgagcgccctgggcgacgtgatcgccgccctgagaagcagacagggccacgtgcccttcagaaacagcaagctgacctacctgctgcaggacagcctgagcggcgacagcaagaccctgatggtggtgcaggtgagccccgtggagaagaacaccagcgagaccctgtacagcctgaagttcgccgagagagtgagaagcgtggagctgggccccggcctgagaagagccgagctgggcagctggagcagccaggagcacctggagtgggagcccgcctgccagaccccccagcccagcgccagagcccacagcgcccccagcagcggcaccagcagcagacccggcagcatcagaagaaagctgcagcccagcgcctag

SEQ ID NO: 86317 - DNA, 2547 bp, synthetic construct
  misc_feature 1..2547: note = Description of Artificial Sequence: Synthetic coding sequence
  source 1..2547: mol_type = other DNA
atgtgcgccagcgcctgcaaggacaccgccgcctggtgccccgaggaggccgccgagccccaggccatggtgcccagcagaagaacctggaacctgggcgccacccccagcctgagaggcctgtggagagtgggcagagcccccgagcccgagcccggcatggccagacccgcccccgcccccgccagccccgccgccagacccttcccccacaccggccccggcagactgagaaccggcagaggcaaggacacccccgtgtgcggcgacgaggacagcagcgccagaagcgccgccagacccgccctggcccagtgcagagccctgagcgtggactgggccggccccggcagcccccacggcctgtacctgaccctgcaggtggagcacctgaaggagaagctgatcagccaggcccaggaggtgagcagactgagaagcgagctgggcggcaccgacctggagaagcacagagacctgctgatggtggagaacgagagactgagacaggagatgagaagatgcgaggccgagctgcaggagctgagaaccaagcccgccggcccctgccccggctgcgagcacagccaggagagcgcccagctgagagacaagctgagccagctgcagctggagatggccgagagcaagggcatgctgagcgagctgaacctggaggtgcagcagaagaccgacagactggccgaggtggagctgagactgaaggactgcctggccgagaaggcccaggaggaggagagactgagcagaagactgagagacagccacgagaccatcgccagcctgagagcccagagcccccccgtgaagtacgtgatcaagaccgtggaggtggagagcagcaagaccaagcaggccctgagcgagagccaggccagaaaccagcacctgcaggagcaggtggccatgcagagacaggtgctgaaggagatggagcagcagctgcagagcagccaccagctgaccgccagactgagagcccagatcgccatgtacgagagcgagctggagagagcccacggccagatgctggaggagatgcagagcctggaggaggacaagaacagagccatcgaggaggccttcgccagagcccaggtggagatgaaggccgtgcacgagaacctggccggcgtgagaaccaacctgctgaccctgcagcccgccctgagaaccctgaccaacgactacaacggcctgaagagacaggtgagaggcttccccctgctgctgcaggaggccctgagaagcgtgaaggccgagatcggccaggccatcgaggaggtgaacagcaacaaccaggagctgctgagaaagtacagaagagagctgcagctgagaaagaagtgccacaacgagctggtgagactgaagggcaacatcagagtgatcgccagagtgagacccgtgaccaaggaggacggcgagggccccgaggccaccaacgccgtgaccttcgacgccgacgacgacagcatcatccacctgctgcacaagggcaagcccgtgagcttcgagctggacaaggtgttcagcccccaggccagccagcaggacgtgttccaggaggtgcaggccctggtgaccagctgcatcgacggcttcaacgtgtgcatcttcgcctacggccagaccggcgccggcaagacctacaccatggagggcaccgccgagaaccccggcatcaaccagagagccctgcagctgctgttcagcgaggtgcaggagaaggccagcgactgggagtacaccatcaccgtgagcgccgccgagatctacaacgaggtgctgagagacctgctgggcaaggagccccaggagaagctggagatcagactgtgccccgacggcagcggccagctgtacgtgcccggcctgaccgagttccaggtgcagagcgtggacgacatcaacaaggtgttcgagttcggccacaccaacagaaccaccgagttcaccaacctgaacgagcacagcagcagaagccacgccctgctgatcgtgaccgtgagaggcgtggactgcagcaccggcctgagaaccaccggcaagctgaacctggtggacctggccggcagcgagagagtgggcaagagcggcgccgagggcagcagactgagagaggcccagcacatcaacaagagcctgagcgccctgggcgacgtgatcgccgccctgagaagcagacagggccacgtgcccttcagaaacagcaagctgacctacctgctgcaggacagcctgagcggcgacagcaagaccctgatggtggtgcaggtgagccccgtggagaagaacaccagcgagaccctgtacagcctgaagttcgccgagagagtgagaagcgtggagctgggccccggcctgagaagagccgagctgggcagctggagcagccaggagcacctggagtgggagcccgcctgccagaccccccagcccagcgccagagcccacagcgcccccagcagcggcaccagcagcagacccggcagcatcagaagaaagctgcagcccagcgcctag

SEQ ID NO: 86318 - DNA, 2055 bp, synthetic construct
  misc_feature 1..2055: note = Description of Artificial Sequence: Synthetic coding sequence
  source 1..2055: mol_type = other DNA
atggtggagaacgagagactgagacaggagatgagaagatgcgaggccgagctgcaggagctgagaaccaagcccgccggcccctgccccggctgcgagcacagccaggagagcgcccagctgagagacaagctgagccagctgcagctggagatggccgagagcaagggcatgctgagcgagctgaacctggaggtgcagcagaagaccgacagactggccgaggtggagctgagactgaaggactgcctggccgagaaggcccaggaggaggagagactgagcagaagactgagagacagccacgagaccatcgccagcctgagagcccagagcccccccgtgaagtacgtgatcaagaccgtggaggtggagagcagcaagaccaagcaggccctgagcgagagccaggccagaaaccagcacctgcaggagcaggtggccatgcagagacaggtgctgaaggagatggagcagcagctgcagagcagccaccagctgaccgccagactgagagcccagatcgccatgtacgagagcgagctggagagagcccacggccagatgctggaggagatgcagagcctggaggaggacaagaacagagccatcgaggaggccttcgccagagcccaggtggagatgaaggccgtgcacgagaacctggccggcgtgagaaccaacctgctgaccctgcagcccgccctgagaaccctgaccaacgactacaacggcctgaagagacaggtgagaggcttccccctgctgctgcaggaggccctgagaagcgtgaaggccgagatcggccaggccatcgaggaggtgaacagcaacaaccaggagctgctgagaaagtacagaagagagctgcagctgagaaagaagtgccacaacgagctggtgagactgaagggcaacatcagagtgatcgccagagtgagacccgtgaccaaggaggacggcgagggccccgaggccaccaacgccgtgaccttcgacgccgacgacgacagcatcatccacctgctgcacaagggcaagcccgtgagcttcgagctggacaaggtgttcagcccccaggccagccagcaggacgaggtgcaggccctggtgaccagctgcatcgacggcttcaacgtgtgcatcttcgcctacggccagaccggcgccggcaagacctacaccatggagggcaccgccgagaaccccggcatcaaccagagagccctgcagctgctgttcagcgaggtgcaggagaaggccagcgactgggagtacaccatcaccgtgagcgccgccgagatctacaacgaggtgctgagagacctgctgggcaaggagccccaggagaagctggagatcagactgtgccccgacggcagcggccagctgtacgtgcccggcctgaccgagttccaggtgcagagcgtggacgacatcaacaaggtgttcgagttcggccacaccaacagaaccaccgagttcaccaacctgaacgagcacagcagcagaagccacgccctgctgatcgtgaccgtgagaggcgtggactgcagcaccggcctgagaaccaccggcaagctgaacctggtggacctggccggcagcgagagagtgggcaagagcggcgccgagggcagcagactgagagaggcccagcacatcaacaagagcctgagcgccctgggcgacgtgatcgccgccctgagaagcagacagggccacgtgcccttcagaaacagcaagctgacctacctgctgcaggacagcctgagcggcgacagcaagaccctgatggtggtgcaggtgagccccgtggagaagaacaccagcgagaccctgtacagcctgaagttcgccgagagagtgagaagcgtggagctgggccccggcctgagaagagccgagctgggcagctggagcagccaggagcacctggagtgggagcccgcctgccagaccccccagcccagcgccagagcccacagcgcccccagcagcggcaccagcagcagacccggcagcatcagaagaaagctgcagcccagcgcctag

SEQ ID NO: 86319 - DNA, 1914 bp, synthetic construct
  misc_feature 1..1914: note = Description of Artificial Sequence: Synthetic coding sequence
  source 1..1914: mol_type = other DNA
atgtacgacaacatgagcaccatggtgtacatcaaggaggacaagctggagaagctgacccaggacgagatcatcagcaagaccaagcaggtgatccagggcctggaggccctgaagaacgagcacaacagcatcctgcagagcctgctggagaccctgaagtgcctgaagaaggacgacgagagcaacctggtggaggagaagagcaacatgatcagaaagagcctggagatgctggagctgggcctgagcgaggcccaggtgatgatggccctgagcaaccacctgaacgccgtggagagcgagaagcagaagctgagagcccaggtgagaagactgtgccaggagaaccagtggctgagagacgagctggccaacacccagcagaagctgcagaagagcgagcagagcgtggcccagctggaggaggagaagaagcacctggagttcatgaaccagctgaagaagtacgacgacgacatcagccccagcgaggacaaggacaccgacagcaccaaggagcccctggacgacctgttccccaacgacgaggacgaccccggccagggcatccagcagcagcacagcagcgccgccgccgccgcccagcagggcggctacgagatccccgccagactgagaaccctgcacaacctggtgatccagtacgccagccagggcagatacgaggtggccgtgcccctgtgcaagcaggccctggaggacctggagaagaccagcggccacgaccaccccgacgtggccaccatgctgaacatcctggccctggtgtacagagaccagaacaagtacaaggacgccgccaacctgctgaacgacgccctggccatcagagagaagaccctgggcaaggaccaccccgccgtggccgccaccctgaacaacctggccgtgctgtacggcaagagaggcaagtacaaggaggccgagcccctgtgcaagagagccctggagatcagagagaaggtgctgggcaaggaccaccccgacgtggccaagcagctgaacaacctggccctgctgtgccagaaccagggcaagtacgaggaggtggagtactactaccagagagccctggagatctaccagaccaagctgggccccgacgaccccaacgtggccaagaccaagaacaacctggccagctgctacctgaagcagggcaagttcaagcaggccgagaccctgtacaaggagatcctgaccagagcccacgagagagagttcggcagcgtggacgacgagaacaagcccatctggatgcacgccgaggagagagaggagtgcaagggcaagcagaaggacggcaccagcttcggcgagtacggcggctggtacaaggcctgcaaggtggacagccccaccgtgaccaccaccctgaagaacctgggcgccctgtacagaagacagggcaagttcgaggccgccgagaccctggaggaggccgccatgagaagcagaaagcagggcctggacaacgtgcacaagcagagagtggccgaggtgctgaacgaccccgagaacatggagaagagaagaagcagagagagcctgaacgtggacgtggtgaagtacgagagcggccccgacggcggcgaggaggtgagcatgagcgtggagtggaacggcgacggcaccggcagcctgaagagaagcggcagcttcagcaagctgagagccagcatcagaagaagcagcgagaagctggtgagaaagctgaagggcggcagcagcagagagagcgagcccaagaaccccggcatgaagagagccagcagcctgaacgtgctgaacgtgggcggcaaggccgccgaggacagattccaggagagaaacaactgcctggccgacagcagagccctgagcgccagccacaccgacctggcccactag

SEQ ID NO: 86320 - DNA, 1920 bp, synthetic construct
  misc_feature 1..1920: note = Description of Artificial Sequence: Synthetic coding sequence
  source 1..1920: mol_type = other DNA
atgtacgacaacatgagcaccatggtgtacatcaaggaggacaagctggagaagctgacccaggacgagatcatcagcaagaccaagcaggtgatccagggcctggaggccctgaagaacgagcacaacagcatcctgcagagcctgctggagaccctgaagtgcctgaagaaggacgacgagagcaacctggtggaggagaagagcaacatgatcagaaagagcctggagatgctggagctgggcctgagcgaggcccaggtgatgatggccctgagcaaccacctgaacgccgtggagagcgagaagcagaagctgagagcccaggtgagaagactgtgccaggagaaccagtggctgagagacgagctggccaacacccagcagaagctgcagaagagcgagcagagcgtggcccagctggaggaggagaagaagcacctggagttcatgaaccagctgaagaagtacgacgacgacatcagccccagcgaggacaaggacaccgacagcaccaaggagcccctggacgacctgttccccaacgacgaggacgaccccggccagggcatccagcagcagcacagcagcgccgccgccgccgcccagcagggcggctacgagatccccgccagactgagaaccctgcacaacctggtgatccagtacgccagccagggcagatacgaggtggccgtgcccctgtgcaagcaggccctggaggacctggagaagaccagcggccacgaccaccccgacgtggccaccatgctgaacatcctggccctggtgtacagagaccagaacaagtacaaggacgccgccaacctgctgaacgacgccctggccatcagagagaagaccctgggcaaggaccaccccgccgtggccgccaccctgaacaacctggccgtgctgtacggcaagagaggcaagtacaaggaggccgagcccctgtgcaagagagccctggagatcagagagaaggtgctgggcaaggaccaccccgacgtggccaagcagctgaacaacctggccctgctgtgccagaaccagggcaagtacgaggaggtggagtactactaccagagagccctggagatctaccagaccaagctgggccccgacgaccccaacgtggccaagaccaagaacaacctggccagctgctacctgaagcagggcaagttcaagcaggccgagaccctgtacaaggagatcctgaccagagcccacgagagagagttcggcagcgtggacgacgagaacaagcccatctggatgcacgccgaggagagagaggagtgcaagggcaagcagaaggacggcaccagcttcggcgagtacggcggctggtacaaggcctgcaaggtggacagccccaccgtgaccaccaccctgaagaacctgggcgccctgtacagaagacagggcaagttcgaggccgccgagaccctggaggaggccgccatgagaagcagaaagcagggcctggacaacgtgcacaagcagagagtggccgaggtgctgaacgaccccgagaacatggagaagagaagaagcagagagagcctgaacgtggacgtggtgaagtacgagagcggccccgacggcggcgaggaggtgagcatgagcgtggagtggaacggcgacggcaccggcagcctgaagagaagcggcagcttcagcaagctgagagccagcatcagaagaagcagcgagaagctggtgagaaagctgaagggcggcagcagcagagagagcgagcccaagaaccccggcatgaagagagccagcagcctgaacgtgctgaacgtgggcggcaaggccgccgaggacagattccagggcgtgagcggcagagccagcttctgcggcaagagacagcagcagcagtggcccggcagaagacacagatag

SEQ ID NO: 86321 - DNA, 1887 bp, synthetic construct
  misc_feature 1..1887: note = Description of Artificial Sequence: Synthetic coding sequence
  source 1..1887: mol_type = other DNA
atgtacgacaacatgagcaccatggtgtacatcaaggaggacaagctggagaagctgacccaggacgagatcatcagcaagaccaagcaggtgatccagggcctggaggccctgaagaacgagcacaacagcatcctgcagagcctgctggagaccctgaagtgcctgaagaaggacgacgagagcaacctggtggaggagaagagcaacatgatcagaaagagcctggagatgctggagctgggcctgagcgaggcccaggtgatgatggccctgagcaaccacctgaacgccgtggagagcgagaagcagaagctgagagcccaggtgagaagactgtgccaggagaaccagtggctgagagacgagctggccaacacccagcagaagctgcagaagagcgagcagagcgtggcccagctggaggaggagaagaagcacctggagttcatgaaccagctgaagaagtacgacgacgacatcagccccagcgaggacaaggacaccgacagcaccaaggagcccctggacgacctgttccccaacgacgaggacgaccccggccagggcatccagcagcagcacagcagcgccgccgccgccgcccagcagggcggctacgagatccccgccagactgagaaccctgcacaacctggtgatccagtacgccagccagggcagatacgaggtggccgtgcccctgtgcaagcaggccctggaggacctggagaagaccagcggccacgaccaccccgacgtggccaccatgctgaacatcctggccctggtgtacagagaccagaacaagtacaaggacgccgccaacctgctgaacgacgccctggccatcagagagaagaccctgggcaaggaccaccccgccgtggccgccaccctgaacaacctggccgtgctgtacggcaagagaggcaagtacaaggaggccgagcccctgtgcaagagagccctggagatcagagagaaggtgctgggcaaggaccaccccgacgtggccaagcagctgaacaacctggccctgctgtgccagaaccagggcaagtacgaggaggtggagtactactaccagagagccctggagatctaccagaccaagctgggccccgacgaccccaacgtggccaagaccaagaacaacctggccagctgctacctgaagcagggcaagttcaagcaggccgagaccctgtacaaggagatcctgaccagagcccacgagagagagttcggcagcgtggacgacgagaacaagcccatctggatgcacgccgaggagagagaggagtgcaagggcaagcagaaggacggcaccagcttcggcgagtacggcggctggtacaaggcctgcaaggtggacagccccaccgtgaccaccaccctgaagaacctgggcgccctgtacagaagacagggcaagttcgaggccgccgagaccctggaggaggccgccatgagaagcagaaagcagggcctggacaacgtgcacaagcagagagtggccgaggtgctgaacgaccccgagaacatggagaagagaagaagcagagagagcctgaacgtggacgtggtgaagtacgagagcggccccgacggcggcgaggaggacggcaccggcagcctgaagagaagcggcagcttcagcaagctgagagccagcatcagaagaagcagcgagaagctggtgagaaagctgaagggcggcagcagcagagagagcgagcccaagaaccccggcatgaagagagccagcagcctgaacgtgctgaacgtgggcggcaaggccgccgaggacagattccaggagagaaacaactgcctggccgacagcagagccctgagcgccagccacaccgacctggcccactag

SEQ ID NO: 86322 - DNA, 1722 bp, synthetic construct
  misc_feature 1..1722: note = Description of Artificial Sequence: Synthetic coding sequence
  source 1..1722: mol_type = other DNA
atgtacgacaacatgagcaccatggtgtacatcaaggaggacaagctggagaagctgacccaggacgagatcatcagcaagaccaagcaggtgatccagggcctggaggccctgaagaacgagcacaacagcatcctgcagagcctgctggagaccctgaagtgcctgaagaaggacgacgagagcaacctggtggaggagaagagcaacatgatcagaaagagcctggagatgctggagctgggcctgagcgaggcccaggtgatgatggccctgagcaaccacctgaacgccgtggagagcgagaagcagaagctgagagcccaggtgagaagactgtgccaggagaaccagtggctgagagacgagctggccaacacccagcagaagctgcagaagagcgagcagagcgtggcccagctggaggaggagaagaagcacctggagttcatgaaccagctgaagaagtacgacgacgacatcagccccagcgaggacaaggacaccgacagcaccaaggagcccctggacgacctgttccccaacgacgaggacgaccccggccagggcatccagcagcagcacagcagcgccgccgccgccgcccagcagggcggctacgagatccccgccagactgagaaccctgcacaacctggtgatccagtacgccagccagggcagatacgaggtggccgtgcccctgtgcaagcaggccctggaggacctggagaagaccagcggccacgaccaccccgacgtggccaccatgctgaacatcctggccctggtgtacagagaccagaacaagtacaaggacgccgccaacctgctgaacgacgccctggccatcagagagaagaccctgggcaaggaccaccccgccgtggccgccaccctgaacaacctggccgtgctgtacggcaagagaggcaagtacaaggaggccgagcccctgtgcaagagagccctggagatcagagagaaggtgctgggcaaggaccaccccgacgtggccaagcagctgaacaacctggccctgctgtgccagaaccagggcaagtacgaggaggtggagtactactaccagagagccctggagatctaccagaccaagctgggccccgacgaccccaacgtggccaagaccaagaacaacctggccagctgctacctgaagcagggcaagttcaagcaggccgagaccctgtacaaggagatcctgaccagagcccacgagagagagttcggcagcgtggacgacgagaacaagcccatctggatgcacgccgaggagagagaggagtgcaagggcaagcagaaggacggcaccagcttcggcgagtacggcggctggtacaaggcctgcaaggtggacagccccaccgtgaccaccaccctgaagaacctgggcgccctgtacagaagacagggcaagttcgaggccgccgagaccctggaggaggccgccatgagaagcagaaagcagggcctggacaacgtgcacaagcagagagtggccgaggtgctgaacgaccccgagaacatggagaagagaagaagcagagagagcctgaacgtggacgtggtgaagtacgagagcggccccgacggcggcgaggaggtgagcatgagcgtggagtggaacggcggcgtgagcggcagagccagcttctgcggcaagagacagcagcagcagtggcccggcagaagacacagatag

SEQ ID NO: 86323 - DNA, 1731 bp, synthetic construct
  misc_feature 1..1731: note = Description of Artificial Sequence: Synthetic coding sequence
  source 1..1731: mol_type = other DNA
atgtacgacaacatgagcaccatggtgtacatcaaggaggacaagctggagaagctgacccaggacgagatcatcagcaagaccaagcaggtgatccagggcctggaggccctgaagaacgagcacaacagcatcctgcagagcctgctggagaccctgaagtgcctgaagaaggacgacgagagcaacctggtggaggagaagagcaacatgatcagaaagagcctggagatgctggagctgggcctgagcgaggcccaggtgatgatggccctgagcaaccacctgaacgccgtggagagcgagaagcagaagctgagagcccaggtgagaagactgtgccaggagaaccagtggctgagagacgagctggccaacacccagcagaagctgcagaagagcgagcagagcgtggcccagctggaggaggagaagaagcacctggagttcatgaaccagctgaagaagtacgacgacgacatcagccccagcgaggacaaggacaccgacagcaccaaggagcccctggacgacctgttccccaacgacgaggacgaccccggccagggcatccagcagcagcacagcagcgccgccgccgccgcccagcagggcggctacgagatccccgccagactgagaaccctgcacaacctggtgatccagtacgccagccagggcagatacgaggtggccgtgcccctgtgcaagcaggccctggaggacctggagaagaccagcggccacgaccaccccgacgtggccaccatgctgaacatcctggccctggtgtacagagaccagaacaagtacaaggacgccgccaacctgctgaacgacgccctggccatcagagagaagaccctgggcaaggaccaccccgccgtggccgccaccctgaacaacctggccgtgctgtacggcaagagaggcaagtacaaggaggccgagcccctgtgcaagagagccctggagatcagagagaaggtgctgggcaaggaccaccccgacgtggccaagcagctgaacaacctggccctgctgtgccagaaccagggcaagtacgaggaggtggagtactactaccagagagccctggagatctaccagaccaagctgggccccgacgaccccaacgtggccaagaccaagaacaacctggccagctgctacctgaagcagggcaagttcaagcaggccgagaccctgtacaaggagatcctgaccagagcccacgagagagagttcggcagcgtggacgacgagaacaagcccatctggatgcacgccgaggagagagaggagtgcaagggcaagcagaaggacggcaccagcttcggcgagtacggcggctggtacaaggcctgcaaggtggacagccccaccgtgaccaccaccctgaagaacctgggcgccctgtacagaagacagggcaagttcgaggccgccgagaccctggaggaggccgccatgagaagcagaaagcagagaagcatcagcgagatccccaagaagatcctgagcgccaacggcagcaaccacttccccctgcccggcagccagggcctggacaacgtgcacaagcagagagtggccgaggtgctgaacgaccccgagaacatggagaagagaagaagcagagagagcctgaacgtggacgtggtgaagtacgagagcggccccgacggcggcgaggagatgagaaagatgaagctgggcctggtgaactag

SEQ ID NO: 86324 - DNA, 1683 bp, synthetic construct
  misc_feature 1..1683: note = Description of Artificial Sequence: Synthetic coding sequence
  source 1..1683: mol_type = other DNA
atgtacgacaacatgagcaccatggtgtacatcaaggaggacaagctggagaagctgacccaggacgagatcatcagcaagaccaagcaggtgatccagggcctggaggccctgaagaacgagcacaacagcatcctgcagagcctgctggagaccctgaagtgcctgaagaaggacgacgagagcaacctggtggaggagaagagcaacatgatcagaaagagcctggagatgctggagctgggcctgagcgaggcccaggtgatgatggccctgagcaaccacctgaacgccgtggagagcgagaagcagaagctgagagcccaggtgagaagactgtgccaggagaaccagtggctgagagacgagctggccaacacccagcagaagctgcagaagagcgagcagagcgtggcccagctggaggaggagaagaagcacctggagttcatgaaccagctgaagaagtacgacgacgacatcagccccagcgaggacaaggacaccgacagcaccaaggagcccctggacgacctgttccccaacgacgaggacgaccccggccagggcatccagcagcagcacagcagcgccgccgccgccgcccagcagggcggctacgagatccccgccagactgagaaccctgcacaacctggtgatccagtacgccagccagggcagatacgaggtggccgtgcccctgtgcaagcaggccctggaggacctggagaagaccagcggccacgaccaccccgacgtggccaccatgctgaacatcctggccctggtgtacagagaccagaacaagtacaaggacgccgccaacctgctgaacgacgccctggccatcagagagaagaccctgggcaaggaccaccccgccgtggccgccaccctgaacaacctggccgtgctgtacggcaagagaggcaagtacaaggaggccgagcccctgtgcaagagagccctggagatcagagagaaggtgctgggcaaggaccaccccgacgtggccaagcagctgaacaacctggccctgctgtgccagaaccagggcaagtacgaggaggtggagtactactaccagagagccctggagatctaccagaccaagctgggccccgacgaccccaacgtggccaagaccaagaacaacctggccagctgctacctgaagcagggcaagttcaagcaggccgagaccctgtacaaggagatcctgaccagagcccacgagagagagttcggcagcgtggacgacgagaacaagcccatctggatgcacgccgaggagagagaggagtgcaagggcaagcagaaggacggcaccagcttcggcgagtacggcggctggtacaaggcctgcaaggtggacagccccaccgtgaccaccaccctgaagaacctgggcgccctgtacagaagacagggcaagttcgaggccgccgagaccctggaggaggccgccatgagaagcagaaagcagggcctggacaacgtgcacaagcagagagtggccgaggtgctgaacgaccccgagaacatggagaagagaagaagcagagagagcctgaacgtggacgtggtgaagtacgagagcggccccgacggcggcgaggaggtgagcatgagcgtggagtggaacggcatgagaaagatgaagctgggcctggtgaactag

SEQ ID NO: 86325 - DNA, 1755 bp, synthetic construct
  misc_feature 1..1755: note = Description of Artificial Sequence: Synthetic coding sequence
  source 1..1755: mol_type = other DNA
atgtacgacaacatgagcaccatggtgtacatcaaggaggacaagctggagaagctgacccaggacgagatcatcagcaagaccaagcaggtgatccagggcctggaggccctgaagaacgagcacaacagcatcctgcagagcctgctggagaccctgaagtgcctgaagaaggacgacgagagcaacctggtggaggagaagagcaacatgatcagaaagagcctggagatgctggagctgggcctgagcgaggcccaggtgatgatggccctgagcaaccacctgaacgccgtggagagcgagaagcagaagctgagagcccaggtgagaagactgtgccaggagaaccagtggctgagagacgagctggccaacacccagcagaagctgcagaagagcgagcagagcgtggcccagctggaggaggagaagaagcacctggagttcatgaaccagctgaagaagtacgacgacgacatcagccccagcgaggacaaggacaccgacagcaccaaggagcccctggacgacctgttccccaacgacgaggacgaccccggccagggcatccagcagcagcacagcagcgccgccgccgccgcccagcagggcggctacgagatccccgccagactgagaaccctgcacaacctggtgatccagtacgccagccagggcagatacgaggtggccgtgcccctgtgcaagcaggccctggaggacctggagaagaccagcggccacgaccaccccgacgtggccaccatgctgaacatcctggccctggtgtacagagaccagaacaagtacaaggacgccgccaacctgctgaacgacgccctggccatcagagagaagaccctgggcaaggaccaccccgccgtggccgccaccctgaacaacctggccgtgctgtacggcaagagaggcaagtacaaggaggccgagcccctgtgcaagagagccctggagatcagagagaaggtgctgggcaaggaccaccccgacgtggccaagcagctgaacaacctggccctgctgtgccagaaccagggcaagtacgaggaggtggagtactactaccagagagccctggagatctaccagaccaagctgggccccgacgaccccaacgtggccaagaccaagaacaacctggccagctgctacctgaagcagggcaagttcaagcaggccgagaccctgtacaaggagatcctgaccagagcccacgagagagagttcggcagcgtggacgacgagaacaagcccatctggatgcacgccgaggagagagaggagtgcaagggcaagcagaaggacggcaccagcttcggcgagtacggcggctggtacaaggcctgcaaggtggacagccccaccgtgaccaccaccctgaagaacctgggcgccctgtacagaagacagggcaagttcgaggccgccgagaccctggaggaggccgccatgagaagcagaaagcagggcctggacaacgtgcacaagcagagagtggccgaggtgctgaacgaccccgagaacatggagaagagaagaagcagagagagcctgaacgtggacgtggtgaagtacgagagcggccccgacggcggcgaggagatgaagagagccagcagcctgaacgtgctgaacgtgggcggcaaggccgccgaggacagattccaggagagaaacaactgcctggccgacagcagagccctgagcgccagccacaccgacctggcccactag

SEQ ID NO: 86326 - DNA, 1857 bp, synthetic construct
  misc_feature 1..1857: note = Description of Artificial Sequence: Synthetic coding sequence
  source 1..1857: mol_type = other DNA
atgtacgacaacatgagcaccatggtgtacatcaaggaggacaagctggagaagctgacccaggacgagatcatcagcaagaccaagcaggtgatccagggcctggaggccctgaagaacgagcacaacagcatcctgcagagcctgctggagaccctgaagtgcctgaagaaggacgacgagagcaacctggtggaggagaagagcaacatgatcagaaagagcctggagatgctggagctgggcctgagcgaggcccaggtgatgatggccctgagcaaccacctgaacgccgtggagagcgagaagcagaagctgagagcccaggtgagaagactgtgccaggagaaccagtggctgagagacgagctggccaacacccagcagaagctgcagaagagcgagcagagcgtggcccagctggaggaggagaagaagcacctggagttcatgaaccagctgaagaagtacgacgacgacatcagccccagcgaggacaaggacaccgacagcaccaaggagcccctggacgacctgttccccaacgacgaggacgaccccggccagggcatccagcagcagcacagcagcgccgccgccgccgcccagcagggcggctacgagatccccgccagactgagaaccctgcacaacctggtgatccagtacgccagccagggcagatacgaggtggccgtgcccctgtgcaagcaggccctggaggacctggagaagaccagcggccacgaccaccccgacgtggccaccatgctgaacatcctggccctggtgtacagagaccagaacaagtacaaggacgccgccaacctgctgaacgacgccctggccatcagagagaagaccctgggcaaggaccaccccgccgtggccgccaccctgaacaacctggccgtgctgtacggcaagagaggcaagtacaaggaggccgagcccctgtgcaagagagccctggagatcagagagaaggtgctgggcaaggaccaccccgacgtggccaagcagctgaacaacctggccctgctgtgccagaaccagggcaagtacgaggaggtggagtactactaccagagagccctggagatctaccagaccaagctgggccccgacgaccccaacgtggccaagaccaagaacaacctggccagctgctacctgaagcagggcaagttcaagcaggccgagaccctgtacaaggagatcctgaccagagcccacgagagagagttcggcagcgtggacgacgagaacaagcccatctggatgcacgccgaggagagagaggagtgcaagggcaagcagaaggacggcaccagcttcggcgagtacggcggctggtacaaggcctgcaaggtggacagccccaccgtgaccaccaccctgaagaacctgggcgccctgtacagaagacagggcaagttcgaggccgccgagaccctggaggaggccgccatgagaagcagaaagcagggcctggacaacgtgcacaagcagagagtggccgaggtgctgaacgaccccgagaacatggagaagagaagaagcagagagagcctgaacgtggacgtggtgaagtacgagagcggccccgacggcggcgaggaggtgagcatgagcgtggagtggaacggcgacggcaccggcagcctgaagagaagcggcagcttcagcaagctgagagccagcatcagaagaagcagcgagaagctggtgagaaagctgaagggcggcagcagcagagagagcgagcccaagaaccccggcgccagcctggccgagcccctgttcgtggagaacgacagcagcagcagcggcctggaggacgccaccgccaactag

SEQ ID NO: 86327 - DNA, 1683 bp, synthetic construct; identical to SEQ ID NO: 86324
  misc_feature 1..1683: note = Description of Artificial Sequence: Synthetic coding sequence
  source 1..1683: mol_type = other DNA

SEQ ID NO: 86328 - DNA, 396 bp, synthetic construct
  misc_feature 1..396: note = Description of Artificial Sequence: Synthetic coding sequence
  source 1..396: mol_type = other DNA
tgagagaacaagcccatctggatgcacgccgaggagagagaggagtgcaagggcaagcagaaggacggcaccagcttcggcgagtacggcggctggtacaaggcctgcaaggtggacagccccaccgtgaccaccaccctgaagaacctgggcgccctgtacagaagacagggcaagttcgaggccgccgagaccctggaggaggccgccatgagaagcagaaagcagggcctggacaacgtgcacaagcagagagtggccgaggtgctgaacgaccccgagaacatggagaagagaagaagcagagagagcctgaacgtggacgtggtgaagtacgagagcggccccgacggcggcgaggagatgagaaagatgaagctgggcctggtgaactag

SEQ ID NO: 86329 - DNA, 1893 bp, synthetic construct
  misc_feature 1..1893: note = Description of Artificial Sequence: Synthetic coding sequence
  source 1..1893: mol_type = other DNA
atgtacgacaacatgagcaccatggtgtacatcaaggaggacaagctggagaagctgacccaggacgagatcatcagcaagaccaagcaggtgatccagggcctggaggccctgaagaacgagcacaacagcatcctgcagagcctgctggagaccctgaagtgcctgaagaaggacgacgagagcaacctggtggaggagaagagcaacatgatcagaaagagcctggagatgctggagctgggcctgagcgaggcccaggtgatgatggccctgagcaaccacctgaacgccgtggagagcgagaagcagaagctgagagcccaggtgagaagactgtgccaggagaaccagtggctgagagacgagctggccaacacccagcagaagctgcagaagagcgagcagagcgtggcccagctggaggaggagaagaagcacctggagttcatgaaccagctgaagaagtacgacgacgacatcagccccagcgaggacaaggacaccgacagcaccaaggagcccctggacgacctgttccccaacgacgaggacgaccccggccagggcatccagcagcagcacagcagcgccgccgccgccgcccagcagggcggctacgagatccccgccagactgagaaccctgcacaacctggtgatccagtacgccagccagggcagatacgaggtggccgtgcccctgtgcaagcaggccctggaggacctggagaagaccagcggccacgaccaccccgacgtggccaccatgctgaacatcctggccctggtgtacagagaccagaacaagtacaaggacgccgccaacctgctgaacgacgccctggccatcagagagaagaccctgggcaaggaccaccccgccgtggccgccaccctgaacaacctggccgtgctgtacggcaagagaggcaagtacaaggaggccgagcccctgtgcaagagagccctggagatcagagagaaggtgctgggcaaggaccaccccgacgtggccaagcagctgaacaacctggccctgctgtgccagaaccagggcaagtacgaggaggtggagtactactaccagagagccctggagatctaccagaccaagctgggccccgacgaccccaacgtggccaagaccaagaacaacctggccagctgctacctgaagcagggcaagttcaagcaggccgagaccctgtacaaggagatcctgaccagagcccacgagagagagttcggcagcgtggacgacgagaacaagcccatctggatgcacgccgaggagagagaggagtgcaagggcaagcagaaggacggcaccagcttcggcgagtacggcggctggtacaaggcctgcaaggtggacagccccaccgtgaccaccaccctgaagaacctgggcgccctgtacagaagacagggcaagttcgaggccgccgagaccctggaggaggccgccatgagaagcagaaagcagggcctggacaacgtgcacaagcagagagtggccgaggtgctgaacgaccccgagaacatggagaagagaagaagcagagagagcctgaacgtggacgtggtgaagtacgagagcggccccgacggcggcgaggaggacggcaccggcagcctgaagagaagcggcagcttcagcaagctgagagccagcatcagaagaagcagcgagaagctggtgagaaagctgaagggcggcagcagcagagagagcgagcccaagaaccccggcatgaagagagccagcagcctgaacgtgctgaacgtgggcggcaaggccgccgaggacagattccagggcgtgagcggcagagccagcttctgcggcaagagacagcagcagcagtggcccggcagaagacacagatag

SEQ ID NO: 86330 - DNA, 453 bp, synthetic construct
  misc_feature 1..453: note = Description of Artificial Sequence: Synthetic coding sequence
  source 1..453: mol_type = other DNA
atgtacgacaacatgagcaccatggtgtacatcaaggaggacaagctggagaagctgacccaggacgagatcatcagcaagaccaagcaggtgatccagggcctggaggccctgaagaacgagcacaacagcatcctgcagagcctgctggagaccctgaagtgcctgaagaaggacgacgagagcaacctggtggaggagaagagcaacatgatcagaaagagcctggagatgctggagctgggcctgagcgaggcccaggtgatgatggccctgagcaaccacctgaacgccgtggagagcgagaagcagaagctgagagcccaggtgagaagactgtgccaggagaaccagtggctgagagacgagctggccaacacccagcagaagctgcagaagagcgagcagagcgtggcccagctggaggaggagaagaagcacctggagttctag

SEQ ID NO: 86331 - DNA, 1695 bp, synthetic construct
  misc_feature 1..1695: note = Description of Artificial Sequence: Synthetic coding sequence
  source 1..1695: mol_type = other DNA
atgtacgacaacatgagcaccatggtgtacatcaaggaggacaagctggagaagctgacccaggacgagatcatcagcaagaccaagcaggtgatccagggcctggaggccctgaagaacgagcacaacagcatcctgcagagcctgctggagaccctgaagtgcctgaagaaggacgacgagagcaacctggtggaggagaagagcaacatgatcagaaagagcctggagatgctggagctgggcctgagcgaggcccaggtgatgatggccctgagcaaccacctgaacgccgtggagagcgagaagcagaagctgagagcccaggtgagaagactgtgccaggagaaccagtggctgagagacgagctggccaacacccagcagaagctgcagaagagcgagcagagcgtggcccagctggaggaggagaagaagcacctggagttcatgaaccagctgaagaagtacgacgacgacatcagccccagcgaggacaaggacaccgacagcaccaaggagcccctggacgacctgttccccaacgacgaggacgaccccggccagggcatccagcagcagcacagcagcgccgccgccgccgcccagcagggcggctacgagatccccgccagactgagaaccctgcacaacctggtgatccagtacgccagccagggcagatacgaggtggccgtgcccctgtgcaagcaggccctggaggacctggagaagaccagcggccacgaccaccccgacgtggccaccatgctgaacatcctggccctggtgtacagagaccagaacaagtacaaggacgccgccaacctgctgaacgacgccctggccatcagagagaagaccctgggcaaggaccaccccgccgtggccgccaccctgaacaacctggccgtgctgtacggcaagagaggcaagtacaaggaggccgagcccctgtgcaagagagccctggagatcagagagaaggtgctgggcaaggaccaccccgacgtggccaagcagctgaacaacctggccctgctgtgccagaaccagggcaagtacgaggaggtggagtactactaccagagagccctggagatctaccagaccaagctgggccccgacgaccccaacgtggccaagaccaagaacaacctggccagctgctacctgaagcagggcaagttcaagcaggccgagaccctgtacaaggagatcctgaccagagcccacgagagagagttcggcagcgtggacgacgagaacaagcccatctggatgcacgccgaggagagagaggagtgcaagggcaagcagaaggacggcaccagcttcggcgagtacggcggctggtacaaggcctgcaaggtggacagccccaccgtgaccaccaccctgaagaacctgggcgccctgtacagaagacagggcaagttcgaggccgccgagaccctggaggaggccgccatgagaagcagaaagcagggcctggacaacgtgcacaagcagagagtggccgaggtgctgaacgaccccgagaacatggagaagagaagaagcagagagagcctgaacgtggacgtggtgaagtacgagagcggccccgacggcggcgaggagggcgtgagcggcagagccagcttctgcggcaagagacagcagcagcagtggcccggcagaagacacagatag

SEQ ID NO: 86332 - DNA, 1869 bp, synthetic construct
  misc_feature 1..1869: note = Description of Artificial Sequence: Synthetic coding sequence
  source 1..1869: mol_type = other DNA
atggccatgatggtgttccccagagaggagaagctgagccaggacgagatcgtgctgggcaccaaggccgtgatccagggcctggagaccctgagaggcgagcacagagccctgctggcccccctggtggcccccgaggccggcgaggccgagcccggcagccaggagagatgcatcctgctgagaagaagcctggaggccatcgagctgggcctgggcgaggcccaggtgatcctggccctgagcagccacctgggcgccgtggagagcgagaagcagaagctgagagcccaggtgagaagactggtgcaggagaaccagtggctgagagaggagctggccggcacccagcagaagctgcagagaagcgagcaggccgtggcccagctggaggaggagaagcagcacctgctgttcatgagccagatcagaaagctggacgaggacgccagccccaacgaggagaagggcgacgtgcccaaggacaccctggacgacctgttccccaacgaggacgagcagagccccgcccccagccccggcggcggcgacgtgagcggccagcacggcggctacgagatccccgccagactgagaaccctgcacaacctggtgatccagtacgccagccagggcagatacgaggtggccgtgcccctgtgcaagcaggccctggaggacctggagaagaccagcggccacgaccaccccgacgtggccaccatgctgaacatcctggccctggtgtacagagaccagaacaagtacaaggaggccgcccacctgctgaacgacgccctggccatcagagagaagaccctgggcaaggaccaccccgccgtggccgccaccctgaacaacctggccgtgctgtacggcaagagaggcaagtacaaggaggccgagcccctgtgcaagagagccctggagatcagagagaaggtgctgggcaagttccaccccgacgtggccaagcagctgagcaacctggccctgctgtgccagaaccagggcaaggccgaggaggtggagtactactacagaagagccctggagatctacgccaccagactgggccccgacgaccccaacgtggccaagaccaagaacaacctggccagctgctacctgaagcagggcaagtaccaggacgccgagaccctgtacaaggagatcctgaccagagcccacgagaaggagttcggcagcgtgaacggcgacaacaagcccatctggatgcacgccgaggagagagaggagagcaaggacaagagaagagacagcgccccctacggcgagtacggcagctggtacaaggcctgcaaggtggacagccccaccgtgaacaccaccctgagaagcctgggcgccctgtacagaagacagggcaagctggaggccgcccacaccctggaggactgcgccagcagaaacagaaagcagggcctggaccccgccagccagaccaaggtggtggagctgctgaaggacggcagcggcagaagaggcgacagaagaagcagcagagacatggccggcggcgccggccccagaagcgagagcgacctggaggacgtgggccccaccgccgagtggaacggcgacggcagcggcagcctgagaagaagcggcagcttcggcaagctgagagacgccctgagaagaagcagcgagatgctggtgaagaagctgcagggcggcaccccccaggagccccccaaccccagaatgaagagagccagcagcctgaacttcctgaacaagagcgtggaggagcccacccagcccggcggcaccggcctgagcgacagcagaaccctgagcagcagcagcatggacctgagcagaagaagcagcctggtgggctag

SEQ ID NO: 86333 - DNA, 1638 bp, synthetic construct
  misc_feature 1..1638: note = Description of Artificial Sequence: Synthetic coding sequence
  source 1..1638: mol_type = other DNA
atggccatgatggtgttccccagagaggagaagctgagccaggacgagatcgtgctgggcaccaaggccgtgatccagggcctggagaccctgagaggcgagcacagagccctgctggcccccctggtggcccccgaggccggcgaggccgagcccggcagccaggagagatgcatcctgctgagaagaagcctggaggccatcgagctgggcctgggcgaggcccaggaggagaagggcgacgtgcccaaggacaccctggacgacctgttccccaacgaggacgagcagagccccgcccccagccccggcggcggcgacgtgagcggccagcacggcggctacgagatccccgccagactgagaaccctgcacaacctggtgatccagtacgccagccagggcagatacgaggtggccgtgcccctgtgcaagcaggccctggaggacctggagaagaccagcggccacgaccaccccgacgtggccaccatgctgaacatcctggccctggtgtacagagaccagaacaagtacaaggaggccgcccacctgctgaacgacgccctggccatcagagagaagaccctgggcaaggaccaccccgccgtggccgccaccctgaacaacctggccgtgctgtacggcaagagaggcaagtacaaggaggccgagcccctgtgcaagagagccctggagatcagagagaaggtgctgggcaagttccaccccgacgtggccaagcagctgagcaacctggccctgctgtgccagaaccagggcaaggccgaggaggtggagtactactacagaagagccctggagatctacgccaccagactgggccccgacgaccccaacgtggccaagaccaagaacaacctggccagctgctacctgaagcagggcaagtaccaggacgccgagaccctgtacaaggagatcctgaccagagcccacgagaaggagttcggcagcgtgaacggcgacaacaagcccatctggatgcacgccgaggagagagaggagagcaaggacaagagaagagacagcgccccctacggcgagtacggcagctggtacaaggcctgcaaggtggacagccccaccgtgaacaccaccctgagaagcctgggcgccctgtacagaagacagggcaagctggaggccgcccacaccctggaggactgcgccagcagaaacagaaagcagggcctggaccccgccagccagaccaaggtggtggagctgctgaaggacggcagcggcagaagaggcgacagaagaagcagcagagacatggccggcggcgccggccccagaagcgagagcgacctggaggacgtgggccccaccgccgagtggaacggcgacggcagcggcagcctgagaagaagcggcagcttcggcaagctgagagacgccctgagaagaagcagcgagatgctggtgaagaagctgcagggcggcaccccccaggagccccccaaccccagaatgaagagagccagcagcctgaacttcctgaacaagagcgtggaggagcccacccagcccggcggcaccggcctgagcgacagcagaaccctgagcagcagcagcatggacctgagcagaagaagcagcctggtgggctag

SEQ ID NO: 86334 - DNA, 1869 bp, synthetic construct; identical to SEQ ID NO: 86332
  misc_feature 1..1869: note = Description of Artificial Sequence: Synthetic coding sequence
  source 1..1869: mol_type = other DNA

SEQ ID NO: 86335 - DNA, 1869 bp, synthetic construct; identical to SEQ ID NO: 86332
  misc_feature 1..1869: note = Description of Artificial Sequence: Synthetic coding sequence
  source 1..1869: mol_type = other DNA

SEQ ID NO: 86336 - DNA, 1638 bp, synthetic construct; identical to SEQ ID NO: 86333
  misc_feature 1..1638: note = Description of Artificial Sequence: Synthetic coding sequence
  source 1..1638: mol_type = other DNA

SEQ ID NO: 86337 - DNA, 501 bp, synthetic construct
  misc_feature 1..501: note = Description of Artificial Sequence: Synthetic coding sequence
  source 1..501: mol_type = other DNA
atggccatgatggtgttccccagagaggagaagctgagccaggacgagatcgtgctgggcaccaaggccgtgatccagggcctggagaccctgagaggcgagcacagagccctgctggcccccctggtggcccccgaggccggcgaggccgagcccggcagccaggagagatgcatcctgctgagaagaagcctggaggccatcgagctgggcctgggcgaggcccaggtgatcctggccctgagcagccacctgggcgccgtggagagcgagaagcagaagctgagagcccaggtgagaagactggtgcaggagaaccagtggctgagagaggagctggccggcacccagcagaagctgcagagaagcgagcaggccgtggcccagctggaggaggagaagcagcacctgctgttcatgagccagatcagaaagctggacgaggacgccagccccaacgaggagaagggcgacgtgcccaaggacaccctggacgactag

SEQ ID NO: 86338 - DNA, 570 bp, synthetic construct
  misc_feature 1..570: note = Description of Artificial Sequence: Synthetic coding sequence
  source 1..570: mol_type = other DNA
atggccatgatggtgttccccagagaggagaagctgagccaggacgagatcgtgctgggcaccaaggccgtgatccagggcctggagaccctgagaggcgagcacagagccctgctggcccccctggtggcccccgaggccggcgaggccgagcccggcagccaggagagatgcatcctgctgagaagaagcctggaggccatcgagctgggcctgggcgaggcccaggaggagaagggcgacgtgcccaaggacaccctggacgacctgttccccaacgaggacgagcagagccccgcccccagccccggcggcggcgacgtgagcggccagcacggcggctacgagatccccgccagactgagaaccctgcacaacctggtgatccagtacgccagccagggcagatacgaggtggccgtgcccctgtgcaagcaggccctggaggacctggagaagaccagcggccacgaccaccccgacgtggccaccatgctgaacatcctggccctggtgtacagagaccagaacaagtacaaggaggccgcccacctgctgaacgacgcctag

SEQ ID NO: 86339 - DNA, 516 bp, synthetic construct
  misc_feature 1..516: note = Description of Artificial Sequence: Synthetic coding sequence
  source 1..516: mol_type = other DNA
atggccatgatggtgttccccagagaggagaagctgagccaggacgagatcgtgctgggcaccaaggccgtgatccagggcctggagaccctgagaggcgagcacagagccctgctggcccccctggtggcccccgaggccggcgaggccgagcccggcagccaggagagatgcatcctgctgagaagaagcctggaggccatcgagctgggcctgggcgaggcccaggtgatcctggccctgagcagccacctgggcgccgtggagagcgagaagcagaagctgagagcccaggtgagaagactggtgcaggagaaccagtggctgagagaggagctggccggcacccagcagaagctgcagagaagcgagcaggccgtggcccagctggaggaggagaagcagcacctgctgttcatgagccagatcagaaagctggacgaggacgccagccccaacgaggagaagggcgacgtgcccaaggacaccctggacgacctgttccccaacgagtag

SEQ ID NO: 86340 - DNA, 438 bp, synthetic construct
  misc_feature 1..438: note = Description of Artificial Sequence: Synthetic coding sequence
  source 1..438: mol_type = other DNA
atggccatgatggtgttccccagagaggagaagctgagccaggacgagatcgtgctgggcaccaaggccgtgatccagggcctggagaccctgagaggcgagcacagagccctgctggcccccctggtggcccccgaggccggcgaggccgagcccggcagccaggagagatgcatcctgctgagaagaagcctggaggccatcgagctgggcctgggcgaggcccaggtgatcctggccctgagcagccacctgggcgccgtggagagcgagaagcagaagctgagagcccaggtgagaagactggtgcaggagaaccagtggctgagagaggagctggccggcacccagcagaagctgcagagaagcgagcaggccgtggcccagctggaggaggagaagcagcacctgctgttcatgagccagatcagaaagtag

SEQ ID NO: 86341 - DNA, 318 bp, synthetic construct
  misc_feature 1..318: note = Description of Artificial Sequence: Synthetic coding sequence
  source 1..318: mol_type = other DNA
atggccatgatggtgttccccagagaggagaagctgagccaggacgagatcgtgctgggcaccaaggccgtgatccagggcctggagaccctgagaggcgagcacagagccctgctggcccccctggtggcccccgaggccggcgaggccgagcccggcagccaggagagatgcatcctgctgagaagaagcctggaggccatcgagctgggcctgggcgaggcccaggtgatcctggccctgagcagccacctgggcgccgtggagagcgagaagcagaagctgagagcccaggtgagaagactggtgcaggagtag

SEQ ID NO: 86342 - DNA, 1515 bp, synthetic construct
  misc_feature 1..1515: note = Description of Artificial Sequence: Synthetic coding sequence
  source 1..1515: mol_type = other DNA
atgagcgtgcaggtggccgcccccggcagcgccggcctgggccccgagagactgagccccgaggagctggtgagacagaccagacaggtggtgcagggcctggaggccctgagagccgagcaccacggcctggccggccacctggccgaggccctggccggccagggccccgccgccggcctggagatgctggaggagaagcagcaggtggtgagccacagcctggaggccatcgagctgggcctgggcgaggcccaggtgctgctggccctgagcgcccacgtgggcgccctggaggccgagaagcagagactgagaagccaggccagaagactggcccaggagaacgtgtggctgagagaggagctggaggagacccagagaagactgagagccagcgaggagagcgtggcccagctggaggaggagaagagacacctggagttcctgggccagctgagacagtacgacccccccgccgagagccagcagagcgagagcccccccagaagagacagcctggccagcctgttccccagcgaggaggaggagagaaagggccccgaggccgccggcgccgccgccgcccagcagggcggctacgagatccccgccagactgagaaccctgcacaacctggtgatccagtacgccggccagggcagatacgaggtggccgtgcccctgtgcagacaggccctggaggacctggagagaagcagcggccactgccaccccgacgtggccaccatgctgaacatcctggccctggtgtacagagaccagaacaagtacaaggaggccaccgacctgctgcacgacgccctgcagatcagagagcagaccctgggccccgagcaccccgccgtggccgccaccctgaacaacctggccgtgctgtacggcaagagaggcagatacagagaggccgagcccctgtgccagagagccctggagatcagagagaaggtgctgggcgccgaccaccccgacgtggccaagcagctgaacaacctggccctgctgtgccagaaccagggcaagttcgaggacgtggagagacactacgccagagccctgagcatctacgaggccctgggcggcccccacgaccccaacgtggccaagaccaagaacaacctggccagcgcctacctgaagcagaacaagtaccagcaggccgaggagctgtacaaggagatcctgcacaaggaggacctgcccgcccccctgggcgcccccaacaccggcaccgccggcgacgccgagcaggccctgagaagaagcagcagcctgagcaagatcagagagagcatcagaagaggcagcgagaagctggtgagcagactgagaggcgaggccgccgccggcgccgccggcatgaagagagccatgagcctgaacaccctgaacgtggacgcccccagagcccccggcacccagttccccagctggcacctggacaaggcccccagaaccctgagcgccagcacccaggacctgagcccccactag

SEQ ID NO: 86343 - DNA, 1557 bp, synthetic construct
  misc_feature 1..1557: note = Description of Artificial Sequence: Synthetic coding sequence
  source 1..1557: mol_type = other DNA
atgatcccccagaccccccaccactgcagccccggcgccgccatgagcgtgcaggtggccgcccccggcagcgccggcctgggccccgagagactgagccccgaggagctggtgagacagaccagacaggtggtgcagggcctggaggccctgagagccgagcaccacggcctggccggccacctggccgaggccctggccggccagggccccgccgccggcctggagatgctggaggagaagcagcaggtggtgagccacagcctggaggccatcgagctgggcctgggcgaggcccaggtgctgctggccctgagcgcccacgtgggcgccctggaggccgagaagcagagactgagaagccaggccagaagactggcccaggagaacgtgtggctgagagaggagctggaggagacccagagaagactgagagccagcgaggagagcgtggcccagctggaggaggagaagagacacctggagttcctgggccagctgagacagtacgacccccccgccgagagccagcagagcgagagcccccccagaagagacagcctggccagcctgttccccagcgaggaggaggagagaaagggccccgaggccgccggcgccgccgccgcccagcagggcggctacgagatccccgccagactgagaaccctgcacaacctggtgatccagtacgccggccagggcagatacgaggtggccgtgcccctgtgcagacaggccctggaggacctggagagaagcagcggccactgccaccccgacgtggccaccatgctgaacatcctggccctggtgtacagagaccagaacaagtacaaggaggccaccgacctgctgcacgacgccctgcagatcagagagcagaccctgggccccgagcaccccgccgtggccgccaccctgaacaacctggccgtgctgtacggcaagagaggcagatacagagaggccgagcccctgtgccagagagccctggagatcagagagaaggtgctgggcgccgaccaccccgacgtggccaagcagctgaacaacctggccctgctgtgccagaaccagggcaagttcgaggacgtggagagacactacgccagagccctgagcatctacgaggccctgggcggcccccacgaccccaacgtggccaagaccaagaacaacctggccagcgcctacctgaagcagaacaagtaccagcaggccgaggagctgtacaaggagatcctgcacaaggaggacctgcccgcccccctgggcgcccccaacaccggcaccgccggcgacgccgagcaggccctgagaagaagcagcagcctgagcaagatcagagagagcatcagaagaggcagcgagaagctggtgagcagactgagaggcgaggccgccgccggcgccgccggcatgaagagagccatgagcctgaacaccctgaacgtggacgcccccagagcccccggcacccagttccccagctggcacctggacaaggcccccagaaccctgagcgccagcacccaggacctgagcccccactag

SEQ ID NO: 86344 - DNA, 2379 bp, synthetic construct
  misc_feature 1..2379: note = Description of Artificial Sequence: Synthetic coding sequence
  source 1..2379: mol_type = other DNA
atgcagggcgaggacgccagatacctgaagagaaaggtgaagggcggcaacatcgacgtgcaccccagcgagaaggccctgatcgtgcactacgaggtggaggccaccatcctgggcgagatgggcgaccccatgctgggcgagagaaaggagtgccagaagatcatcagactgaagagcctgaacgccaacaccgacatcaccagcctggccagaaaggtggtggaggagtgcaagctgatccaccccagcaagctgaacgaggtggagcagctgctgtactacctgcagaacagaagagacagcctgagcggcaaggagaagaaggagaagagcagcaagcccaaggaccccccccccttcgagggcatggagatcgacgaggtggccaacatcaacgacatggacgagtacatcgagctgctgtacgaggacatccccgacaaggtgagaggcagcgccctgatcctgcagctggccagaaaccccgacaacctggaggagctgctgctgaacgagaccgccctgggcgccctggccagagtgctgagagaggactggaagcagagcgtggagctggccaccaacatcatctacatcttcttctgcttcagcagcttcagccagttccacggcctgatcacccactacaagatcggcgccctgtgcatgaacatcatcgaccacgagctgaagagacacgagctgtggcaggaggagctgagcaagaagaagaaggccgtggacgaggaccccgagaaccagaccctgagaaaggactacgagaagaccttcaagaagtaccagggcctggtggtgaagcaggagcagctgctgagagtggccctgtacctgctgctgaacctggccgaggacaccagaaccgagctgaagatgagaaacaagaacatcgtgcacatgctggtgaaggccctggacagagacaacttcgagctgctgatcctggtggtgagcttcctgaagaagctgagcatcttcatggagaacaagaacgacatggtggagatggacatcgtggagaagctggtgaagatgatcccctgcgagcacgaggacctgctgaacatcaccctgagactgctgctgaacctgagcttcgacaccggcctgagaaacaagatggtgcaggtgggcctgctgcccaagctgaccgccctgctgggcaacgacaactacaagcagatcgccatgtgcgtgctgtaccacatcagcatggacgacagattcaagagcatgttcgcctacaccgactgcatcccccagctgatgaagatgctgttcgagtgcagcgacgagagaatcgacctggagctgatcagcttctgcatcaacctggccgccaacaagagaaacgtgcagctgatctgcgagggcaacggcctgaagatgctgatgaagagagccctgaagttcaaggaccccctgctgatgaagatgatcagaaacatcagccagcacgacggccccaccaagaacctgttcatcgactacgtgggcgacctggccgcccagatcagcaacgacgaggaggaggagttcgtgatcgagtgcctgggcaccctggccaacctgaccatccccgacctggactgggagctggtgctgaaggagtacaagctggtgccctacctgaaggacaagctgaagcccggcgccgccgaggacgacctggtgctggaggtggtgatcatgatcggcaccgtgagcatggacgacagctgcgccgccctgctggccaagagcggcatcatccccgccctgatcgagctgctgaacgcccagcaggaggacgacgagttcgtgtgccagatcatctacgtgttctaccagatggtgttccaccaggccaccagagacgtgatcatcaaggagacccaggcccccgcctacctgatcgacctgatgcacgacaagaacaacgagatcagaaaggtgtgcgacaacaccctggacatcatcgccgagtacgacgaggagtgggccaagaagatccagagcgagaagttcagatggcacaacagccagtggctggagatggtggagagcagacagatggacgagagcgagcagtacctgtacggcgacgacagaatcgagccctacatccacgagggcgacatcctggagagacccgacctgttctacaacagcgacggcctgatcgccagcgagggcgccatcagccccgacttcttcaacgactaccacctgcagaacggcgacgtggtgggccagcacagcttccccggcagcctgggcatggacggcttcggccagcccgtgggcatcctgggcagacccgccaccgcctacggcttcagacccgacgagccctactactacggctacggcagctag

SEQ ID NO: 86345 - DNA, 2259 bp, synthetic construct
  misc_feature 1..2259: note = Description of Artificial Sequence: Synthetic coding sequence
  source 1..2259: mol_type = other DNA
atgggcgaccccatgctgggcgagagaaaggagtgccagaagatcatcagactgaagagcctgaacgccaacaccgacatcaccagcctggccagaaaggtggtggaggagtgcaagctgatccaccccagcaagctgaacgaggtggagcagctgctgtactacctgcagaacagaagagacagcctgagcggcaaggagaagaaggagaagagcagcaagcccaaggaccccccccccttcgagggcatggagatcgacgaggtggccaacatcaacgacatggacgagtacatcgagctgctgtacgaggacatccccgacaaggtgagaggcagcgccctgatcctgcagctggccagaaaccccgacaacctggaggagctgctgctgaacgagaccgccctgggcgccctggccagagtgctgagagaggactggaagcagagcgtggagctggccaccaacatcatctacatcttcttctgcttcagcagcttcagccagttccacggcctgatcacccactacaagatcggcgccctgtgcatgaacatcatcgaccacgagctgaagagacacgagctgtggcaggaggagctgagcaagaagaagaaggccgtggacgaggaccccgagaaccagaccctgagaaaggactacgagaagaccttcaagaagtaccagggcctggtggtgaagcaggagcagctgctgagagtggccctgtacctgctgctgaacctggccgaggacaccagaaccgagctgaagatgagaaacaagaacatcgtgcacatgctggtgaaggccctggacagagacaacttcgagctgctgatcctggtggtgagcttcctgaagaagctgagcatcttcatggagaacaagaacgacatggtggagatggacatcgtggagaagctggtgaagatgatcccctgcgagcacgaggacctgctgaacatcaccctgagactgctgctgaacctgagcttcgacaccggcctgagaaacaagatggtgcaggtgggcctgctgcccaagctgaccgccctgctgggcaacgacaactacaagcagatcgccatgtgcgtgctgtaccacatcagcatggacgacagattcaagagcatgttcgcctacaccgactgcatcccccagctgatgaagatgctgttcgagtgcagcgacgagagaatcgacctggagctgatcagcttctgcatcaacctggccgccaacaagagaaacgtgcagctgatctgcgagggcaacggcctgaagatgctgatgaagagagccctgaagttcaaggaccccctgctgatgaagatgatcagaaacatcagccagcacgacggccccaccaagaacctgttcatcgactacgtgggcgacctggccgcccagatcagcaacgacgaggaggaggagttcgtgatcgagtgcctgggcaccctggccaacctgaccatccccgacctggactgggagctggtgctgaaggagtacaagctggtgccctacctgaaggacaagctgaagcccggcgccgccgaggacgacctggtgctggaggtggtgatcatgatcggcaccgtgagcatggacgacagctgcgccgccctgctggccaagagcggcatcatccccgccctgatcgagctgctgaacgcccagcaggaggacgacgagttcgtgtgccagatcatctacgtgttctaccagatggtgttccaccaggccaccagagacgtgatcatcaaggagacccaggcccccgcctacctgatcgacctgatgcacgacaagaacaacgagatcagaaaggtgtgcgacaacaccctggacatcatcgccgagtacgacgaggagtgggccaagaagatccagagcgagaagttcagatggcacaacagccagtggctggagatggtggagagcagacagatggacgagagcgagcagtacctgtacggcgacgacagaatcgagccctacatccacgagggcgacatcctggagagacccgacctgttctacaacagcgacggcctgatcgccagcgagggcgccatcagccccgacttcttcaacgactaccacctgcagaacggcgacgtggtgggccagcacagcttccccggcagcctgggcatggacggcttcggccagcccgtgggcatcctgggcagacccgccaccgcctacggcttcagacccgacgagccctactactacggctacggcagctag

SEQ ID NO: 86346 - DNA, 2247 bp, synthetic construct
  misc_feature 1..2247: note = Description of Artificial Sequence: Synthetic coding sequence
  source 1..2247: mol_type = other DNA
atgcagggcgaggacgccagatacctgaagagcatcagactgaagagcctgaacgccaacaccgacatcaccagcctggccagaaaggtggtggaggagtgcaagctgatccaccccagcaagctgaacgaggtggagcagctgctgtactacctgcagaacagaagagacagcctgagcggcaaggagaagaaggagaagagcagcaagcccaaggaccccccccccttcgagggcatggagatcgacgaggtggccaacatcaacgacatggacgagtacatcgagctgctgtacgaggacatccccgacaaggtgagaggcagcgccctgatcctgcagctggccagaaaccccgacaacctggaggagctgctgctgaacgagaccgccctgggcgccctggccagagtgctgagagaggactggaagcagagcgtggagctggccaccaacatcatctacatcttcttctgcttcagcagcttcagccagttccacggcctgatcacccactacaagatcggcgccctgtgcatgaacatcatcgaccacgagctgaagagacacgagctgtggcaggaggagctgagcaagaagaagaaggccgtggacgaggaccccgagaaccagaccctgagaaaggactacgagaagaccttcaagaagtaccagggcctggtggtgaagcaggagcagctgctgagagtggccctgtacctgctgctgaacctggccgaggacaccagaaccgagctgaagatgagaaacaagaacatcgtgcacatgctggtgaaggccctggacagagacaacttcgagctgctgatcctggtggtgagcttcctgaagaagctgagcatcttcatggagaacaagaacgacatggtggagatggacatcgtggagaagctggtgaagatgatcccctgcgagcacgaggacctgctgaacatcaccctgagactgctgctgaacctgagcttcgacaccggcctgagaaacaagatggtgcaggtgggcctgctgcccaagctgaccgccctgctgggcaacgacaactacaagcagatcgccatgtgcgtgctgtaccacatcagcatggacgacagattcaagagcatgttcgcctacaccgactgcatcccccagctgatgaagatgctgttcgagtgcagcgacgagagaatcgacctggagctgatcagcttctgcatcaacctggccgccaacaagagaaacgtgcagctgatctgcgagggcaacggcctgaagatgctgatgaagagagccctgaagttcaaggaccccctgctgatgaagatgatcagaaacatcagccagcacgacggccccaccaagaacctgttcatcgactacgtgggcgacctggccgcccagatcagcaacgacgaggaggaggagttcgtgatcgagtgcctgggcaccctggccaacctgaccatccccgacctggactgggagctggtgctgaaggagtacaagctggtgccctacctgaaggacaagctgaagcccggcgccgccgaggacgacctggtgctggaggtggtgatcatgatcggcaccgtgagcatggacgacagctgcgccgccctgctggccaagagcggcatcatccccgccctgatcgagctgctgaacgcccagcaggaggacgacgagttcgtgtgccagatcatctacgtgttctaccagatggtgttccaccaggccaccagagacgtgatcatcaaggagacccaggcccccgcctacctgatcgacctgatgcacgacaagaacaacgagatcagaaaggtgtgcgacaacaccctggacatcatcgccgagtacgacgaggagtgggccaagaagatccagagcgagaagttcagatggcacaacagccagtggctggagatggtggagagcagacagatggacgagagcgagcagtacctgtacggcgacgacagaatcgagccctacatccacgagggcgacatcctggagagacccgacctgttctacaacagcgacggcctgatcgccagcgagggcgccatcagccccgacttcttcaacgactaccacctgcagaacggcgacgtggtgggccagcacagcttccccggcagcctgggcatggacggcttcggccagcccgtgggcatcctgggcagacccgccaccgcctacggcttcagacccgacgagccctactactacggctacggcagctag

SEQ ID NO: 86347 - DNA, 2145 bp, synthetic construct
  misc_feature 1..2145: note = Description of Artificial Sequence: Synthetic coding sequence
  source 1..2145: mol_type = other DNA
atgagcatcgccctgggcaacacctacagaagaagcctgagcgacagcgagaccgtgagcgtgctgcaggccagcctgtgcgaggagaagaaggagaagagcagcaagcccaaggaccccccccccttcgagggcatggagatcgacgaggtggccaacatcaacgacatggacgagtacatcgagctgctgtacgaggacatccccgacaaggtgagaggcagcgccctgatcctgcagctggccagaaaccccgacaacctggaggagctgctgctgaacgagaccgccctgggcgccctggccagagtgctgagagaggactggaagcagagcgtggagctggccaccaacatcatctacatcttcttctgcttcagcagcttcagccagttccacggcctgatcacccactacaagatcggcgccctgtgcatgaacatcatcgaccacgagctgaagagacacgagctgtggcaggaggagctgagcaagaagaagaaggccgtggacgaggaccccgagaaccagaccctgagaaaggactacgagaagaccttcaagaagtaccagggcctggtggtgaagcaggagcagctgctgagagtggccctgtacctgctgctgaacctggccgaggacaccagaaccgagctgaagatgagaaacaagaacatcgtgcacatgctggtgaaggccctggacagagacaacttcgagctgctgatcctggtggtgagcttcctgaagaagctgagcatcttcatggagaacaagaacgacatggtggagatggacatcgtggagaagctggtgaagatgatcccctgcgagcacgaggacctgctgaacatcaccctgagactgctgctgaacctgagcttcgacaccggcctgagaaacaagatggtgcaggtgggcctgctgcccaagctgaccgccctgctgggcaacgacaactacaagcagatcgccatgtgcgtgctgtaccacatcagcatggacgacagattcaagagcatgttcgcctacaccgactgcatcccccagctgatgaagatgctgttcgagtgcagcgacgagagaatcgacctggagctgatcagcttctgcatcaacctggccgccaacaagagaaacgtgcagctgatctgcgagggcaacggcctgaagatgctgatgaagagagccctgaagttcaaggaccccctgctgatgaagatgatcagaaacatcagccagcacgacggccccaccaagaacctgttcatcgactacgtgggcgacctggccgcccagatcagcaacgacgaggaggaggagttcgtgatcgagtgcctgggcaccctggccaacctgaccatccccgacctggactgggagctggtgctgaaggagtacaagctggtgccctacctgaaggacaagctgaagcccggcgccgccgaggacgacctggtgctggaggtggtgatcatgatcggcaccgtgagcatggacgacagctgcgccgccctgctggccaagagcggcatcatccccgccctgatcgagctgctgaacgcccagcaggaggacgacgagttcgtgtgccagatcatctacgtgttctaccagatggtgttccaccaggccaccagagacgtgatcatcaaggagacccaggcccccgcctacctgatcgacctgatgcacgacaagaacaacgagatcagaaaggtgtgcgacaacaccctggacatcatcgccgagtacgacgaggagtgggccaagaagatccagagcgagaagttcagatggcacaacagccagtggctggagatggtggagagcagacagatggacgagagcgagcagtacctgtacggcgacgacagaatcgagccctacatccacgagggcgacatcctggagagacccgacctgttctacaacagcgacggcctgatcgccagcgagggcgccatcagccccgacttcttcaacgactaccacctgcagaacggcgacgtggtgggccagcacagcttccccggcagcctgggcatggacggcttcggccagcccgtgggcatcctgggcagacccgccaccgcctacggcttcagacccgacgagccctactactacggctacggcagctag

SEQ ID NO: 86348 - DNA, 1485 bp, synthetic construct
  misc_feature 1..1485: note = Description of Artificial Sequence: Synthetic coding sequence
  source 1..1485: mol_type = other DNA
atgagaaacaagaacatcgtgcacatgctggtgaaggccctggacagagacaacttcgagctgctgatcctggtggtgagcttcctgaagaagctgagcatcttcatggagaacaagaacgacatggtggagatggacatcgtggagaagctggtgaagatgatcccctgcgagcacgaggacctgctgaacatcaccctgagactgctgctgaacctgagcttcgacaccggcctgagaaacaagatggtgcaggtgggcctgctgcccaagctgaccgccctgctgggcaacgacaactacaagcagatcgccatgtgcgtgctgtaccacatcagcatggacgacagattcaagagcatgttcgcctacaccgactgcatcccccagctgatgaagatgctgttcgagtgcagcgacgagagaatcgacctggagctgatcagcttctgcatcaacctggccgccaacaagagaaacgtgcagctgatctgcgagggcaacggcctgaagatgctgatgaagagagccctgaagttcaaggaccccctgctgatgaagatgatcagaaacatcagccagcacgacggccccaccaagaacctgttcatcgactacgtgggcgacctggccgcccagatcagcaacgacgaggaggaggagttcgtgatcgagtgcctgggcaccctggccaacctgaccatccccgacctggactgggagctggtgctgaaggagtacaagctggtgccctacctgaaggacaagctgaagcccggcgccgccgaggacgacctggtgctggaggtggtgatcatgatcggcaccgtgagcatggacgacagctgcgccgccctgctggccaagagcggcatcatccccgccctgatcgagctgctgaacgcccagcaggaggacgacgagttcgtgtgccagatcatctacgtgttctaccagatggtgttccaccaggccaccagagacgtgatcatcaaggagacccaggcccccgcctacctgatcgacctgatgcacgacaagaacaacgagatcagaaaggtgtgcgacaacaccctggacatcatcgccgagtacgacgaggagtgggccaagaagatccagagcgagaagttcagatggcacaacagccagtggctggagatggtggagagcagacagatggacgagagcgagcagtacctgtacggcgacgacagaatcgagccctacatccacgagggcgacatcctggagagacccgacctgttctacaacagcgacggcctgatcgccagcgagggcgccatcagccccgacttcttcaacgactaccacctgcagaacggcgacgtggtgggccagcacagcttccccggcagcctgggcatggacggcttcggccagcccgtgggcatcctgggcagacccgccaccgcctacggcttcagacccgacgagccctactactacggctacggcagctag

SEQ ID NO: 86349 - DNA, 1935 bp, synthetic construct
  misc_feature 1..1935: note = Description of Artificial Sequence: Synthetic coding sequence
  source 1..1935: mol_type = other DNA
atgaagctgatcaccatcctgttcctgtgcagcagactgctgctgagcctgacccaggagagccagagcgaggagatcgactgcaacgacaaggacctgttcaaggccgtggacgccgccctgaagaagtacaacagccagaaccagagcaacaaccagttcgtgctgtacagaatcaccgaggccaccaagaccgtgggcagcgacaccttctacagcttcaagtacgagatcaaggagggcgactgccccgtgcagagcggcaagacctggcaggactgcgagtacaaggacgccgccaaggccgccaccggcgagtgcaccgccaccgtgggcaagagaagcagcaccaagttcagcgtggccacccagacctgccagatcacccccgccgagggccccgtggtgaccgcccagtacgactgcctgggctgcgtgcaccccatcagcacccagagccccgacctggagcccatcctgagacacggcatccagtacttcaacaacaacacccagcacagcagcctgttcatgctgaacgaggtgaagagagcccagagacaggtggtggccggcctgaacttcagaatcacctacagcatcgtgcagaccaactgcagcaaggagaacttcctgttcctgacccccgactgcaagagcctgtggaacggcgacaccggcgagtgcaccgacaacgcctacatcgacatccagctgagaatcgccagcttcagccagaactgcgacatctaccccggcaaggacttcgtgcagccccccaccaagatctgcgtgggctgccccagagacatccccaccaacagccccgagctggaggagaccctgacccacaccatcaccaagctgaacgccgagaacaacgccaccttctacttcaagatcgacaacgtgaagaaggccagagtgcaggtggtggccggcaagaagtacttcatcgacttcgtggccagagagaccacctgcagcaaggagagcaacgaggagctgaccgagagctgcgagaccaagaagctgggccagagcctggactgcaacgccgaggtgtacgtggtgccctgggagaagaagatctaccccaccgtgaactgccagcccctgggcatgatcagcctgatgaagagaccccccggcttcagccccttcagaagcagcagaatcggcgagatcaaggaggagaccaccgtgagccccccccacaccagcatggcccccgcccaggacgaggagagagacagcggcaaggagcagggccacaccagaagacacgactggggccacgagaagcagagaaagcacaacctgggccacggccacaagcacgagagagaccagggccacggccaccagagaggccacggcctgggccacggccacgagcagcagcacggcctgggccacggccacaagttcaagctggacgacgacctggagcaccagggcggccacgtgctggaccacggccacaagcacaagcacggccacggccacggcaagcacaagaacaagggcaagaagaacggcaagcacaacggctggaagaccgagcacctggccagcagcagcgaggacagcaccacccccagcgcccagacccaggagaagaccgagggccccacccccatccccagcctggccaagcccggcgtgaccgtgaccttcagcgacttccaggacagcgacctgatcgccaccatgatgccccccatcagccccgcccccatccagagcgacgacgactggatccccgacatccagatcgaccccaacggcctgagcttcaaccccatcagcgacttccccgacaccaccagccccaagtgccccggcagaccctggaagagcgtgagcgagatcaaccccaccacccagatgaaggagagctactacttcgacctgaccgacggcctgagctag

SEQ ID NO: 86350 - DNA, 1284 bp, synthetic construct
  misc_feature 1..1284: note = Description of Artificial Sequence: Synthetic coding sequence
  source 1..1284: mol_type = other DNA
atgaagctgatcaccatcctgttcctgtgcagcagactgctgctgagcctgacccaggagagccagagcgaggagatcgactgcaacgacaaggacctgttcaaggccgtggacgccgccctgaagaagtacaacagccagaaccagagcaacaaccagttcgtgctgtacagaatcaccgaggccaccaagaccgtgggcagcgacaccttctacagcttcaagtacgagatcaaggagggcgactgccccgtgcagagcggcaagacctggcaggactgcgagtacaaggacgccgccaaggccgccaccggcgagtgcaccgccaccgtgggcaagagaagcagcaccaagttcagcgtggccacccagacctgccagatcacccccgccgagggccccgtggtgaccgcccagtacgactgcctgggctgcgtgcaccccatcagcacccagagccccgacctggagcccatcctgagacacggcatccagtacttcaacaacaacacccagcacagcagcctgttcatgctgaacgaggtgaagagagcccagagacaggtggtggccggcctgaacttcagaatcacctacagcatcgtgcagaccaactgcagcaaggagaacttcctgttcctgacccccgactgcaagagcctgtggaacggcgacaccggcgagtgcaccgacaacgcctacatcgacatccagctgagaatcgccagcttcagccagaactgcgacatctaccccggcaaggacttcgtgcagccccccaccaagatctgcgtgggctgccccagagacatccccaccaacagccccgagctggaggagaccctgacccacaccatcaccaagctgaacgccgagaacaacgccaccttctacttcaagatcgacaacgtgaagaaggccagagtgcaggtggtggccggcaagaagtacttcatcgacttcgtggccagagagaccacctgcagcaaggagagcaacgaggagctgaccgagagctgcgagaccaagaagctgggccagagcctggactgcaacgccgaggtgtacgtggtgccctgggagaagaagatctaccccaccgtgaactgccagcccctgggcatgatcagcctgatgaagagaccccccggcttcagccccttcagaagcagcagaatcggcgagatcaaggaggagaccaccagccacctgagaagctgcgagtacaagggcagaccccccaaggccggcgccgagcccgccagcgagagagaggtgagctag

SEQ ID NO: 86351 - DNA, 1248 bp, synthetic construct
  misc_feature 1..1248: note = Description of Artificial Sequence: Synthetic coding sequence
  source 1..1248: mol_type = other DNA
atgaagctgagcctgacccaggagagccagagcgaggagatcgactgcaacgacaaggacctgttcaaggccgtggacgccgccctgaagaagtacaacagccagaaccagagcaacaaccagttcgtgctgtacagaatcaccgaggccaccaagaccgtgggcagcgacaccttctacagcttcaagtacgagatcaaggagggcgactgccccgtgcagagcggcaagacctggcaggactgcgagtacaaggacgccgccaaggccgccaccggcgagtgcaccgccaccgtgggcaagagaagcagcaccaagttcagcgtggccacccagacctgccagatcacccccgccgagggccccgtggtgaccgcccagtacgactgcctgggctgcgtgcaccccatcagcacccagagccccgacctggagcccatcctgagacacggcatccagtacttcaacaacaacacccagcacagcagcctgttcatgctgaacgaggtgaagagagcccagagacaggtggtggccggcctgaacttcagaatcacctacagcatcgtgcagaccaactgcagcaaggagaacttcctgttcctgacccccgactgcaagagcctgtggaacggcgacaccggcgagtgcaccgacaacgcctacatcgacatccagctgagaatcgccagcttcagccagaactgcgacatctaccccggcaaggacttcgtgcagccccccaccaagatctgcgtgggctgccccagagacatccccaccaacagccccgagctggaggagaccctgacccacaccatcaccaagctgaacgccgagaacaacgccaccttctacttcaagatcgacaacgtgaagaaggccagagtgcaggtggtggccggcaagaagtacttcatcgacttcgtggccagagagaccacctgcagcaaggagagcaacgaggagctgaccgagagctgcgagaccaagaagctgggccagagcctggactgcaacgccgaggtgtacgtggtgccctgggagaagaagatctaccccaccgtgaactgccagcccctgggcatgatcagcctgatgaagagaccccccggcttcagccccttcagaagcagcagaatcggcgagatcaaggaggagaccaccagccacctgagaagctgcgagtacaagggcagaccccccaaggccggcgccgagcccgccagcgagagagaggtgagctag

SEQ ID NO: 86352 - DNA, 1176 bp, synthetic construct
  misc_feature 1..1176: note = Description of Artificial Sequence: Synthetic coding sequence
  source 1..1176: mol_type = other DNA
atgaagctgatcaccatcctgttcctgtgcagcagactgctgctgagcctgacccaggagagccagagcgaggagatcgactgcaacgacaaggacctgttcaaggccgtggacgccgccctgaagaagtacaacagccagaaccagagcaacaaccagttcgtgctgtacagaatcaccgaggccaccaagaccgtgggcagcgacaccttctacagcttcaagtacgagatcaaggagggcgactgccccgtgcagagcggcaagacctggcaggactgcgagtacaaggacgccgccaaggccgccaccggcgagtgcaccgccaccgtgggcaagagaagcagcaccaagttcagcgtggccacccagacctgccagatcacccccgccgagggccccgtggtgaccgcccagtacgactgcctgggctgcgtgcaccccatcagcacccagagccccgacctggagcccatcctgagacacggcatccagtacttcaacaacaacacccagcacagcagcctgttcatgctgaacgaggtgaagagagcccagagacaggacaccggcgagtgcaccgacaacgcctacatcgacatccagctgagaatcgccagcttcagccagaactgcgacatctaccccggcaaggacttcgtgcagccccccaccaagatctgcgtgggctgccccagagacatccccaccaacagccccgagctggaggagaccctgacccacaccatcaccaagctgaacgccgagaacaacgccaccttctacttcaagatcgacaacgtgaagaaggccagagtgcaggtggtggccggcaagaagtacttcatcgacttcgtggccagagagaccacctgcagcaaggagagcaacgaggagctgaccgagagctgcgagaccaagaagctgggccagagcctggactgcaacgccgaggtgtacgtggtgccctgggagaagaagatctaccccaccgtgaactgccagcccctgggcatgatcagcctgatgaagagaccccccggcttcagccccttcagaagcagcagaatcggcgagatcaaggaggagaccaccagccacctgagaagctgcgagtacaagggcagaccccccaaggccggcgccgagcccgccagcgagagagaggtgagctag

SEQ ID NO: 86353 - DNA, 306 bp, synthetic construct
  misc_feature 1..306: note = Description of Artificial Sequence: Synthetic coding sequence
  source 1..306: mol_type = other DNA
atggacatccccatcagcagcagagacttcagaggcctgcagctggcctgcgtggccctgggcctggtggccggcagcatcatcatcggcatcagcgtgagcaaggccgccgccgccatgggcggcgtgttcatcggcgccgccgtgctgggcagcctgagaatccacccccaccccggcgccgaccacggcgagggcagaagcagcaccaacggcaacaaggagggcgccagaagcagcctgagcaccgtgagcagaaccctggagaagctgaagcccggcaccagaggcgccgaggagtgctag

SEQ ID NO: 86354 - DNA, 375 bp, synthetic construct
  misc_feature 1..375: note = Description of Artificial Sequence: Synthetic coding sequence
  source 1..375: mol_type = other DNA
atggacatccccatcagcagcagagacttcagaggcctgcagctggcctgcgtggccctgggcctggtggccggcagcatcatcatcggcatcagcgtgagcaaggccgccgccgccatgggcggcgtgttcatcggcgccgccgtgctgggcctgctgatcctggcctaccccttcctgaaggccagattcaacctggaccacatcctgcccaccatcggcagcctgagaatccacccccaccccggcgccgaccacggcgagggcagaagcagcaccaacggcaacaaggagggcgccagaagcagcctgagcaccgtgagcagaaccctggagaagctgaagcccggcaccagaggcgccgaggagtgctag

SEQ ID NO: 86355 - DNA, 3135 bp, synthetic construct
  misc_feature 1..3135: note = Description of Artificial Sequence: Synthetic coding sequence
  source 1..3135: mol_type = other DNA
atgaagcccggctgcgccgccggcagccccggcaacgagtggatcttcttcagcaccgacgagatcaccaccagatacagaaacaccatgagcaacggcggcctgcagagaagcgtgatcctgagcgccctgatcctgctgagagccgtgaccggcttcagcggcgacggcagagccatctggagcaagaaccccaacttcacccccgtgaacgagagccagctgttcctgtacgacaccttccccaagaacttcttctggggcatcggcaccggcgccctgcaggtggagggcagctggaagaaggacggcaagggccccagcatctgggaccacttcatccacacccacctgaagaacgtgagcagcaccaacggcagcagcgacagctacatcttcctggagaaggacctgagcgccctggacttcatcggcgtgagcttctaccagttcagcatcagctggcccagactgttccccgacggcatcgtgaccgtggccaacgccaagggcctgcagtactacagcaccctgctggacgccctggtgctgagaaacatcgagcccatcgtgaccctgtaccactgggacctgcccctggccctgcaggagaagtacggcggctggaagaacgacaccatcatcgacatcttcaacgactacgccacctactgcttccagatgttcggcgacagagtgaagtactggatcaccatccacaacccctacctggtggcctggcacggctacggcaccggcatgcacgcccccggcgagaagggcaacctggccgccgtgtacaccgtgggccacaacctgatcaaggcccacagcaaggtgtggcacaactacaacacccacttcagaccccaccagaagggctggctgagcatcaccctgggcagccactggatcgagcccaacagaagcgagaacaccatggacatcttcaagtgccagcagagcatggtgagcgtgctgggctggttcgccaaccccatccacggcgacggcgactaccccgagggcatgagaaagaagctgttcagcgtgctgcccatcttcagcgaggccgagaagcacgagatgagaggcaccgccgacttcttcgccttcagcttcggccccaacaacttcaagcccctgaacaccatggccaagatgggccagaacgtgagcctgaacctgagagaggccctgaactggatcaagctggagtacaacaaccccagaatcctgatcgccgagaacggctggttcaccgacagcagagtgaagaccgaggacaccaccgccatctacatgatgaagaacttcctgagccaggtgctgcaggccatcagactggacgagatcagagtgttcggctacaccgcctggagcctgctggacggcttcgagtggcaggacgcctacaccatcagaagaggcctgttctacgtggacttcaacagcaagcagaaggagagaaagcccaagagcagcgcccactactacaagcagatcatcagagagaacggcttcagcctgaaggagagcacccccgacgtgcagggccagttcccctgcgacttcagctggggcgtgaccgagagcgtgctgaagcccgagagcgtggccagcagcccccagttcagcgacccccacctgtacgtgtggaacgccaccggcaacagactgctgcacagagtggagggcgtgagactgaagaccagacccgcccagtgcaccgacttcgtgaacatcaagaagcagctggagatgctggccagaatgaaggtgacccactacagattcgccctggactgggccagcgtgctgcccaccggcaacctgagcgccgtgaacagacaggccctgagatactacagatgcgtggtgagcgagggcctgaagctgggcatcagcgccatggtgaccctgtactaccccacccacgcccacctgggcctgcccgagcccctgctgcacgccgacggctggctgaaccccagcaccgccgaggccttccaggcctacgccggcctgtgcttccaggagctgggcgacctggtgaagctgtggatcaccatcaacgagcccaacagactgagcgacatctacaacagaagcggcaacgacacctacggcgccgcccacaacctgctggtggcccacgccctggcctggagactgtacgacagacagttcagacccagccagagaggcgccgtgagcctgagcctgcacgccgactgggccgagcccgccaacccctacgccgacagccactggagagccgccgagagattcctgcagttcgagatcgcctggttcgccgagcccctgttcaagaccggcgactaccccgccgccatgagagagtacatcgccagcaagcacagaagaggcctgagcagcagcgccctgcccagactgaccgaggccgagagaagactgctgaagggcaccgtggacttctgcgccctgaaccacttcaccaccagattcgtgatgcacgagcagctggccggcagcagatacgacagcgacagagacatccagttcctgcaggacatcaccagactgagcagccccaccagactggccgtgatcccctggggcgtgagaaagctgctgagatgggtgagaagaaactacggcgacatggacatctacatcaccgccagcggcatcgacgaccaggccctggaggacgacagactgagaaagtactacctgggcaagtacctgcaggaggtgctgaaggcctacctgatcgacaaggtgagaatcaagggctactacgccttcaagctggccgaggagaagagcaagcccagattcggcttcttcaccagcgacttcaaggccaagagcagcatccagttctacaacaaggtgatcagcagcagaggcttccccttcgagaacagcagcagcagatgcagccagacccaggagaacaccgagtgcaccgtgtgcctgttcctggtgcagaagaagcccctgatcttcctgggctgctgcttcttcagcaccctggtgctgctgctgagcatcgccatcttccagagacagaagagaagaaagttctggaaggccaagaacctgcagcacatccccctgaagaagggcaagagagtggtgagctag

SEQ ID NO: 86356 - DNA, 1389 bp, synthetic construct
  misc_feature 1..1389: note = Description of Artificial Sequence: Synthetic coding sequence
  source 1..1389: mol_type = other DNA
atgggcacccaggccctgcagggcttcctgttcctgctgttcctgcccctgctgcagcccagaggcgccagcgccggcagcctgcacagccccggcctgagcgagtgcttccaggtgaacggcgccgactacagaggccaccagaacagaaccggccccagaggcgccggcagaccctgcctgttctgggaccagacccagcagcacagctacagcagcgccagcgacccccacggcagatggggcctgggcgcccacaacttctgcagaaaccccgacggcgacgtgcagccctggtgctacgtggccgagaccgaggagggcatctactggagatactgcgacatccccagctgccacatgcccggctacctgggctgcttcgtggacagcggcgccccccccgccctgagcggccccagcggcaccagcaccaagctgaccgtgcaggtgtgcctgagattctgcagaatgaagggctaccagctggccggcgtggaggccggctacgcctgcttctgcggcagcgagagcgacctggccagaggcagactggcccccgccaccgactgcgaccagatctgcttcggccaccccggccagctgtgcggcggcgacggcagactgggcgtgtacgaggtgagcgtgggcagctgccagggcaactggaccgccccccagggcgtgatctacagccccgacttccccgacgagtacggccccgacagaaactgcagctgggccctgggcccccccggcgccgccctggagctgaccttcagactgttcgagctggccgaccccagagacagactggagctgagagacgccgccagcggcagcctgctgagagccttcgacggcgccagacccccccccagcggccccctgagactgggcaccgccgccctgctgctgaccttcagaagcgacgccagaggccacgcccagggcttcgccctgacctacagaggcctgcaggacgccgccgaggaccccgaggcccccgagggcagcgcccagacccccgccgcccccctggacggcgccaacgtgagctgcagccccagacccggcgccccccccgccgccatcggcgccagagtgttcagcaccgtgaccgccgtgagcgtgctgctgctgctgctgctgggcctgctgagacccctgagaagaagaagctgcctgctggcccccggcaagggcccccccgccctgggcgccagcagaggccccagaagaagctgggccgtgtggtaccagcagcccagaggcgtggccctgccctgcagccccggcgacccccaggccgagggcagcgccgccggctacagacccctgagcgccagcagccagagcagcctgagaagcctgatcagcgccctgtag

SEQ ID NO: 86357 - DNA, 1263 bp, synthetic construct
  misc_feature 1..1263: note = Description of Artificial Sequence: Synthetic coding sequence
  source 1..1263: mol_type = other DNA
atgggcacccaggccctgcagggcttcctgttcctgctgttcctgcccctgctgcagcccagaggcgccagcgccggcagcctgcacagccccggcctgagcgagtgcttccaggtgaacggcgccgactacagaggccaccagaacagaaccggccccagaggcgccggcagaccctgcctgttctgggaccagacccagcagcacagctacagcagcgccagcgacccccacggcagatggggcctgggcgcccacaacttctgcagaaaccccgacggcgacgtgcagccctggtgctacgtggccgagaccgaggagggcatctactggagatactgcgacatccccagctgccacatgcccggctacctgggctgcttcgtggacagcggcgccccccccgccctgagcggccccagcggcaccagcaccaagctgaccgtgcaggtgtgcctgagattctgcagaatgaagggctaccagctggccggcgtggaggccggctacgcctgcttctgcggcagcgagagcgacctggccagaggcagactggcccccgccaccgactgcgaccagatctgcttcggccaccccggccagctgtgcggcggcgacggcagactgggcgtgtacgaggtgagcgtgggcagctgccagggcaactggaccgccccccagggcgtgatctacagccccgacttccccgacgagtacggccccgacagaaactgcagctgggccctgggcccccccggcgccgccctggagctgaccttcagactgttcgagctggccgaccccagagacagactggagctgagagacgccgccagcggcagcctgctgagagccttcgacggcgccagacccccccccagcggccccctgagactgggcaccgccgccctgctgctgaccttcagaagcgacgccagaggccacgcccagggcttcgccctgacctacagaggcctgcaggacgccgccgaggaccccgaggcccccgagggcagcgcccagacccccgccgcccccctggacggcgccaacgtgagctgcagccccagacccggcgccccccccgccgccatcggcggcgccgtgtgctggctgagagagaagggccccagaagatggggcctgcccggcgcccccggcgaggccggcctgtgcggcaccaacagccccgagggctggccctgccccgccccccccggcacccccagactgagagtgctgcccagagccaccggcctgtag

SEQ ID NO: 86358 - DNA, 1272 bp, synthetic construct
  misc_feature 1..1272: note = Description of Artificial Sequence: Synthetic coding sequence
  source 1..1272: mol_type = other DNA
atgggcacccaggccctgcagggcttcctgttcctgctgttcctgcccctgctgcagcccagaggcgccagcgccggcagcctgcacagccccggcctgagcgagtgcttccaggtgaacggcgccgactacagaggccaccagaacagaaccggccccagaggcgccggcagaccctgcctgttctgggaccagacccagcagcacagctacagcagcgccagcgacccccacggcagatggggcctgggcgcccacaacttctgcagaaaccccgacggcgacgtgcagccctggtgctacgtggccgagaccgaggagggcatctactggagatactgcgacatccccagctgccacatgcccggctacctgggctgcttcgtggacagcggcgccccccccgccctgagcggccccagcggcaccagcaccaagctgaccgtgcaggtgtgcctgagattctgcagaatgaagggctaccagctgtgcggcggcgacggcagactgggcgtgtacgaggtgagcgtgggcagctgccagggcaactggaccgccccccagggcgtgatctacagccccgacttccccgacgagtacggccccgacagaaactgcagctgggccctgggcccccccggcgccgccctggagctgaccttcagactgttcgagctggccgaccccagagacagactggagctgagagacgccgccagcggcagcctgctgagagccttcgacggcgccagacccccccccagcggccccctgagactgggcaccgccgccctgctgctgaccttcagaagcgacgccagaggccacgcccagggcttcgccctgacctacagaggcctgcaggacgccgccgaggaccccgaggcccccgagggcagcgcccagacccccgccgcccccctggacggcgccaacgtgagctgcagccccagacccggcgccccccccgccgccatcggcgccagagtgttcagcaccgtgaccgccgtgagcgtgctgctgctgctgctgctgggcctgctgagacccctgagaagaagaagctgcctgctggcccccggcaagggcccccccgccctgggcgccagcagaggccccagaagaagctgggccgtgtggtaccagcagcccagaggcgtggccctgccctgcagccccggcgacccccaggccgagggcagcgccgccggctacagacccctgagcgccagcagccagagcagcctgagaagcctgatcagcgccctgtag

SEQ ID NO: 86359 - DNA, 1146 bp, synthetic construct
  misc_feature 1..1146: note = Description of Artificial Sequence: Synthetic coding sequence
  source 1..1146: mol_type = other DNA
atgggcacccaggccctgcagggcttcctgttcctgctgttcctgcccctgctgcagcccagaggcgccagcgccggcagcctgcacagccccggcctgagcgagtgcttccaggtgaacggcgccgactacagaggccaccagaacagaaccggccccagaggcgccggcagaccctgcctgttctgggaccagacccagcagcacagctacagcagcgccagcgacccccacggcagatggggcctgggcgcccacaacttctgcagaaaccccgacggcgacgtgcagccctggtgctacgtggccgagaccgaggagggcatctactggagatactgcgacatccccagctgccacatgcccggctacctgggctgcttcgtggacagcggcgccccccccgccctgagcggccccagcggcaccagcaccaagctgaccgtgcaggtgtgcctgagattctgcagaatgaagggctaccagctgtgcggcggcgacggcagactgggcgtgtacgaggtgagcgtgggcagctgccagggcaactggaccgccccccagggcgtgatctacagccccgacttccccgacgagtacggccccgacagaaactgcagctgggccctgggcccccccggcgccgccctggagctgaccttcagactgttcgagctggccgaccccagagacagactggagctgagagacgccgccagcggcagcctgctgagagccttcgacggcgccagacccccccccagcggccccctgagactgggcaccgccgccctgctgctgaccttcagaagcgacgccagaggccacgcccagggcttcgccctgacctacagaggcctgcaggacgccgccgaggaccccgaggcccccgagggcagcgcccagacccccgccgcccccctggacggcgccaacgtgagctgcagccccagacccggcgccccccccgccgccatcggcggcgccgtgtgctggctgagagagaagggccccagaagatggggcctgcccggcgcccccggcgaggccggcctgtgcggcaccaacagccccgagggctggccctgccccgccccccccggcacccccagactgagagtgctgcccagagccaccggcctgtag

SEQ ID NO: 86360 - DNA, 2211 bp, synthetic construct
  misc_feature 1..2211: note = Description of Artificial Sequence: Synthetic coding sequence
  source 1..2211: mol_type = other DNA
atgggcaaccccgagaacatcgaggacgcctacgtggccgtgatcagacccaagaacaccgccagcctgaacagcagagagtacagagccaagagctacgagatcctgctgcacgaggtgcccatcgagggccagaagaagaagagaaagaaggtgctgctggagaccaagctgcagggcaacagcgagatcacccagggcatcctggactacgtggtggagaccaccaagcccatcagccccgccaaccagggcatcagaggcaagagagtggtgctgatgaagaagttccccctggacggcgagaagatgggcagagaggccagcctgttcatcgtgcccagcgtggtgaaggacaacaccaagtacacctacacccccggctgccccatcttctactgcctgcaggacatcatgagagtgtgcagcgagagcagcacccacttcgccaccctgaccgccagaatgctgatcgccctggacaagtggctggacgagagacacgcccagagccacttcatccccgccctgttcagacccagccccctggagagaatcaagaccaacgtgatcaaccccgcctacgccaccgagagcggccagaccgagaacagcctgcacatgggctacagcgccctggagatcaagagcaagatgctggccctggagaaggccgacacctgcatctacaaccccctgttcggcagcgacctgcagtacaccaacagagtggacaaggtggtgatcaacccctacttcggcctgggcgcccccgactacagcaagatccagatccccaagcaggagaagtggcagagaagcatgagcagcgtgaccgaggacaaggagagacagtgggtggacgacttccccctgcacagaagcgcctgcgagggcgacagcgagctgctgagcagactgctgagcgagagattcagcgtgaaccagctggacagcgaccactgggcccccatccactacgcctgctggtacggcaaggtggaggccaccagaatcctgctggagaagggcaagtgcaaccccaacctgctgaacggccagctgagcagccccctgcacttcgccgccggcggcggccacgccgagatcgtgcagatcctgctgaaccaccccgagaccgacagacacatcaccgaccagcagggcagaagccccctgaacatctgcgaggagaacaagcagaacaactgggaggaggccgccaagctgctgaaggaggccatcaacaagccctacgagaaggtgagaatctacagaatggacggcagctacagaagcgtggagctgaagcacggcaacaacaccaccgtgcagcagatcatggagggcatgagactgagccaggagacccagcagtacttcaccatctggatctgcagcgagaacctgagcctgcagctgaagccctaccacaagcccctgcagcacgtgagagactggcccgagatcctggccgagctgaccaacctggacccccagagagagaccccccagctgttcctgagaagagacgtgagactgcccctggaggtggagaagcagatcgaggaccccctggccatcctgatcctgttcgacgaggccagatacaacctgctgaagggcttctacaccgcccccgacgccaagctgatcaccctggccagcctgctgctgcagatcgtgtacggcaactacgagagcaagaagcacaagcagggcttcctgaacgaggagaacctgaagagcatcgtgcccgtgaccaagctgaagagcaaggccccccactggaccaacagaatcctgcacgagtacaagaacctgagcaccagcgagggcgtgagcaaggagatgcaccacctgcagagaatgttcctgcagaactgctgggagatccccacctacggcgccgccttcttcaccggccagatcttcaccaaggccagccccagcaaccacaaggtgatccccgtgtacgtgggcgtgaacatcaagggcctgcacctgctgaacatggagaccaaggccctgctgatcagcctgaagtacggctgcttcatgtggcagctgggcgacaccgacacctgcttccagatccacagcatggagaacaagatgagcttcatcgtgcacaccaagcaggccggcctggtggtgaagctgctgatgaagctgaacggccagctgatgcccaccgagagaaacagctag

SEQ ID NO: 86361 - DNA, 3624 bp, synthetic construct
  misc_feature 1..3624: note = Description of Artificial Sequence: Synthetic coding sequence
  source 1..3624: mol_type = other DNA
atggacctgcacatgatgaactgcgagctgctggccacctgcagcgccctgggctacctggagggcgacacctaccacaaggagcccgactgcctggagagcgtgaaggacctgatcagatacctgagacacgaggacgagaccagagacgtgagacagcagctgggcgccgcccagatcctgcagagcgacctgctgcccatcctgacccagcaccaccaggacaagcccctgttcgacgccgtgatcagactgatggtgaacctgacccagcccgccctgctgtgcttcggcaacctgcccaaggagcccagcttcagacaccacttcctgcaggtgctgacctacctgcaggcctacaaggaggccttcgccagcgagaaggccttcggcgtgctgagcgagaccctgtacgagctgctgcagctgggctgggaggagagacaggaggaggacaacctgctgatcgagagaatcctgctgctggtgagaaacatcctgcacgtgcccgccgacctggaccaggagaagatcgacgacgacgccagcgcccacgaccagctgctgtgggccatccacctgagcggcctggacgacctgctgctgttcctggccagcagcagcgccgaggagcagtggagcctgcacgtgctggagatcgtgagcctgatgttcagagaccagaaccccgagcagctggccggcgtgggccagggcagactggcccaggagagaagcgccgacttcgccgagctggaggtgctgagacagagagagatggccgagaagaagaccagagccctgcagagaggcaacagacacagcagattcggcggcagctacatcgtgcagggcctgaagagcatcggcgagagagacctgatcttccacaagggcctgcacaacctgagaaactacagcagcgacctgggcaagcagcccaagaaggtgcccaagagaagacaggccgccagagagctgagcatccagagaagaagcgccctgaacgtgagactgttcctgagagacttctgcagcgagttcctggagaactgctacaacagactgatgggcagcgtgaaggaccacctgctgagagagaaggcccagcagcacgacgagacctactacatgtgggccctggccttcttcatggccttcaacagagccgccagcttcagacccggcctggtgagcgagaccctgagcgtgagaaccttccacttcatcgagcagaacctgaccaactactacgagatgatgctgaccgacagaaaggaggccgccagctgggccagaagaatgcacctggccctgaaggcctaccaggagctgctggccaccgtgaacgagatggacatcagccccgacgaggccgtgagagagagcagcagaatcatcaagaacaacatcttctacgtgatggagtacagagagctgttcctggccctgttcagaaagttcgacgagagatgccagcccagaagcttcctgagagacctggtggagaccacccacctgttcctgaagatgctggagagattctgcagaagcagaggcaacctggtggtgcagaacaagcagaagaagagaagaaagaagaagaagaaggtgctggaccaggccatcgtgagcggcaacgtgcccagcagccccgaggaggtggaggccgtgtggcccgccctggccgagcagctgcagtgctgcgcccagaacagcgagctgagcatggacagcgtggtgcccttcgacgccgccagcgaggtgcccgtggaggagcagagagccgaggccatggtgagaatccaggactgcctgctggccggccaggccccccaggccctgaccctgctgagaagcgccagagaggtgtggcccgagggcgacgtgttcggcagccaggacatcagccccgaggaggagatccagctgctgaagcagatcctgagcgcccccctgcccagacagcagggccccgaggagagaggcgccgaggaggaggaggaggaggaggaggaggaggaggaggagctgcaggtggtgcaggtgagcgagaaggagttcaacttcctggactacctgaagagattcgcctgcagcaccgtggtgagagcctacgtgctgctgctgagaagctaccagcagaacagcgcccacaccaaccactgcatcgtgaagatgctgcacagactggcccacgacctgaagatggaggccctgctgttccagctgagcgtgttctgcctgttcaacagactgctgagcgaccccgccgccggcgcctacaaggagctggtgaccttcgccaagtacatcctgggcaagttcttcgccctggccgccgtgaaccagaaggccttcgtggagctgctgttctggaagaacaccgccgtggtgagagagatgaccgagggctacggcagcctggacgacagaagcagcagcagaagagcccccacctggagccccgaggaggaggcccacctgagagagctgtacctggccaacaaggacgtggagggccaggacgtggtggaggccatcctggcccacctgaacaccgtgcccagaaccagaaagcagatcatccaccacctggtgcagatgggcctggccgacagcgtgaaggacttccagagaaagggcacccacatcgtgctgtggaccggcgaccaggagctggagctgcagagactgttcgaggagttcagagacagcgacgacgtgctgggccacatcatgaagaacatcaccgccaagagaagcagagccagaatcgtggacaagctgctggccctgggcctggtggccgagagaagagagctgtacaagaagagacagaagaagctggccagcagcatcctgcccaacggcgccgagagcctgaaggacttctgccaggaggacctggaggaggaggagaacctgcccgaggaggacagcgaggaggaggaggagggcggcagcgaggccgagcaggtgcagggcagcctggtgctgagcaacgagaacctgggccagagcctgcaccaggagggcttcagcatccccctgctgtggctgcagaactgcctgatcagagccgccgacgacagagaggaggacggctgcagccaggccgtgcccctggtgcccctgaccgaggagaacgaggaggccatggagaacgagcagttccagcagctgctgagaaagctgggcgtgagaccccccgccagcggccaggagaccttctggagaatccccgccaagctgagccccacccagctgagaagagccgccgccagcctgagccagcccgaggaggagcagaagctgcagcccgagctgcagcccaaggtgcccggcgagcagggcagcgacgaggagcactgcaaggagcacagagcccaggccctgagagccctgctgctggcccacaagaagaaggccggcctggccagccccgaggaggaggacgccgtgggcaaggagcccctgaaggccgcccccaagaagagacagctgctggacagcgacgaggagcaggaggaggacgagggcagaaacagagcccccgagctgggcgcccccggcatccagaagaagaagagataccagatcgaggacgacgaggacgactag

SEQ ID NO: 86362 - DNA, 1539 bp, synthetic construct
  misc_feature 1..1539: note = Description of Artificial Sequence: Synthetic coding sequence
  source 1..1539: mol_type = other DNA
atgcacacccccgacttcgccggccccgacgacgccagagccgtggacatcatggacatctgcgagagcatcctggagagaaagagacacgacagcgagagaagcacctgcagcatcctggagcagaccgacatggaggccgtggaggccctggtgtgcatgagcagctggggccagagaagccagaagggcgacctgctgagaatcagacccctgacccccgtgagcgacagcggcgacgtgaccaccaccgtgcacatggacgccgccacccccgagctgcccaaggacttccacagcctgagcaccctgtgcatcacccccccccagagccccgacctggtggagcccagcaccagaacccccgtgagcccccaggtgaccgacagcaaggcctgcaccgccaccgacgtgctgcagagcagcgccgtggtggccagagccctgagcggcggcgccgagagaggcctgctgggcctggagcccgtgcccagcagcccctgcagagccaagggcaccagcgtgatcagacacaccggcgagagccccgccgcctgcttccccaccatccagacccccgactgcagactgagcgacagcagagagggcgaggagcagctgctgggccacttcgagaccctgcaggacacccacctgaccgacagcctgctgagcaccaacctggtgagctgccagccctgcctgcacaagagcggcggcctgctgctgaccgacaagggccagcaggccggctggcccggcgccgtgcagacctgcagccccaagaactacgagaacgacctgcccagaaagaccacccccctgatcagcgtgagcgtgcccgccccccccgtgctgtgccagatgatccccgtgaccggccagagcagcatgctgcccgccttcctgaagccccccccccagctgagcgtgggcaccgtgagacccatcctggcccaggccgcccccgccccccagcccgtgttcgtgggccccgccgtgccccagggcgccgtgatgctggtgctgccccagggcgccctgcccccccccgccccctgcgccgccaacgtgatggccgccggcaacaccaagctgctgcccctggcccccgcccccgtgttcatcaccagcagccagaactgcgtgccccaggtggacttcagcagaagaagaaactacgtgtgcagcttccccggctgcagaaagacctacttcaagagcagccacctgaaggcccacctgagaacccacaccggcgagaagcccttcaactgcagctgggacggctgcgacaagaagttcgccagaagcgacgagctgagcagacacagaagaacccacaccggcgagaagaagttcgtgtgccccgtgtgcgacagaagattcatgagaagcgaccacctgaccaagcacgccagaagacacatgaccaccaagaagatccccggctggcaggccgaggtgggcaagctgaacagaatcgccagcgccgagagccccggcagccccctggtgagcatgcccgccagcgcctag

SEQ ID NO: 86363 - DNA, 1488 bp, synthetic construct
  misc_feature 1..1488: note = Description of Artificial Sequence: Synthetic coding sequence
  source 1..1488: mol_type = other DNA
atggacatctgcgagagcatcctggagagaaagagacacgacagcgagagaagcacctgcagcatcctggagcagaccgacatggaggccgtggaggccctggtgtgcatgagcagctggggccagagaagccagaagggcgacctgctgagaatcagacccctgacccccgtgagcgacagcggcgacgtgaccaccaccgtgcacatggacgccgccacccccgagctgcccaaggacttccacagcctgagcaccctgtgcatcacccccccccagagccccgacctggtggagcccagcaccagaacccccgtgagcccccaggtgaccgacagcaaggcctgcaccgccaccgacgtgctgcagagcagcgccgtggtggccagagccctgagcggcggcgccgagagaggcctgctgggcctggagcccgtgcccagcagcccctgcagagccaagggcaccagcgtgatcagacacaccggcgagagccccgccgcctgcttccccaccatccagacccccgactgcagactgagcgacagcagagagggcgaggagcagctgctgggccacttcgagaccctgcaggacacccacctgaccgacagcctgctgagcaccaacctggtgagctgccagccctgcctgcacaagagcggcggcctgctgctgaccgacaagggccagcaggccggctggcccggcgccgtgcagacctgcagccccaagaactacgagaacgacctgcccagaaagaccacccccctgatcagcgtgagcgtgcccgccccccccgtgctgtgccagatgatccccgtgaccggccagagcagcatgctgcccgccttcctgaagccccccccccagctgagcgtgggcaccgtgagacccatcctggcccaggccgcccccgccccccagcccgtgttcgtgggccccgccgtgccccagggcgccgtgatgctggtgctgccccagggcgccctgcccccccccgccccctgcgccgccaacgtgatggccgccggcaacaccaagctgctgcccctggcccccgcccccgtgttcatcaccagcagccagaactgcgtgccccaggtggacttcagcagaagaagaaactacgtgtgcagcttccccggctgcagaaagacctacttcaagagcagccacctgaaggcccacctgagaacccacaccggcgagaagcccttcaactgcagctgggacggctgcgacaagaagttcgccagaagcgacgagctgagcagacacagaagaacccacaccggcgagaagaagttcgtgtgccccgtgtgcgacagaagattcatgagaagcgaccacctgaccaagcacgccagaagacacatgaccaccaagaagatccccggctggcaggccgaggtgggcaagctgaacagaatcgccagcgccgagagccccggcagccccctggtgagcatgcccgccagcgcctag

SEQ ID NO: 86364 - DNA, 1488 bp, synthetic construct; identical to SEQ ID NO: 86363
  misc_feature 1..1488: note = Description of Artificial Sequence: Synthetic coding sequence
  source 1..1488: mol_type = other DNA

SEQ ID NO: 86365 - DNA, 1209 bp, synthetic construct
  misc_feature 1..1209: note = Description of Artificial Sequence: Synthetic coding sequence
  source 1..1209: mol_type = other DNA
atcagcgtgcacctgatgagaaagcacgtgaagaacatcaacaccttcgagaacagaatgctgatgctggacggcatgcccgccgtgagagtgaagaccgagctgctggagagcgagcagggcagccccaacgtgcacaactaccccgacatggaggccgtgcccctgctgctgaacaacgtgaagggcgagccccccgaggacagcctgagcgtggaccacttccagacccagaccgagcccgtggacctgagcatcaacaaggccagaaccagccccaccgccgtgagcagcagccccgtgagcatgaccgccagcgccagcagccccagcagcaccagcaccagcagcagcagcagcagcagactggccagcagccccaccgtgatcaccagcgtgagcagcgccagcagcagcagcaccgtgctgacccccggccccctggtggccagcgccagcggcgtgggcggccagcagttcctgcacatcatccaccccgtgccccccagcagccccatgaacctgcagagcaacaagctgagccacgtgcacagaatccccgtggtggtgcagagcgtgcccgtggtgtacaccgccgtgagaagccccggcaacgtgaacaacaccatcgtggtgcccctgctggaggacggcagaggccacggcaaggcccagatggaccccagaggcctgagccccagacagagcaagagcgacagcgacgacgacgacctgcccaacgtgaccctggacagcgtgaacgagaccggcagcaccgccctgagcatcgccagagccgtgcaggaggtgcaccccagccccgtgagcagagtgagaggcaacagaatgaacaaccagaagttcccctgcagcatcagccccttcagcatcgagagcaccagaagacagagaagaagcgagagccccgacagcagaaagagaagaatccacagatgcgacttcgagggctgcaacaaggtgtacaccaagagcagccacctgaaggcccacagaagaacccacaccggcgagaagccctacaagtgcacctgggagggctgcacctggaagttcgccagaagcgacgagctgaccagacactacagaaagcacaccggcgtgaagcccttcaagtgcgccgactgcgacagaagcttcagcagaagcgaccacctggccctgcacagaagaagacacatgctggtgtag

SEQ ID NO: 86366 - DNA, 1209 bp, synthetic construct
  misc_feature 1..1209: note = Description of Artificial Sequence: Synthetic coding sequence
  source 1..1209: mol_type = other DNA
atgaacatccacatgaagagaaagaccatcaagaacatcaacaccttcgagaacagaatgctgatgctggacggcatgcccgccgtgagagtgaagaccgagctgctggagagcgagcagggcagccccaacgtgcacaactaccccgacatggaggccgtgcccctgctgctgaacaacgtgaagggcgagccccccgaggacagcctgagcgtggaccacttccagacccagaccgagcccgtggacctgagcatcaacaaggccagaaccagccccaccgccgtgagcagcagccccgtgagcatgaccgccagcgccagcagccccagcagcaccagcaccagcagcagcagcagcagcagactggccagcagccccaccgtgatcaccagcgtgagcagcgccagcagcagcagcaccgtgctgacccccggccccctggtggccagcgccagcggcgtgggcggccagcagttcctgcacatcatccaccccgtgccccccagcagccccatgaacctgcagagcaacaagctgagccacgtgcacagaatccccgtggtggtgcagagcgtgcccgtggtgtacaccgccgtgagaagccccggcaacgtgaacaacaccatcgtggtgcccctgctggaggacggcagaggccacggcaaggcccagatggaccccagaggcctgagccccagacagagcaagagcgacagcgacgacgacgacctgcccaacgtgaccctggacagcgtgaacgagaccggcagcaccgccctgagcatcgccagagccgtgcaggaggtgcaccccagccccgtgagcagagtgagaggcaacagaatgaacaaccagaagttcccctgcagcatcagccccttcagcatcgagagcaccagaagacagagaagaagcgagagccccgacagcagaaagagaagaatccacagatgcgacttcgagggctgcaacaaggtgtacaccaagagcagccacctgaaggcccacagaagaacccacaccggcgagaagccctacaagtgcacctgggagggctgcacctggaagttcgccagaagcgacgagctgaccagacactacagaaagcacaccggcgtgaagcccttcaagtgcgccgactgcgacagaagcttcagcagaagcgaccacctggccctgcacagaagaagacacatgctggtgtag

SEQ ID NO: 86367 - DNA, 1209 bp, synthetic construct; identical to SEQ ID NO: 86366
  misc_feature 1..1209: note = Description of Artificial Sequence: Synthetic coding sequence
  source 1..1209: mol_type = other DNA

SEQ ID NO: 86368 - DNA, 867 bp, synthetic construct
  misc_feature 1..867: note = Description of Artificial Sequence: Synthetic coding sequence
  source 1..867: mol_type = other DNA
atggccgccgccgcctacgtggaccacttcgccgccgagtgcctggtgagcatgagcagcagagccgtggtgcacggccccagagagggccccgagagcagacccgagggcgccgccgtggccgccacccccaccctgcccagagtggaggagagaagagacggcaaggacagcgccagcctgttcgtggtggccagaatcctggccgacctgaaccagcaggcccccgcccccgcccccgccgagagaagagagggcgccgccgccagaaaggccagaaccccctgcagactgcccccccccgcccccgagcccaccagccccggcgccgagggcgccgccgccgccccccccagccccgcctggagcgagcccgagcccgaggccggcctggagcccgagagagagcccggccccgccggcagcggcgagcccggcctgagacagagagtgagaagaggcagaagcagagccgacctggagagcccccagagaaagcacaagtgccactacgccggctgcgagaaggtgtacggcaagagcagccacctgaaggcccacctgagaacccacaccggcgagagacccttcgcctgcagctggcaggactgcaacaagaagttcgccagaagcgacgagctggccagacactacagaacccacaccggcgagaagaagttcagctgccccatctgcgagaagagattcatgagaagcgaccacctgaccaagcacgccagaagacacgccaacttccaccccggcatgctgcagagaagaggcggcggcagcagaaccggcagcctgagcgactacagcagaagcgacgccagcagccccaccatcagccccgccagcagcccctag

SEQ ID NO: 86369 - DNA, 1251 bp, synthetic construct
  misc_feature 1..1251: note = Description of Artificial Sequence: Synthetic coding sequence
  source 1..1251: mol_type = other DNA
atggtggaccacctgctgcccgtggacgagaacttcagcagccccaagtgccccgtgggctacctgggcgacagactggtgggcagaagagcctaccacatgctgcccagccccgtgagcgaggacgacagcgacgccagcagcccctgcagctgcagcagccccgacagccaggccctgtgcagctgctacggcggcggcctgggcaccgagagccaggacagcatcctggacttcctgctgagccaggccaccctgggcagcggcggcggcagcggcagcagcatcggcgccagcagcggccccgtggcctggggcccctggagaagagccgccgcccccgtgaagggcgagcacttctgcctgcccgagttccccctgggcgaccccgacgacgtgcccagacccttccagcccaccctggaggagatcgaggagttcctggaggagaacatggagcccggcgtgaaggaggtgcccgagggcaacagcaaggacctggacgcctgcagccagctgagcgccggcccccacaagagccacctgcaccccggcagcagcggcagagagagatgcagccccccccccggcggcgccagcgccggcggcgcccagggccccggcggcggccccacccccgacggccccatccccgtgctgctgcagatccagcccgtgcccgtgaagcaggagagcggcaccggccccgccagccccggccaggcccccgagaacgtgaaggtggcccagctgctggtgaacatccagggccagaccttcgccctggtgccccaggtggtgcccagcagcaacctgaacctgcccagcaagttcgtgagaatcgcccccgtgcccatcgccgccaagcccgtgggcagcggccccctgggccccggccccgccggcctgctgatgggccagaagttccccaagaaccccgccgccgagctgatcaagatgcacaagtgcaccttccccggctgcagcaagatgtacaccaagagcagccacctgaaggcccacctgagaagacacaccggcgagaagcccttcgcctgcacctggcccggctgcggctggagattcagcagaagcgacgagctgagcagacacagaagaagccacagcggcgtgaagccctaccagtgccccgtgtgcgagaagaagttcgccagaagcgaccacctgagcaagcacatcaaggtgcacagattccccagaagcagcagaagcgtgagaagcgtgaactag

SEQ ID NO: 86370 - DNA, 1068 bp, synthetic construct
  misc_feature 1..1068: note = Description of Artificial Sequence: Synthetic coding sequence
  source 1..1068: mol_type = other DNA
atggccctgagcgagcccatcctgcccagcttcagcaccttcgccagcccctgcagagagagaggcctgcaggagagatggcccagagccgagcccgagagcggcggcaccgacgacgacctgaacagcgtgctggacttcatcctgagcatgggcctggacggcctgggcgccgaggccgcccccgagccccccccccccccccccccccccgccttctactaccccgagcccggcgccccccccccctacagcgcccccgccggcggcctggtgagcgagctgctgagacccgagctggacgcccccctgggccccgccctgcacggcagattcctgctggccccccccggcagactggtgaaggccgagccccccgaggccgacggcggcggcggctacggctgcgcccccggcctgaccagaggccccagaggcctgaagagagagggcgcccccggccccgccgccagctgcatgagaggccccggcggcagacccccccccccccccgacaccccccccctgagccccgacggccccgccagactgcccgcccccggccccagagccagcttccccccccccttcggcggccccggcttcggcgcccccggccccggcctgcactacgccccccccgccccccccgccttcggcctgttcgacgacgccgccgccgccgccgccgccctgggcctggccccccccgccgccagaggcctgctgaccccccccgccagccccctggagctgctggaggccaagcccaagagaggcagaagaagctggcccagaaagagaaccgccacccacacctgcagctacgccggctgcggcaagacctacaccaagagcagccacctgaaggcccacctgagaacccacaccggcgagaagccctaccactgcaactgggacggctgcggctggaagttcgccagaagcgacgagctgaccagacactacagaaagcacaccggccacagacccttccagtgccacctgtgcgacagagccttcagcagaagcgaccacctggccctgcacatgaagagacacatgtag

SEQ ID NO: 86371 - DNA, 234 bp, synthetic construct
  misc_feature 1..234: note = Description of Artificial Sequence: Synthetic coding sequence
  source 1..234: mol_type = other DNA
atggacgtgctgcccatgtgcagcatcttccaggagctgcagatcgtgcacgagaccggctacttcagcgccctgcccagcctggaggagtactggcagcagacctgcctggagctggagagatacctgcagagcgagccctgctacgtgagcgccagcgagatcaagttcgacagccaggagagcgtggaccagaaccactggctgggcagaaagagaagaaaccccaactag

SEQ ID NO: 86372 - DNA, 846 bp, synthetic construct
  misc_feature 1..846: note = Description of Artificial Sequence: Synthetic coding sequence
  source 1..846: mol_type = other DNA
atggacgtgctgcccatgtgcagcatcttccaggagctgcagatcgtgcacgagaccggctacttcagcgccctgcccagcctggaggagtactggcagcagacctgcctggagctggagagatacctgcagagcgagccctgctacgtgagcgccagcgagatcaagttcgacagccaggaggacctgtggaccaagatcatcctggccagagagaagaaggaggagagcgagctgaagatcagcagcagcccccccgaggacaccctgatcagccccagcttctgctacaacctggagaccaacagcctgaacagcgacgtgagcagcgagagcagcgacagcagcgaggagctgagccccaccgccaagttcaccagcgaccccatcggcgaggtgctggtgagcagcggcaagctgagcagcagcgtgaccagcaccccccccagcagccccgagctgagcagagagcccagccagctgtggggctgcgtgcccggcgagctgcccagccccggcaaggtgagaagcggcaccagcggcaagcccggcgacaagggcaacggcgacgccagccccgacggcagaagaagagtgcacagatgccacttcaacggctgcagaaaggtgtacaccaagagcagccacctgaaggcccaccagagaacccacaccggccagtgccccagaggccccagaagagccgccgccggcggcagacactgcatcgcccccgccctggagggcgccggccccggctgcaccggctgcggccagggcagacagatcctgaccagcagcgacgtgttccaccagagcatcagaagcttctggagcagcgagtag

SEQ ID NO: 86373 - DNA, 852 bp, synthetic construct
  misc_feature 1..852: note = Description of Artificial Sequence: Synthetic coding sequence
  source 1..852: mol_type = other DNA
atggacgtgctgcccatgtgcagcatcttccaggagctgcagatcgtgcacgagaccggctacttcagcgccctgcccagcctggaggagtactggcagcagacctgcctggagctggagagatacctgcagagcgagccctgctacgtgagcgccagcgagatcaagttcgacagccaggaggacctgtggaccaagatcatcctggccagagagaagaaggaggagagcgagctgaagatcagcagcagcccccccgaggacaccctgatcagccccagcttctgctacaacctggagaccaacagcctgaacagcgacgtgagcagcgagagcagcgacagcagcgaggagctgagccccaccgccaagttcaccagcgaccccatcggcgaggtgctggtgagcagcggcaagctgagcagcagcgtgaccagcaccccccccagcagccccgagctgagcagagagcccagccagctgtggggctgcgtgcccggcgagctgcccagccccggcaaggtgagaagcggcaccagcggcaagcccggcgacaagggcaacggcgacgccagccccgacggcagaagaagagtgcacagatgccacttcaacggctgcagaaaggtgtacaccaagagcagccacctgaaggcccaccagagaacccacaccggcgagaagccctacagatgcagctgggagggctgcgagtggagattcgccagaagcgacgagctgaccagacacttcagaaagcacaccggcgccaagcccttcaagtgcagccactgcgacagatgcttcagcagaagcgaccacctggccctgcacatgaagagacacctgtag

SEQ ID NO: 86374 - DNA, 714 bp, synthetic construct
  misc_feature 1..714: note = Description of Artificial Sequence: Synthetic coding sequence
  source 1..714: mol_type = other DNA
atggacgtgctgcccatgtgcagcatcttccaggagctgcagatcgtgcacgagaccggctacttcagcgccctgcccagcctggaggagtactggcagcagacctgcctggagctggagagatacctgcagagcgagccctgctacgtgagcgccagcgagatcaagttcgacagccaggaggacctgtggaccaagatcatcctggccagagagaagaaggaggagagcgagctgaagatcagcagcagcccccccgaggacaccctgatcagccccagcttctgctacaacctggagaccaacagcctgaacagcgacgtgagcagcgagagcagcgacagcagcgaggagctgagccccaccgccaagttcaccagcgaccccatcggcgaggtgctggtgagcagcggcaagctgagcagcagcgtgaccagcaccccccccagcagccccgagctgagcagagagcccagccagctgtggggctgcgtgcccggcgagctgcccagccccggcaaggtgagaagcggcaccagcggcaagcccggcgacaagggcaacggcgacgccagccccgacggcagaagaagagtgcacagatgccacttcaacggctgcagaaaggtgtacaccaagagcagccacctgaaggcccaccagagaacccacaccggcgtgttccccggcctgaccacctggccctgcacctag

SEQ ID NO: 86375 - DNA, 909 bp, synthetic construct
  misc_feature 1..909: note = Description of Artificial Sequence: Synthetic coding sequence
  source 1..909: mol_type = other DNA
atggacgtgctggccagctacagcatcttccaggagctgcagctggtgcacgacaccggctacttcagcgccctgcccagcctggaggagacctggcagcagacctgcctggagctggagagatacctgcagaccgagcccagaagaatcagcgagaccttcggcgaggacctggactgcttcctgcacgccagcccccccccctgcatcgaggagagcttcagaagactggaccccctgctgctgcccgtggaggccgccatctgcgagaagagcagcgccgtggacatcctgctgagcagagacaagctgctgagcgagacctgcctgagcctgcagcccgccagcagcagcctggacagctacaccgccgtgaaccaggcccagctgaacgccgtgaccagcctgaccccccccagcagccccgagctgagcagacacctggtgaagaccagccagaccctgagcgccgtggacggcaccgtgaccctgaagctggtggccaagaaggccgccctgagcagcgtgaaggtgggcggcgtggccaccgccgccgccgccgtgaccgccgccggcgccgtgaagagcggccagagcgacagcgaccagggcggcctgggcgccgaggcctgccccgagaacaagaagagagtgcacagatgccagttcaacggctgcagaaaggtgtacaccaagagcagccacctgaaggcccaccagagaacccacaccggcgagaagccctacaagtgcagctgggagggctgcgagtggagattcgccagaagcgacgagctgaccagacactacagaaagcacaccggcgccaagcccttcaagtgcaaccactgcgacagatgcttcagcagaagcgaccacctggccctgcacatgaagagacacatctag

SEQ ID NO: 86376 - DNA, 825 bp, synthetic construct
  misc_feature 1..825: note = Description of Artificial Sequence: Synthetic coding sequence
  source 1..825: mol_type = other DNA
atgttccccagctggcccacctgcctggagctggagagatacctgcagaccgagcccagaagaatcagcgagaccttcggcgaggacctggactgcttcctgcacgccagcccccccccctgcatcgaggagagcttcagaagactggaccccctgctgctgcccgtggaggccgccatctgcgagaagagcagcgccgtggacatcctgctgagcagagacaagctgctgagcgagacctgcctgagcctgcagcccgccagcagcagcctggacagctacaccgccgtgaaccaggcccagctgaacgccgtgaccagcctgaccccccccagcagccccgagctgagcagacacctggtgaagaccagccagaccctgagcgccgtggacggcaccgtgaccctgaagctggtggccaagaaggccgccctgagcagcgtgaaggtgggcggcgtggccaccgccgccgccgccgtgaccgccgccggcgccgtgaagagcggccagagcgacagcgaccagggcggcctgggcgccgaggcctgccccgagaacaagaagagagtgcacagatgccagttcaacggctgcagaaaggtgtacaccaagagcagccacctgaaggcccaccagagaacccacaccggcgagaagccctacaagtgcagctgggagggctgcgagtggagattcgccagaagcgacgagctgaccagacactacagaaagcacaccggcgccaagcccttcaagtgcaaccactgcgacagatgcttcagcagaagcgaccacctggccctgcacatgaagagacacatctag

SEQ ID NO: 86377 - DNA, 810 bp, synthetic construct
  misc_feature 1..810: note = Description of Artificial Sequence: Synthetic coding sequence
  source 1..810: mol_type = other DNA
atgacctgcctggagctggagagatacctgcagaccgagcccagaagaatcagcgagaccttcggcgaggacctggactgcttcctgcacgccagcccccccccctgcatcgaggagagcttcagaagactggaccccctgctgctgcccgtggaggccgccatctgcgagaagagcagcgccgtggacatcctgctgagcagagacaagctgctgagcgagacctgcctgagcctgcagcccgccagcagcagcctggacagctacaccgccgtgaaccaggcccagctgaacgccgtgaccagcctgaccccccccagcagccccgagctgagcagacacctggtgaagaccagccagaccctgagcgccgtggacggcaccgtgaccctgaagctggtggccaagaaggccgccctgagcagcgtgaaggtgggcggcgtggccaccgccgccgccgccgtgaccgccgccggcgccgtgaagagcggccagagcgacagcgaccagggcggcctgggcgccgaggcctgccccgagaacaagaagagagtgcacagatgccagttcaacggctgcagaaaggtgtacaccaagagcagccacctgaaggcccaccagagaacccacaccggcgagaagccctacaagtgcagctgggagggctgcgagtggagattcgccagaagcgacgagctgaccagacactacagaaagcacaccggcgccaagcccttcaagtgcaaccactgcgacagatgcttcagcagaagcgaccacctggccctgcacatgaagagacacatctag

SEQ ID NO: 86378 - DNA, 339 bp, synthetic construct
  misc_feature 1..339: note = Description of Artificial Sequence: Synthetic coding sequence
  source 1..339: mol_type = other DNA
atggacgtgctggccagctacagcatcttccaggagctgcagctggtgcacgacaccggctacttcagcgccctgcccagcctggaggagacctggcagcagacctgcctggagctggagagatacctgcagaccgagcccagaagaatcagcgagaccttcggcgaggacctggactgcttcctgcacgccagcccccccccctgcatcgaggagagcttcagaagactggaccccctgctgctgcccgtggaggccgccatctgcgagaagagcagcgccgtggacatcctgctgagcagagacaagctgctgagcgagacctgcctgagcctgtag

SEQ ID NO: 86379 - DNA, 183 bp, synthetic construct
  misc_feature 1..183: note = Description of Artificial Sequence: Synthetic coding sequence
  source 1..183: mol_type = other DNA
atggacgtgctggccagctacagcatcttccaggagctgcagctggtgcacgacaccggctacttcagcgccctgcccagcctggaggagacctggcagcagacctgcctggagctggagagatacctgcagaccgagcccagaagaatcagcgagaccttcggcgaggacctggactgctag

SEQ ID NO: 86380 - DNA, 339 bp, synthetic construct
  misc_feature 1..339: note = Description of Artificial Sequence: Synthetic coding sequence
  source 1..339: mol_type = other DNA
atggacgtgctggccagctacagcatcttccaggagctgcagctggtgcacgacaccggctacttcagcgccctgcccagcctggaggagacctggcagcagacctgcctggagctggagagatacctgcagaccgagcccagaagaatcagcgagaccttcggcgagaagccctacaagtgcagctgggagggctgcgagtggagattcgccagaagcgacgagctgaccagacactacagaaagcacaccggcgccaagcccttcaagtgcaaccactgcgacagatgcttcagcagaagcgaccacctggccctgcacatgaagagacacatctag

SEQ ID NO: 86381 - DNA, 774 bp, synthetic construct
  misc_feature 1..774: note = Description of Artificial Sequence: Synthetic coding sequence
  source 1..774: mol_type = other DNA
atggtggacatggacaagctgatcaacaacctggaggtgcagctgaacagcgagggcggcagcatgcaggtgttcaagcaggtgaccgccagcgtgagaaacagagacccccccgagatcgagtacagaagcaacatgaccagccccaccctgctggacgccaaccccatggagaaccccgccctgttcaacgacatcaagatcgagccccccgaggagctgctggccagcgacttcagcctgccccaggtggagcccgtggacctgagcttccacaagcccaaggcccccctgcagcccgccagcatgctgcaggcccccatcagaccccccaagccccagagcagcccccagaccctggtggtgagcaccagcaccagcgacatgagcaccagcgccaacatccccaccgtgctgacccccggcagcgtgctgaccagcagccagagcaccggcagccagcagatcctgcacgtgatccacaccatccccagcgtgagcctgcccaacaagatgggcggcctgaagaccatccccgtggtggtgcagagcctgcccatggtgtacaccaccctgcccgccgacggcggccccgccgccatcaccgtgcccctgatcggcggcgacggcaagaacgccggcagcgtgaaggtggaccccaccagcatgagccccctggagatccccagcgacagcgaggagagcaccatcgagagcggcagcagcgccctgcagagcctgcagggcctgcagcaggagagagaggccctgtag

SEQ ID NO: 86382 - DNA, 1080 bp, synthetic construct
  misc_feature 1..1080: note = Description of Artificial Sequence: Synthetic coding sequence
  source 1..1080: mol_type = other DNA
atggtggacatggacaagctgatcaacaacctggaggtgcagctgaacagcgagggcggcagcatgcaggtgttcaagcaggtgaccgccagcgtgagaaacagagacccccccgagatcgagtacagaagcaacatgaccagccccaccctgctggacgccaaccccatggagaaccccgccctgttcaacgacatcaagatcgagccccccgaggagctgctggccagcgacttcagcctgccccaggtggagcccgtggacctgagcttccacaagcccaaggcccccctgcagcccgccagcatgctgcaggcccccatcagaccccccaagccccagagcagcccccagaccctggtggtgagcaccagcaccagcgacatgagcaccagcgccaacatccccaccgtgctgacccccggcagcgtgctgaccagcagccagagcaccggcagccagcagatcctgcacgtgatccacaccatccccagcgtgagcctgcccaacaagatgggcggcctgaagaccatccccgtggtggtgcagagcctgcccatggtgtacaccaccctgcccgccgacggcggccccgccgccatcaccgtgcccctgatcggcggcgacggcaagaacgccggcagcgtgaaggtggaccccaccagcatgagccccctggagatccccagcgacagcgaggagagcaccatcgagagcggcagcagcgccctgcagagcctgcagggcctgcagcaggagcccgccgccatggcccagatgcagggcgaggagagcctggacctgaagagaagaagaatccaccagtgcgacttcgccggctgcagcaaggtgtacaccaagagcagccacctgaaggcccacagaagaatccacaccggcgagaagccctacaagtgcacctgggacggctgcagctggaagttcgccagaagcgacgagctgaccagacacttcagaaagcacaccggcatcaagcccttcagatgcaccgactgcaacagaagcttcagcagaagcgaccacctgagcctgcacagaagaagacacgacaccatgtag

SEQ ID NO: 86383 - DNA, 771 bp, synthetic construct
  misc_feature 1..771: note = Description of Artificial Sequence: Synthetic coding sequence
  source 1..771: mol_type = other DNA
atgcagcccgccaaggaggtgaccaaggccagcgacggcagcctgctgggcgacctgggccacacccccctgagcaagaaggagggcatcaagtggcagagacccagactgagcagacaggccctgatgagatgctgcctggtgaagtggatcctgagcagcaccgccccccagggcagcgacagcagcgacagcgagctggagctgagcaccgtgagacaccagcccgagggcctggaccagctgcaggcccagaccaagttcaccaagaaggagctgcagagcctgtacagaggcttcaagaacgagtgccccaccggcctggtggacgaggacaccttcaagctgatctacgcccagttcttcccccagggcgacgccaccacctacgcccacttcctgttcaacgccttcgacgccgacggcaacggcgccatccacttcgaggacttcgtggtgggcctgagcatcctgctgagaggcaccgtgcacgagaagctgaagtgggccttcaacctgtacgacatcaacaaggacggctacatcaccaaggaggagatgctggccatcatgaagagcatctacgacatgatgggcagacacacctaccccatcctgagagaggacgcccccgccgagcacgtggagagattcttcgagaagatggacagaaaccaggacggcgtggtgaccatcgaggagttcctggaggcctgccagaaggacgagaacatcatgagcagcatgcagctgttcgagaacgtgatctag

SEQ ID NO: 86384 - DNA, 705 bp, synthetic construct
  misc_feature 1..705: note = Description of Artificial Sequence: Synthetic coding sequence
  source 1..705: mol_type = other DNA
atgcagcccagaaaggaggtgaccaaggccagcgacggcagcctgctgggcgacctgggccacacccccctgagcaagaaggagggcatcaagtggcagagacccagactgagcagacaggccctgatgagatgctgcctggtgaagtggatcctgagcagcaccgccccccagggcagcgacagcagcgacagcgagctggagctgagcaccgtgagacaccagcccgagggcctggaccagctgcaggcccagaccaagttcaccaagaaggagctgcagagcctgtacagaggcttcaagaacggcgacgccaccacctacgcccacttcctgttcaacgccttcgacgccgacggcaacggcgccatccacttcgaggacttcgtggtgggcctgagcatcctgctgagaggcaccgtgcacgagaagctgaagtgggccttcaacctgtacgacatcaacaaggacggctacatcaccaaggaggagatgctggccatcatgaagagcatctacgacatgatgggcagacacacctaccccatcctgagagaggacgcccccgccgagcacgtggagagattcttcgagaagatggacagaaaccaggacggcgtggtgaccatcgaggagttcctggaggcctgccagaaggacgagaacatcatgagcagcatgcagctgttcgagaacgtgatctag

SEQ ID NO: 86385 - DNA, 693 bp, synthetic construct
  misc_feature 1..693: note = Description of Artificial Sequence: Synthetic coding sequence
  source 1..693: mol_type = other DNA
atgggcatccagggcatggagctgtgcgccatggccgtggtggtgctgctgttcatcgccgtgctgaagcagttcggcatcctggagcccatcagcatggaggacagcagcgacagcgagctggagctgagcaccgtgagacaccagcccgagggcctggaccagctgcaggcccagaccaagttcaccaagaaggagctgcagagcctgtacagaggcttcaagaacgagtgccccaccggcctggtggacgaggacaccttcaagctgatctacgcccagttcttcccccagggcgacgccaccacctacgcccacttcctgttcaacgccttcgacgccgacggcaacggcgccatccacttcgaggacttcgtggtgggcctgagcatcctgctgagaggcaccgtgcacgagaagctgaagtgggccttcaacctgtacgacatcaacaaggacggctacatcaccaaggaggagatgctggccatcatgaagagcatctacgacatgatgggcagacacacctaccccatcctgagagaggacgcccccgccgagcacgtggagagattcttcgagaagatggacagaaaccaggacggcgtggtgaccatcgaggagttcctggaggcctgccagaaggacgagaacatcatgagcagcatgcagctgttcgagaacgtgatctag

SEQ ID NO: 86386 - DNA, 567 bp, synthetic construct
  misc_feature 1..567: note = Description of Artificial Sequence: Synthetic coding sequence
  source 1..567: mol_type = other DNA
atggccaccgtgagacacagacccgaggccctggagctgctggaggcccagagcaagttcaccaagaaggagctgcagatcctgtacagaggcttcaagaacgagtgccccagcggcgtggtgaacgaggagaccttcaaggagatctacagccagttcttcccccagggcgacagcaccacctacgcccacttcctgttcaacgccttcgacaccgaccacaacggcgccgtgagcttcgaggacttcatcaagggcctgagcatcctgctgagaggcaccgtgcaggagaagctgaactgggccttcaacctgtacgacatcaacaaggacggctacatcaccaaggaggagatgctggacatcatgaaggccatctacgacatgatgggcaagtgcacctaccccgtgctgaaggaggacgcccccagacagcacgtggagaccttcttccagaagatggacaagaacaaggacggcgtggtgaccatcgacgagttcatcgagagctgccagaaggacgagaacatcatgagaagcatgcagctgttcgagaacgtgatctag

SEQ ID NO: 86387 - DNA, 678 bp, synthetic construct
  misc_feature 1..678: note = Description of Artificial Sequence: Synthetic coding sequence
  source 1..678: mol_type = other DNA
atgagcggctgcagaaagagatgcaagagagagatcctgaagttcgcccagtacctgctgagactgctgaccggcagcctgcacaccgacagcgtggaggacgagctggagatggccaccgtgagacacagacccgaggccctggagctgctggaggcccagagcaagttcaccaagaaggagctgcagatcctgtacagaggcttcaagaacgagtgccccagcggcgtggtgaacgaggagaccttcaaggagatctacagccagttcttcccccagggcgacagcaccacctacgcccacttcctgttcaacgccttcgacaccgaccacaacggcgccgtgagcttcgaggacttcatcaagggcctgagcatcctgctgagaggcaccgtgcaggagaagctgaactgggccttcaacctgtacgacatcaacaaggacggctacatcaccaaggaggagatgctggacatcatgaaggccatctacgacatgatgggcaagtgcacctaccccgtgctgaaggaggacgcccccagacagcacgtggagaccttcttccagaagatggacaagaacaaggacggcgtggtgaccatcgacgagttcatcgagagctgccagaaggacgagaacatcatgagaagcatgcagctgttcgagaacgtgatctag

SEQ ID NO: 86388 - DNA, 690 bp, synthetic construct
  misc_feature 1..690: note = Description of Artificial Sequence: Synthetic coding sequence
  source 1..690: mol_type = other DNA
atgaacctggagggcctggagatgatcgccgtgctgatcgtgatcgtgctgttcgtgaagctgctggagcagttcggcctgatcgaggccggcctggaggacagcgtggaggacgagctggagatggccaccgtgagacacagacccgaggccctggagctgctggaggcccagagcaagttcaccaagaaggagctgcagatcctgtacagaggcttcaagaacgagtgccccagcggcgtggtgaacgaggagaccttcaaggagatctacagccagttcttcccccagggcgacagcaccacctacgcccacttcctgttcaacgccttcgacaccgaccacaacggcgccgtgagcttcgaggacttcatcaagggcctgagcatcctgctgagaggcaccgtgcaggagaagctgaactgggccttcaacctgtacgacatcaacaaggacggctacatcaccaaggaggagatgctggacatcatgaaggccatctacgacatgatgggcaagtgcacctaccccgtgctgaaggaggacgcccccagacagcacgtggagaccttcttccagaagatggacaagaacaaggacggcgtggtgaccatcgacgagttcatcgagagctgccagaaggacgagaacatcatgagaagcatgcagctgttcgagaacgtgatctag

SEQ ID NO: 86389 - DNA, 753 bp, synthetic construct
  misc_feature 1..753: note = Description of Artificial Sequence: Synthetic coding sequence
  source 1..753: mol_type = other DNA
atgaacgtgagaagagtggagagcatcagcgcccagctggaggaggccagcagcaccggcggcttcctgtacgcccagaacagcaccaagagaagcatcaaggagagactgatgaagctgctgccctgcagcgccgccaagaccagcagccccgccatccagaacagcgtggaggacgagctggagatggccaccgtgagacacagacccgaggccctggagctgctggaggcccagagcaagttcaccaagaaggagctgcagatcctgtacagaggcttcaagaacgagtgccccagcggcgtggtgaacgaggagaccttcaaggagatctacagccagttcttcccccagggcgacagcaccacctacgcccacttcctgttcaacgccttcgacaccgaccacaacggcgccgtgagcttcgaggacttcatcaagggcctgagcatcctgctgagaggcaccgtgcaggagaagctgaactgggccttcaacctgtacgacatcaacaaggacggctacatcaccaaggaggagatgctggacatcatgaaggccatctacgacatgatgggcaagtgcacctaccccgtgctgaaggaggacgcccccagacagcacgtggagaccttcttccagaagatggacaagaacaaggacggcgtggtgaccatcgacgagttcatcgagagctgccagaaggacgagaacatcatgagaagcatgcagctgttcgagaacgtgatctag

SEQ ID NO: 86390 - DNA, 567 bp, synthetic construct; identical to SEQ ID NO: 86386
  misc_feature 1..567: note = Description of Artificial Sequence: Synthetic coding sequence
  source 1..567: mol_type = other DNA

SEQ ID NO: 86391 - DNA, 651 bp, synthetic construct
  misc_feature 1..651: note = Description of Artificial Sequence: Synthetic coding sequence
  source 1..651: mol_type = other DNA
atgaacgtgagaagagtggagagcatcagcgcccagctggaggaggccagcagcaccggcgacagcgtggaggacgagctggagatggccaccgtgagacacagacccgaggccctggagctgctggaggcccagagcaagttcaccaagaaggagctgcagatcctgtacagaggcttcaagaacgagtgccccagcggcgtggtgaacgaggagaccttcaaggagatctacagccagttcttcccccagggcgacagcaccacctacgcccacttcctgttcaacgccttcgacaccgaccacaacggcgccgtgagcttcgaggacttcatcaagggcctgagcatcctgctgagaggcaccgtgcaggagaagctgaactgggccttcaacctgtacgacatcaacaaggacggctacatcaccaaggaggagatgctggacatcatgaaggccatctacgacatgatgggcaagtgcacctaccccgtgctgaaggaggacgcccccagacagcacgtggagaccttcttccagaagatggacaagaacaaggacggcgtggtgaccatcgacgagttcatcgagagctgccagaaggacgagaacatcatgagaagcatgcagctgttcgagaacgtgatctag

SEQ ID NO: 86392 - DNA, 567 bp, synthetic construct; identical to SEQ ID NO: 86386
  misc_feature 1..567: note = Description of Artificial Sequence: Synthetic coding sequence
  source 1..567: mol_type = other DNA

SEQ ID NO: 86393 - DNA, 549 bp, synthetic construct
  misc_feature 1..549: note = Description of Artificial Sequence: Synthetic coding sequence
  source 1..549: mol_type = other DNA
tgaggcatgaacgccggcttcgaggactgcctggtgttcgacgagctgatggacaagttcagcaacgacctgagcctgtgcctgcccgtgttcagcagactgagaatccccgacgaccacgccatcagcgacctgagcatgtacaactacatcgagatgagagcccacgtgaacagcagctggttcatcttccagaagaacatggagagattcctgcacgccatcatgcccagcaccttcatccccctgtacaccatggtgaccttcagcagaatcagataccacgaggccgtgcagagatggcactggcagaagaaggtgatcaacaagggcctgttcttcctgggcagcctgatcgccatcagcagcacctacctgctgatccactacatgagccccagaagcttcctgagactgagaagaccctggaactggatcgcccacttcagaaacaccacctgcttccccgccaaggccgtggacagcctggagcagatcagcaacctgatcagcagactgctgagccacagcgagatcctgcagacctag

SEQ ID NO: 86394 - DNA, 1359 bp, synthetic construct
  misc_feature 1..1359: note = Description of Artificial Sequence: Synthetic coding sequence
  source 1..1359: mol_type = other DNA
atggacagcagcgtgatccagagaaagaaggtggccgtgatcggcggcggcctggtgggcagcctgcaggcctgcttcctggccaagagaaacttccagatcgacgtgtacgaggccagagaggacaccagagtggccaccttcaccagaggcagaagcatcaacctggccctgagccacagaggcagacaggccctgaaggccgtgggcctggaggaccagatcgtgagccagggcatccccatgagagccagaatgatccacagcctgagcggcaagaagagcgccatcccctacggcaccaagagccagtacatcctgagcgtgagcagagagaacctgaacaaggacctgctgaccgccgccgagaagtaccccaacgtgaagatgcacttcaaccacagactgctgaagtgcaaccccgaggagggcatgatcaccgtgctgggcagcgacaaggtgcccaaggacgtgacctgcgacctgatcgtgggctgcgacggcgcctacagcaccgtgagaagccacctgatgaagaagcccagattcgactacagccagcagtacatcccccacggctacatggagctgaccatcccccccaagaacggcgactacgccatggagcccaactacctgcacatctggcccagaaacaccttcatgatgatcgccctgcccaacatgaacaagagcttcacctgcaccctgttcatgcccttcgaggagttcgagaagctgctgaccagcaacgacgtggtggacttcttccagaagtacttccccgacgccatccccctgatcggcgagaagctgctggtgcaggacttcttcctgctgcccgcccagcccatgatcagcgtgaagtgcagcagcttccacttcaagagccactgcgtgctgctgggcgacgccgcccacgccatcgtgcccttcttcggccagggcatgaacgccggcttcgaggactgcctggtgttcgacgagctgatggacaagttcagcaacgacctgagcctgtgcctgcccgtgttcagcagactgagaatccccgacgaccacgccatcagcgacctgagcatgtacaactacatcgaggtgaccttcagcagaatcagataccacgaggccgtgcagagatggcactggcagaagaaggtgatcaacaagggcctgttcttcctgggcagcctgatcgccatcagcagcacctacctgctgatccactacatgagccccagaagcttcctgagactgagaagaccctggaactggatcgcccacttcagaaacaccacctgcttccccgccaaggccgtggacagcctggagcagatcagcaacctgatcagcagatag

SEQ ID NO: 86395 - DNA, 1422 bp, synthetic construct
  misc_feature 1..1422: note = Description of Artificial Sequence: Synthetic coding sequence
  source 1..1422: mol_type = other DNA
atggacagcagcgtgatccagagaaagaaggtggccgtgatcggcggcggcctggtgggcagcctgcaggcctgcttcctggccaagagaaacttccagatcgacgtgtacgaggccagagaggacaccagagtggccaccttcaccagaggcagaagcatcaacctggccctgagccacagaggcagacaggccctgaaggccgtgggcctggaggaccagatcgtgagccagggcatccccatgagagccagaatgatccacagcctgagcggcaagaagagcgccatcccctacggcaccaagagccagtacatcctgagcgtgagcagagagaacctgaacaaggacctgctgaccgccgccgagaagtaccccaacgtgaagatgcacttcaaccacagactgctgaagtgcaaccccgaggagggcatgatcaccgtgctgggcagcgacaaggtgcccaaggacgtgacctgcgacctgatcgtgggctgcgacggcgcctacagcaccgtgagaagccacctgatgaagaagcccagattcgactacagccagcagtacatcccccacggctacatggagctgaccatcccccccaagaacggcgactacgccatggagcccaactacctgcacatctggcccagaaacaccttcatgatgatcgccctgcccaacatgaacaagagcttcacctgcaccctgttcatgcccttcgaggagttcgagaagctgctgaccagcaacgacgtggtggacttcttccagaagtacttccccgacgccatccccctgatcggcgagaagctgctggtgcaggacttcttcctgctgcccgcccagcccatgatcagcgtgaagtgcagcagcttccacttcaagagccactgcgtgctgctgggcgacgccgcccacgccatcgtgcccttcttcggccagggcatgaacgccggcttcgaggactgcctggtgttcgacgagctgatggacaagttcagcaacgacctgagcctgtgcctgcccgtgttcagcagactgagaatccccgacgaccacgccatcagcgacctgagcatgtacaactacatcgagaagaacatggagagattcctgcacgccatcatgcccagcaccttcatccccctgtacaccatggtgaccttcagcagaatcagataccacgaggccgtgcagagatggcactggcagaagaaggtgatcaacaagggcctgttcttcctgggcagcctgatcgccatcagcagcacctacctgctgatccactacatgagccccagaagcttcctgagactgagaagaccctggaactggatcgcccacttcagaaacaccacctgcttccccgccaaggccgtggacagcctggagcagatcagcaacctgatcagcagatag

SEQ ID NO: 86396 - DNA, 1461 bp, synthetic construct
  misc_feature 1..1461: note = Description of Artificial Sequence: Synthetic coding sequence
  source 1..1461: mol_type = other DNA
atggacagcagcgtgatccagagaaagaaggtggccgtgatcggcggcggcctggtgggcagcctgcaggcctgcttcctggccaagagaaacttccagatcgacgtgtacgaggccagagaggacaccagagtggccaccttcaccagaggcagaagcatcaacctggccctgagccacagaggcagacaggccctgaaggccgtgggcctggaggaccagatcgtgagccagggcatccccatgagagccagaatgatccacagcctgagcggcaagaagagcgccatcccctacggcaccaagagccagtacatcctgagcgtgagcagagagaacctgaacaaggacctgctgaccgccgccgagaagtaccccaacgtgaagatgcacttcaaccacagactgctgaagtgcaaccccgaggagggcatgatcaccgtgctgggcagcgacaaggtgcccaaggacgtgacctgcgacctgatcgtgggctgcgacggcgcctacagcaccgtgagaagccacctgatgaagaagcccagattcgactacagccagcagtacatcccccacggctacatggagctgaccatcccccccaagaacggcgactacgccatggagcccaactacctgcacatctggcccagaaacaccttcatgatgatcgccctgcccaacatgaacaagagcttcacctgcaccctgttcatgcccttcgaggagttcgagaagctgctgaccagcaacgacgtggtggacttcttccagaagtacttccccgacgccatccccctgatcggcgagaagctgctggtgcaggacttcttcctgctgcccgcccagcccatgatcagcgtgaagtgcagcagcttccacttcaagagccactgcgtgctgctgggcgacgccgcccacgccatcgtgcccttcttcggccagggcatgaacgccggcttcgaggactgcctggtgttcgacgagctgatggacaagttcagcaacgacctgagcctgtgcctgcccgtgttcagcagactgagaatccccgacgaccacgccatcagcgacctgagcatgtacaactacatcgagatgagagcccacgtgaacagcagctggttcatcttccagaagaacatggagagattcctgcacgccatcatgcccagcaccttcatccccctgtacaccatggtgaccttcagcagaatcagataccacgaggccgtgcagagatggcactggcagaagaaggtgatcaacaagggcctgttcttcctgggcagcctgatcgccatcagcagcacctacctgctgatccactacatgagccccagaagcttcctgagactgagaagaccctggaactggatcgcccacttcagaaacaccacctgcttccccgccaaggccgtggacagcctggagcagatcagcaacctgatcagcagatag

SEQ ID NO: 86397 - DNA, 1689 bp, synthetic construct
  misc_feature 1..1689: note = Description of Artificial Sequence: Synthetic coding sequence
  source 1..1689: mol_type = other DNA
atggagctgaagaaggacatcaacgccgtgagcatcgacatgctgctgatcgtgcacagcgagaagagaagagccgcccagggcaccctgagcgaccagcaggccaaccccagcagcctgctgcagagaggcggcggcttccagggcgtgggcaacggcgtgagaagatggcagaagctggagggcaacgacttccacgagaacctggtggagaagcagcacccccagcagccccaggtgatcaccagctacaacagccagggcacccagctgaccgtggaggtgcaccccagagacgccatgccccagctgctgaagaagttcagcctggccaagagactgcagggcgacaagaacggcaacaccagacccagacagcccggcggcaaggacgcccacgcctacccctgggacagaagcagcctgaagagcatgagcctggacctgcagcagttcgagaagctggacatctacgccagccaggtgaccgccaagagcggcctggacgagctggtgagcgacctgctgcaggaggcccacaccgacctggagagagtgagagccatctggatctggatctgccaccacatcgagtacgacatcgccgccgcccaggagaaggacagacaggccttcaagcccaccgacatcctgagaacccagaagaccaactgcgacggctacgccggcctgttcgagagaatgtgcagactggccggcgtgcagtgcatgaccgtgcccggctacagcaagggcttcggctaccagaccggccagagcttcagcggcgagttcgaccacgcctggaacgccgtgtacctggagggcagatggcacctggtggacagcacctggggcagcggcctggtggacaccatcaccagcaagttcaccttcctgtacaacgagttctacttcctgacccaccccgccctgttcatcgaggaccacttccccgacaacaagaactggcagctgctgaagcccccccagagcctgagacagttcgagaacaacatgtaccacaagagcgagttctacaacaagggcatgctgagcgcccaccccgagaccagcatgatcagaaccgtgaacggcaaggccaccgtgaccatcgagagctgcgcccccaccctgttcatgttcatgctgaacggcaagcaggagcacggcctgctgagcctgagaaagaacggcatgaagctggaggtgtacccccccaccatgggcacccacaagctgcagatcttcgccaagggcaacagcgacatctacagcagcgtgctggagtacaccctgaagtgcaactacgtggacatgggcgtgcagctgcccgccgagctgcaccagcccgtgggccccagctggttcagcgagcagatgggcatcatgaagcccagccaccccgaccccatcatccacaccagcgacggcagatgcagcatcagcttcagcgtggaggagggcatcaacgtgctggccagcctgcacggcgacgacggccccatcaccgaggagacccagagaagatacatcttccagctgcacagagagaagcagaccgagctgaaggtgcagctgccccacgccggcaagttcgccctgaaggaggtgtacgtgatggtgctggagaacgccaaccacaacttctacagctacatcctgaagtacaaggtgaacgcccagtag

SEQ ID NO: 86398 - DNA, 1986 bp, synthetic construct
  misc_feature 1..1986: note = Description of Artificial Sequence: Synthetic coding sequence
  source 1..1986: mol_type = other DNA
atggagctgaagaaggacatcaacgccgtgagcatcgacatgctgctgatcgtgcacagcgagaagagaagagccgcccagggcaccctgagcgaccagcaggccaaccccagcagcctgctgcagagaggcggcggcttccagggcgtgggcaacggcgtgagaagatggcagaagctggagggcaacgacttccacgagaacctggtggagaagcagcacccccagcagccccaggtgatcaccagctacaacagccagggcacccagctgaccgtggaggtgcaccccagagacgccatgccccagctgctgaagaagttcagcctggccaagagactgcagggcgacaagaacggcaacaccagacccagacagcccggcggcaaggacgcccacgcctacccctgggacagaagcagcctgaagagcatgagcctggacctgcagcagttcgagaagctggacatctacgccagccaggtgaccgccaagagcggcctggacgagctggtgagcgacctgctgcaggaggcccacaccgacctggagagagtgagagccatctggatctggatctgccaccacatcgagtacgacatcgccgccgcccaggagaaggacagacaggccttcaagcccaccgacatcctgagaacccagaagaccaactgcgacggctacgccggcctgttcgagagaatgtgcagactggccggcgtgcagtgcatgaccgtgcccggctacagcaagggcttcggctaccagaccggccagagcttcagcggcgagttcgaccacgcctggaacgccgtgtacctggagggcagatggcacctggtggacagcacctggggcagcggcctggtggacaccatcaccagcaagttcaccttcctgtacaacgagttctacttcctgacccaccccgccctgttcatcgaggaccacttccccgacaacaagaactggcagctgctgaagcccccccagagcctgagacagttcgagaacaacatgtaccacaagagcgagttctacaacaagggcatgctgagcgcccaccccgagaccagcatgatcagaaccgtgaacggcaaggccaccgtgaccatcgagagctgcgcccccaccctgttcatgttcatgctgaacggcaagcaggagcacggcctgctgagcctgagaaagaacggcatgaagctggaggtgtacccccccaccatgggcacccacaagctgcagatcttcgccaagggcaacagcgacatctacagcagcgtgctggagtacaccctgaagtgcaactacgtggacatgggcgtgcagctgcccgccgagctgcaccagcccgtgggccccagctggttcagcgagcagatgggcatcatgaagcccagccaccccgaccccatcatccacaccagcgacggcagatgcagcatcagcttcagcgtggaggagggcatcaacgtgctggccagcctgcacggcgacgacggccccatcaccgaggagacccagagaagatacatcttccagctgcacagagagaagcagaccgagctgaaggtgcagctgccccacgccggcaagttcgccctgaagatcttcgtgaagaagagacaggagcccggcaactacatcttcgtgttcaactacctggtgtgctgcgccaacaccaaggtgaactggcccatgttccccgagagcttcggcaactggggccaggacaacgagctgctggagcccctgagcggcgtgctgcccgccaacagaaacgtgcccttcaagctgaagctgcacggcatcgccaaggtgctggtgaagggccaggacacctggcccctgaccctgaaccacgagggctactgggagggcagctgcagcaccgccggctgccaggaggtgtacgtgatggtgctggagaacgccaaccacaacttctacagctacatcctgaagtacaaggtgaacgcccagtag

SEQ ID NO: 86399 - DNA, 1173 bp, synthetic construct
  misc_feature 1..1173: note = Description of Artificial Sequence: Synthetic coding sequence
  source 1..1173: mol_type = other DNA
atgaagctggaggccgtggacagaatgaaccccagcctggtgtgcgtggccagcgtgaccgacgtggtggacagcagattcctggtgcacttcgacaactgggacgacacctacgactactggtgcgaccccagcagcccctacatccaccccgtgggctggtgccagaagcagggcaagcccctgacccccccccaggactaccccgaccccgacaacttctgctgggagaagtacctggaggagaccggcgccagcgccgtgcccacctgggccttcaaggtgagacccccccacagcttcctggtgaacatgaagctggaggccgtggacagaagaaaccccgccctgatcagagtggccagcgtggaggacgtggaggaccacagaatcaagatccacttcgacggctggagccacggctacgacttctggatcgacgccgaccaccccgacatccaccccgccggctggtgcagcaagaccggccaccccctgcagccccccctgggccccagagagcccagcagcgccagccccggcggctgcccccccctgagctacagaagcctgccccacaccagaaccagcaagtacagcttccaccacagaaagtgccccacccccggctgcgacggcagcggccacgtgaccggcaagttcaccgcccaccactgcctgagcggctgccccctggccgagagaaaccagagcagactgaaggccgagctgagcgacagcgaggccagcgccagaaagaagaacctgagcggcttcagccccagaaagaagcccagacaccacggcagaatcggcagaccccccaagtacagaaagatcccccaggaggacttccagaccctgacccccgacgtggtgcaccagagcctgttcatgagcgccctgagcgcccaccccgacagaagcctgagcgtgtgctgggagcagcactgcaagctgctgcccggcgtggccggcatcagcgccagcaccgtggccaagtggaccatcgacgaggtgttcggcttcgtgcagaccctgaccggctgcgaggaccaggccagactgttcaaggacgaggtgagatgcaagtgcagagtgggcgacagagccggcgtgaccgtgctgaagaccgccggcagcagatgccccccccagagacacttctgctag

SEQ ID NO: 86400 - DNA, 2232 bp, synthetic construct
  misc_feature 1..2232: note = Description of Artificial Sequence: Synthetic coding sequence
  source 1..2232: mol_type = other DNA
atgagaagaagagagggccacggcaccgacagcgagatgggccagggccccgtgagagagagccagagcagcgacccccccgccctgcagttcagaatcagcgagtacaagcccctgaacatggccggcgtggagcagccccccagccccgagctgagacaggagggcgtgaccgagtacgaggacggcggcgcccccgccggcgacggcgaggccggcccccagcaggccgaggaccacccccagaacccccccgaggaccccaaccaggacccccccgaggacgacagcacctgccagtgccaggcctgcggcccccaccaggccgccggccccgacctgggcagcagcaacgacggctgcccccagctgttccaggagagaagcgtgatcgtggagaacagcagcggcagcaccagcgccagcgagctgctgaagcccatgaagaagagaaagagaagagagtaccagagccccagcgaggaggagagcgagcccgaggccatggagaagcaggaggagggcaaggaccccgagggccagcccaccgccagcacccccgagagcgaggagtggagcagcagccagcccgccaccggcgagaagaaggagtgctggagctgggagagctacctggaggagcagaaggccatcaccgcccccgtgagcctgttccaggacagccaggccgtgacccacaacaagaacggcttcaagctgggcatgaagctggagggcatcgacccccagcaccccagcatgtacttcatcctgaccgtggccgaggtgtgcggctacagactgagactgcacttcgacggctacagcgagtgccacgacttctgggtgaacgccaacagccccgacatccaccccgccggctggttcgagaagaccggccacaagctgcagccccccaagggctacaaggaggaggagttcagctggagccagtacctgagaagcaccagagcccaggccgcccccaagcacctgttcgtgagccagagccacagccccccccccctgggcttccaggtgggcatgaagctggaggccgtggacagaatgaaccccagcctggtgtgcgtggccagcgtgaccgacgtggtggacagcagattcctggtgcacttcgacaactgggacgacacctacgactactggtgcgaccccagcagcccctacatccaccccgtgggctggtgccagaagcagggcaagcccctgacccccccccaggactaccccgaccccgacaacttctgctgggagaagtacctggaggagaccggcgccagcgccgtgcccacctgggccttcaaggtgagacccccccacagcttcctggtgaacatgaagctggaggccgtggacagaagaaaccccgccctgatcagagtggccagcgtggaggacgtggaggaccacagaatcaagatccacttcgacggctggagccacggctacgacttctggatcgacgccgaccaccccgacatccaccccgccggctggtgcagcaagaccggccaccccctgcagccccccctgggccccagagagcccagcagcgccagccccggcggctgcccccccctgagctacagaagcctgccccacaccagaaccagcaagtacagcttccaccacagactgttcttccccagaaagtgccccacccccggctgcgacggcagcggccacgtgaccggcaagttcaccgcccaccactgcctgagcggctgccccctggccgagagaaaccagagcagactgaaggccgagctgagcgacagcgaggccagcgccagaaagaagaacctgagcggcttcagccccagaaagaagcccagacaccacggcagaatcggcagaccccccaagtacagaaagatcccccaggaggacttccagaccctgacccccgacgtggtgcaccagagcctgttcatgagcgccctgagcgcccaccccgacagaagcctgagcgtgtgctgggagcagcactgcaagctgctgcccggcgtggccggcatcagcgccagcaccgtggccaagtggaccatcgacgaggtgttcggcttcgtgcagaccctgaccggctgcgaggaccaggccagactgttcaaggacgaggtgagatgcaagtgcagagtgggcgacagagccggcgtgaccgtgctgaagaccgccggcagcagatgccccccccagagacacttctgctag

SEQ ID NO: 86401 - DNA, 2319 bp, synthetic construct
  misc_feature 1..2319: note = Description of Artificial Sequence: Synthetic coding sequence
  source 1..2319: mol_type = other DNA
atgagaagaagagagggccacggcaccgacagcgagatgggccagggccccgtgagagagagccagagcagcgacccccccgccctgcagttcagaatcagcgagtacaagcccctgaacatggccggcgtggagcagccccccagccccgagctgagacaggagggcgtgaccgagtacgaggacggcggcgcccccgccggcgacggcgaggccggcccccagcaggccgaggaccacccccagaacccccccgaggaccccaaccaggacccccccgaggacgacagcacctgccagtgccaggcctgcggcccccaccaggccgccggccccgacctgggcagcagcaacgacggctgcccccagctgttccaggagagaagcgtgatcgtggagaacagcagcggcagcaccagcgccagcgagctgctgaagcccatgaagaagagaaagagaagagagtaccagagccccagcgaggaggagagcgagcccgaggccatggagaagcaggaggagggcaaggaccccgagggccagcccaccgccagcacccccgagagcgaggagtggagcagcagccagcccgccaccggcgagaagaaggagtgctggagctgggagagctacctggaggagcagaaggccatcaccgcccccgtgagcctgttccaggacagccaggccgtgacccacaacaagaacggcttcaagctgggcatgaagctggagggcatcgacccccagcaccccagcatgtacttcatcctgaccgtggccgaggtgtgcggctacagactgagactgcacttcgacggctacagcgagtgccacgacttctgggtgaacgccaacagccccgacatccaccccgccggctggttcgagaagaccggccacaagctgcagccccccaagggctacaaggaggaggagttcagctggagccagtacctgagaagcaccagagcccaggccgcccccaagcacctgttcgtgagccagagccacagccccccccccctgggcttccaggtgggcatgaagctggaggccgtggacagaatgaaccccagcctggtgtgcgtggccagcgtgaccgacgtggtggacagcagattcctggtgcacttcgacaactgggacgacacctacgactactggtgcgaccccagcagcccctacatccaccccgtgggctggtgccagaagcagggcaagcccctgacccccccccaggactaccccgaccccgacaacttctgctgggagaagtacctggaggagaccggcgccagcgccgtgcccacctgggccttcaaggtgagacccccccacagcttcctggtgaacatgaagctggaggccgtggacagaagaaaccccgccctgatcagagtggccagcgtggaggacgtggaggaccacagaatcaagatccacttcgacggctggagccacggctacgacttctggatcgacgccgaccaccccgacatccaccccgccggctggtgcagcaagaccggccaccccctgcagccccccctgggccccagagagcccagcagcgccagccccggcggctgcccccccctgagctacagaagcctgccccacaccagaaccagcaagtacagcttccaccacagaaagtgccccacccccggctgcgacggcagcggccacgtgaccggcaagttcaccgcccaccactgcctgagcggctgccccctggccgagagaaaccagagcagactgaaggccgagctgagcgacagcgaggccagcgccagaaagaagaacctgagcggcttcagccccagaaagaagcccagacaccacggcagaatcggcagaccccccaagtacagaaagatcccccaggaggacttccagaccctgacccccgacgtggtgcaccagagcctgttcatgagcgccctgagcgcccaccccgacagaagcctgagcgtgtgctgggagcagcactgcaagctgctgcccggcgtggccggcatcagcgccagcaccgtggccaagtggaccatcgacgaggtgttcggcttcgtgcagaccctgaccggctgcgaggaccaggccagactgttcaaggacgaggccagaatcgtgagagtgacccacgtgagcggcaagaccctggtgtggaccgtggcccagctgggcgacctggtgtgcagcgaccacctgcaggagggcaagggcatcctggagaccggcgtgcacagcctgctgtgcagcctgcccacccacctgctggccaagctgagcttcgccagcgacagccagtactag

SEQ ID NO: 86402 - DNA, 2523 bp, synthetic construct
  misc_feature 1..2523: note = Description of Artificial Sequence: Synthetic coding sequence
  source 1..2523: mol_type = other DNA
atgcacctggtggccggcgacagccccggcagcggcccccacctgcccgccaccgccttcatcatccccgccagcagcgccaccctgggcctgcccagcagcgccctggacgtgagctgcttccccagagagcccatccacgtgggcgcccccgagcaggtggccggctgcgagcccgtgagcgccaccgtgctgccccagctgagcgccggccccgccagcagcagcaccagcaccgtgagactgctggagtggaccgaggccgccgcccccccccccggcggcggcctgagattcagaatcagcgagtacaagcccctgaacatggccggcgtggagcagccccccagccccgagctgagacaggagggcgtgaccgagtacgaggacggcggcgcccccgccggcgacggcgaggccggcccccagcaggccgaggaccacccccagaacccccccgaggaccccaaccaggacccccccgaggacgacagcacctgccagtgccaggcctgcggcccccaccaggccgccggccccgacctgggcagcagcaacgacggctgcccccagctgttccaggagagaagcgtgatcgtggagaacagcagcggcagcaccagcgccagcgagctgctgaagcccatgaagaagagaaagagaagagagtaccagagccccagcgaggaggagagcgagcccgaggccatggagaagcaggaggagggcaaggaccccgagggccagcccaccgccagcacccccgagagcgaggagtggagcagcagccagcccgccaccggcgagaagaaggagtgctggagctgggagagctacctggaggagcagaaggccatcaccgcccccgtgagcctgttccaggacagccaggccgtgacccacaacaagaacggcttcaagctgggcatgaagctggagggcatcgacccccagcaccccagcatgtacttcatcctgaccgtggccgaggtgtgcggctacagactgagactgcacttcgacggctacagcgagtgccacgacttctgggtgaacgccaacagccccgacatccaccccgccggctggttcgagaagaccggccacaagctgcagccccccaagggctacaaggaggaggagttcagctggagccagtacctgagaagcaccagagcccaggccgcccccaagcacctgttcgtgagccagagccacagccccccccccctgggcttccaggtgggcatgaagctggaggccgtggacagaatgaaccccagcctggtgtgcgtggccagcgtgaccgacgtggtggacagcagattcctggtgcacttcgacaactgggacgacacctacgactactggtgcgaccccagcagcccctacatccaccccgtgggctggtgccagaagcagggcaagcccctgacccccccccaggactaccccgaccccgacaacttctgctgggagaagtacctggaggagaccggcgccagcgccgtgcccacctgggccttcaaggtgagacccccccacagcttcctggtgaacatgaagctggaggccgtggacagaagaaaccccgccctgatcagagtggccagcgtggaggacgtggaggaccacagaatcaagatccacttcgacggctggagccacggctacgacttctggatcgacgccgaccaccccgacatccaccccgccggctggtgcagcaagaccggccaccccctgcagccccccctgggccccagagagcccagcagcgccagccccggcggctgcccccccctgagctacagaagcctgccccacaccagaaccagcaagtacagcttccaccacagaaagtgccccacccccggctgcgacggcagcggccacgtgaccggcaagttcaccgcccaccactgcctgagcggctgccccctggccgagagaaaccagagcagactgaaggccgagctgagcgacagcgaggccagcgccagaaagaagaacctgagcggcttcagccccagaaagaagcccagacaccacggcagaatcggcagaccccccaagtacagaaagatcccccaggaggacttccagaccctgacccccgacgtggtgcaccagagcctgttcatgagcgccctgagcgcccaccccgacagaagcctgagcgtgtgctgggagcagcactgcaagctgctgcccggcgtggccggcatcagcgccagcaccgtggccaagtggaccatcgacgaggtgttcggcttcgtgcagaccctgaccggctgcgaggaccaggccagactgttcaaggacgaggccagaatcgtgagagtgacccacgtgagcggcaagaccctggtgtggaccgtggcccagctgggcgacctggtgtgcagcgaccacctgcaggagggcaagggcatcctggagaccggcgtgcacagcctgctgtgcagcctgcccacccacctgctggccaagctgagcttcgccagcgacagccagtactag

SEQ ID NO: 86403 - DNA, 1617 bp, synthetic construct
  misc_feature 1..1617: note = Description of Artificial Sequence: Synthetic coding sequence
  source 1..1617: mol_type = other DNA
cagaaggccatcaccgcccccgtgagcctgttccaggacagccaggccgtgacccacaacaagaacggcttcaagctgggcatgaagctggagggcatcgacccccagcaccccagcatgtacttcatcctgaccgtggccgaggtgtgcggctacagactgagactgcacttcgacggctacagcgagtgccacgacttctgggtgaacgccaacagccccgacatccaccccgccggctggttcgagaagaccggccacaagctgcagccccccaagggctacaaggaggaggagttcagctggagccagtacctgagaagcaccagagcccaggccgcccccaagcacctgttcgtgagccagagccacagccccccccccctgggcttccaggtgggcatgaagctggaggccgtggacagaatgaaccccagcctggtgtgcgtggccagcgtgaccgacgtggtggacagcagattcctggtgcacttcgacaactgggacgacacctacgactactggtgcgaccccagcagcccctacatccaccccgtgggctggtgccagaagcagggcaagcccctgacccccccccaggactaccccgaccccgacaacttctgctgggagaagtacctggaggagaccggcgccagcgccgtgcccacctgggccttcaaggtgagacccccccacagcttcctggtgaacatgaagctggaggccgtggacagaagaaaccccgccctgatcagagtggccagcgtggaggacgtggaggaccacagaatcaagatccacttcgacggctggagccacggctacgacttctggatcgacgccgaccaccccgacatccaccccgccggctggtgcagcaagaccggccaccccctgcagccccccctgggccccagagagcccagcagcgccagccccggcggctgcccccccctgagctacagaagcctgccccacaccagaaccagcaagtacagcttccaccacagaaagtgccccacccccggctgcgacggcagcggccacgtgaccggcaagttcaccgcccaccactgcctgagcggctgccccctggccgagagaaaccagagcagactgaaggccgagctgagcgacagcgaggccagcgccagaaagaagaacctgagcggcttcagccccagaaagaagcccagacaccacggcagaatcggcagaccccccaagtacagaaagatcccccaggaggacttccagaccctgacccccgacgtggtgcaccagagcctgttcatgagcgccctgagcgcccaccccgacagaagcctgagcgtgtgctgggagcagcactgcaagctgctgcccggcgtggccggcatcagcgccagcaccgtggccaagtggaccatcgacgaggtgttcggcttcgtgcagaccctgaccggctgcgaggaccaggccagactgttcaaggacgagatgatcgacggcgaggccttcctgctgctgacccaggccgacatcgtgaagatcatgagcgtgaagctgggccccgccctgaagatctacaacgccatcctgatgttcaagaacgccgacgacaccctgaagtag

SEQ ID NO: 86404 - DNA, 2523 bp, synthetic construct; identical to SEQ ID NO: 86402
  misc_feature 1..2523: note = Description of Artificial Sequence: Synthetic coding sequence
  source 1..2523: mol_type = other DNA

SEQ ID NO: 86405 - DNA, 255 bp, synthetic construct
  misc_feature 1..255: note = Description of Artificial Sequence: Synthetic coding sequence
  source 1..255: mol_type = other DNA
atggccggcgtggagcagccccccagccccgagctgagacaggagggcgtgaccgagtacgaggacggcggcgcccccgccggcgacggcgaggccggcccccagcaggccgaggaccacccccagaacccccccgaggaccccaaccaggacccccccgaggacgacagcacctgccagtgccaggcctgcggcccccaccaggccgccggccccgacctgggcagcagcaacgacggctgcccccagctgtag

SEQ ID NO: 86406 - DNA, 417 bp, synthetic construct
  misc_feature 1..417: note = Description of Artificial Sequence: Synthetic coding sequence
  source 1..417: mol_type = other DNA
atgcacctggtggccggcgacagccccggcagcggcccccacctgcccgccaccgccttcatcatccccgccagcagcgccaccctgggcctgcccagcagcgccctggacgtgagctgcttccccagagagcccatccacgtgggcgcccccgagcaggtggccggctgcgagcccgtgagcgccaccgtgctgccccagctgagcgccggccccgccagcagcagcaccagcaccgtgagactgctggagtggaccgaggccgccgcccccccccccggcggcggcctgagattcagaatcagcgagtacaagcccctgaacatggccggcgtggagcagccccccagccccgagctgagacaggagggcgtgaccgagtacgaggacggcggcgcccccgccggcgacggctag

SEQ ID NO: 86407 - DNA, 2217 bp, synthetic construct
  misc_feature 1..2217: note = Description of Artificial Sequence: Synthetic coding sequence
  source 1..2217: mol_type = other DNA
atgagaagaagagagggccacggcaccgacagcgagatgggccagggccccgtgagagagagccagagcagcgacccccccgccctgcagttcagaatcagcgagtacaagcccctgaacatggccggcgtggagcagccccccagccccgagctgagacaggagggcgtgaccgagtacgaggacggcggcgcccccgccggcgacggcgaggccggcccccagcaggccgaggaccacccccagaacccccccgaggaccccaaccaggacccccccgaggacgacagcacctgccagtgccaggcctgcggcccccaccaggccgccggccccgacctgggcagcagcaacgacggctgcccccagctgttccaggagagaagcgtgatcgtggagaacagcagcggcagcaccagcgccagcgagctgctgaagcccatgaagaagagaaagagaagagagtaccagagccccagcgaggaggagagcgagcccgaggccatggagaagcaggaggagggcaaggaccccgagggccagcccaccgccagcacccccgagagcgaggagtggagcagcagccagcccgccaccggcgagaagaaggagtgctggagctgggagagctacctggaggagcagaaggccatcaccgcccccgtgagcctgttccaggacagccaggccgtgacccacaacaagaacggcttcaagctgggcatgaagctggagggcatcgacccccagcaccccagcatgtacttcatcctgaccgtggccgaggtgtgcggctacagactgagactgcacttcgacggctacagcgagtgccacgacttctgggtgaacgccaacagccccgacatccaccccgccggctggttcgagaagaccggccacaagctgcagccccccaagggctacaaggaggaggagttcagctggagccagtacctgagaagcaccagagcccaggccgcccccaagcacctgttcgtgagccagagccacagccccccccccctgggcttccaggtgggcatgaagctggaggccgtggacagaatgaaccccagcctggtgtgcgtggccagcgtgaccgacgtggtggacagcagattcctggtgcacttcgacaactgggacgacacctacgactactggtgcgaccccagcagcccctacatccaccccgtgggctggtgccagaagcagggcaagcccctgacccccccccaggactaccccgaccccgacaacttctgctgggagaagtacctggaggagaccggcgccagcgccgtgcccacctgggccttcaaggtgagacccccccacagcttcctggtgaacatgaagctggaggccgtggacagaagaaaccccgccctgatcagagtggccagcgtggaggacgtggaggaccacagaatcaagatccacttcgacggctggagccacggctacgacttctggatcgacgccgaccaccccgacatccaccccgccggctggtgcagcaagaccggccaccccctgcagccccccctgggccccagagagcccagcagcgccagccccggcggctgcccccccctgagctacagaagcctgccccacaccagaaccagcaagtacagcttccaccacagaaagtgccccacccccggctgcgacggcagcggccacgtgaccggcaagttcaccgcccaccactgcctgagcggctgccccctggccgagagaaaccagagcagactgaaggccgagctgagcgacagcgaggccagcgccagaaagaagaacctgagcggcttcagccccagaaagaagcccagacaccacggcagaatcggcagaccccccaagtacagaaagatcccccaggaggacttccagaccctgacccccgacgtggtgcaccagagcctgttcatgagcgccctgagcgcccaccccgacagaagcctgagcgtgtgctgggagcagcactgcaagctgctgcccggcgtggccggcatcagcgccagcaccgtggccaagtggaccatcgacgaggtgttcggcttcgtgcagaccctgaccggctgcgaggaccaggccagactgttcaaggacgaggtgagatgcaagtgcagagtgggcgacagagccggcgtgaccgtgctgaagaccgccggcagcagatgccccccccagagacacttctgctag

SEQ ID NO: 86408 - DNA, 870 bp, synthetic construct
  misc_feature 1..870: note = Description of Artificial Sequence: Synthetic coding sequence
  source 1..870: mol_type = other DNA
tgaaccagcggcagcatgcccacccccctgaccttcaccctgctggccggcagcagaagaagagccaccagctgcagcctgcccaagagccccccccccctgggcttccaggtgggcatgaagctggaggccgtggacagaatgaaccccagcctggtgtgcgtggccagcgtgaccgacgtggtggacagcagattcctggtgcacttcgacaactgggacgacacctacgactactggtgcgaccccagcagcccctacatccaccccgtgggctggtgccagaagcagggcaagcccctgacccccccccaggactaccccgaccccgacaacttctgctgggagaagtacctggaggagaccggcgccagcgccgtgcccacctgggccttcaaggtgagacccccccacagcttcctggtgaacatgaagctggaggccgtggacagaagaaaccccgccctgatcagagtggccagcgtggaggacgtggaggaccacagaatcaagatccacttcgacggctggagccacggctacgacttctggatcgacgccgaccaccccgacatccaccccgccggctggtgcagcaagaccggccaccccctgcagccccccctgggccccagagagcccagcagcgccagccccggcggctgcccccccctgagctacagaagcctgccccacaccagaaccagcaagtacagcttccaccacagaaagtgccccacccccggctgcgacggcagcggccacgtgaccggcaagttcaccgcccaccactgcctgagcggctgccccctggccgagagaaaccagagcagactgaaggccgagctgagcgacagcgaggccagctag

SEQ ID NO: 86409 - DNA, 327 bp, synthetic construct
  misc_feature 1..327: note = Description of Artificial Sequence: Synthetic coding sequence
  source 1..327: mol_type = other DNA
atggccgccgccatggacgtggacacccccagcggcaccaacagcggcgccggcaagaagagattcgaggtgaagaagtggaacgccgtggccctgtgggcctgggacatcgtggtggacaactgcgccatctgcagaaaccacatcatggacctgtgcatcgagtgccaggccaaccaggccagcgccaccagcgaggagtgcaccgtggcctggggcgtgtgcaaccacgccttccacttccactgcatcagcagatggctgaagaccagacaggtgtgccccctggacaacagagagtgggagttccagaagtacggccactag

SEQ ID NO: 86410 - DNA, 867 bp, synthetic construct
  misc_feature 1..867: note = Description of Artificial Sequence: Synthetic coding sequence
  source 1..867: mol_type = other DNA
tgaagaccccacctgcagaaccagtggagaaagagaaagatgaccacctggagctgcctggtggccatgatcgtgagcggcgtgatcaccgccgtgtgggccgtgagagccgcccccatctggagaagccaggtgaagcagaagatgagaatcggcaagcagggcaactgcagaccccccagatgcatctgcagcgccctgggcctgctggccccctggatggccgtggtgctgagccagggcaagccccccaccaagaaggccaaggtgctgcacaaggccgcctggagcgccaagatcggcgccttcctgcacagccagggcaccggccagctggccgacggcacccccaccggccaggacgccctggtgctgggcttcgactggggcaagttcctgaaggaccacagctacaaggccgcccccgtgagctgcttcaagcacgtgcccctgtacgaccagtgggaggacgtgatgaagggcatgaaggtggaggtgctgaacagcgacgccgtgctgcccagcagagtgtactggatcgccagcgtgatccagaccgccggctacagagtgctgctgagatacgagggcttcgagaacgacgccagccacgacttctggtgcaacctgggcaccgtggacgtgcaccccatcggctggtgcgccatcaacagcaagatcctggtgccccccagaaccatccacgccaagttcaccgactggaagggctacctgatgaagagactggtgggcagcagaaccctgcccgtggacttccacatcaaggtgggcagcgagcccctgaccgacgtgccccccagcgccctgcccttcttctgcatcctgcacgccacccactggagctag

SEQ ID NO: 86411 - DNA, 3762 bp, synthetic construct
  misc_feature 1..3762: note = Description of Artificial Sequence: Synthetic coding sequence
  source 1..3762: mol_type = other DNA
atggtggtggccctgagatacgtgtggcccctgctgctgtgcagcccctgcctgctgatccagatccccgaggagtacgagggccaccacgtgatggagccccccgtgatcaccgagcagagccccagaagactggtggtgttccccaccgacgacatcagcctgaagtgcgaggccagcggcaagcccgaggtgcagttcagatggaccagagacggcgtgcacttcaagcccaaggaggagctgggcgtgaccgtgtaccagagcccccacagcggcagcttcaccatcaccggcaacaacagcaacttcgcccagagattccagggcatctacagatgcttcgccagcaacaagctgggcaccgccatgagccacgagatcagactgatggccgagggcgcccccaagtggcccaaggagaccgtgaagcccgtggaggtggaggagggcgagagcgtggtgctgccctgcaaccccccccccagcgccgagcccctgagaatctactggatgaacagcaagatcctgcacatcaagcaggacgagagagtgaccatgggccagaacggcaacctgtacttcgccaacgtgctgaccagcgacaaccacagcgactacatctgccacgcccacttccccggcaccagaaccatcatccagaaggagcccatcgacctgagagtgaaggccaccaacagcatgatcgacagaaagcccagactgctgttccccaccaacagcagcagccacctggtggccctgcagggccagcccctggtgctggagtgcatcgccgagggcttccccacccccaccatcaagtggctgagacccagcggccccatgcccgccgacagagtgacctaccagaaccacaacaagaccctgcagctgctgaaggtgggcgaggaggacgacggcgagtacagatgcctggccgagaacagcctgggcagcgccagacacgcctactacgtgaccgtggaggccgccccctactggctgcacaagccccagagccacctgtacggccccggcgagaccgccagactggactgccaggtgcagggcagaccccagcccgaggtgacctggagaatcaacggcatccccgtggaggagctggccaaggaccagaagtacagaatccagagaggcgccctgatcctgagcaacgtgcagcccagcgacaccatggtgacccagtgcgaggccagaaacagacacggcctgctgctggccaacgcctacatctacgtggtgcagctgcccgccaagatcctgaccgccgacaaccagacctacatggccgtgcagggcagcaccgcctacctgctgtgcaaggccttcggcgcccccgtgcccagcgtgcagtggctggacgaggacggcaccaccgtgctgcaggacgagagattcttcccctacgccaacggcaccctgggcatcagagacctgcaggccaacgacaccggcagatacttctgcctggccgccaacgaccagaacaacgtgaccatcatggccaacctgaaggtgaaggacgccacccagatcacccagggccccagaagcaccatcgagaagaagggcagcagagtgaccttcacctgccaggccagcttcgaccccagcctgcagcccagcatcacctggagaggcgacggcagagacctgcaggagctgggcgacagcgacaagtacttcatcgaggacggcagactggtgatccacagcctggactacagcgaccagggcaactacagctgcgtggccagcaccgagctggacgtggtggagagcagagcccagctgctggtggtgggcagccccggccccgtgcccagactggtgctgagcgacctgcacctgctgacccagagccaggtgagagtgagctggagccccgccgaggaccacaacgcccccatcgagaagtacgacatcgagttcgaggacaaggagatggcccccgagaagtggtacagcctgggcaaggtgcccggcaaccagaccagcaccaccctgaagctgagcccctacgtgcactacaccttcagagtgaccgccatcaacaagtacggccccggcgagcccagccccgtgagcgagaccgtggtgacccccgaggccgcccccgagaagaaccccgtggacgtgaagggcgagggcaacgagaccaccaacatggtgatcacctggaagcccctgagatggatggactggaacgccccccaggtgcagtacagagtgcagtggagaccccagggcaccagaggcccctggcaggagcagatcgtgagcgaccccttcctggtggtgagcaacaccagcaccttcgtgccctacgagatcaaggtgcaggccgtgaacagccagggcaagggccccgagccccaggtgaccatcggctacagcggcgaggactacccccaggccatccccgagctggagggcatcgagatcctgaacagcagcgccgtgctggtgaagtggagacccgtggacctggcccaggtgaagggccacctgagaggctacaacgtgacctactggagagagggcagccagagaaagcacagcaagagacacatccacaaggaccacgtggtggtgcccgccaacaccaccagcgtgatcctgagcggcctgagaccctacagcagctaccacctggaggtgcaggccttcaacggcagaggcagcggccccgccagcgagttcaccttcagcacccccgagggcgtgcccggccaccccgaggccctgcacctggagtgccagagcaacaccagcctgctgctgagatggcagccccccctgagccacaacggcgtgctgaccggctacgtgctgagctaccaccccctggacgagggcggcaagggccagctgagcttcaacctgagagaccccgagctgagaacccacaacctgaccgacctgagcccccacctgagatacagattccagctgcaggccaccaccaaggagggccccggcgaggccatcgtgagagagggcggcaccatggccctgagcggcatcagcgacttcggcaacatcagcgccaccgccggcgagaactacagcgtggtgagctgggtgcccaaggagggccagtgcaacttcagattccacatcctgttcaaggccctgggcgaggagaagggcggcgccagcctgagcccccagtacgtgagctacaaccagagcagctacacccagtgggacctgcagcccgacaccgactacgagatccacctgttcaaggagagaatgttcagacaccagatggccgtgaagaccaacggcaccggcagagtgagactgccccccgccggcttcgccaccgagggctggttcatcggcttcgtgagcgccatcatcctgctgctgctggtgctgctgatcctgtgcttcatcaagagaagcaagggcggcaagtacagcgtgaaggacaaggaggacacccaggtggacagcgaggccagacccatgaaggacgagaccttcggcgagtacagcgacaacgaggagaaggccttcggcagcagccagcccagcctgaacggcgacatcaagcccctgggcagcgacgacagcctggccgactacggcggcagcgtggacgtgcagttcaacgaggacggcagcttcatcggccagtacagcggcaagaaggagaaggaggccgccggcggcaacgacagcagcggcgccaccagccccatcaaccccgccgtggccctggagtag

SEQ ID NO: 86412 - DNA, 3747 bp, synthetic construct
  misc_feature 1..3747: note = Description of Artificial Sequence: Synthetic coding sequence
  source 1..3747: mol_type = other DNA
atggtggtggccctgagatacgtgtggcccctgctgctgtgcagcccctgcctgctgatccagatccccgaggagctgatggagccccccgtgatcaccgagcagagccccagaagactggtggtgttccccaccgacgacatcagcctgaagtgcgaggccagcggcaagcccgaggtgcagttcagatggaccagagacggcgtgcacttcaagcccaaggaggagctgggcgtgaccgtgtaccagagcccccacagcggcagcttcaccatcaccggcaacaacagcaacttcgcccagagattccagggcatctacagatgcttcgccagcaacaagctgggcaccgccatgagccacgagatcagactgatggccgagggcgcccccaagtggcccaaggagaccgtgaagcccgtggaggtggaggagggcgagagcgtggtgctgccctgcaaccccccccccagcgccgagcccctgagaatctactggatgaacagcaagatcctgcacatcaagcaggacgagagagtgaccatgggccagaacggcaacctgtacttcgccaacgtgctgaccagcgacaaccacagcgactacatctgccacgcccacttccccggcaccagaaccatcatccagaaggagcccatcgacctgagagtgaaggccaccaacagcatgatcgacagaaagcccagactgctgttccccaccaacagcagcagccacctggtggccctgcagggccagcccctggtgctggagtgcatcgccgagggcttccccacccccaccatcaagtggctgagacccagcggccccatgcccgccgacagagtgacctaccagaaccacaacaagaccctgcagctgctgaaggtgggcgaggaggacgacggcgagtacagatgcctggccgagaacagcctgggcagcgccagacacgcctactacgtgaccgtggaggccgccccctactggctgcacaagccccagagccacctgtacggccccggcgagaccgccagactggactgccaggtgcagggcagaccccagcccgaggtgacctggagaatcaacggcatccccgtggaggagctggccaaggaccagaagtacagaatccagagaggcgccctgatcctgagcaacgtgcagcccagcgacaccatggtgacccagtgcgaggccagaaacagacacggcctgctgctggccaacgcctacatctacgtggtgcagctgcccgccaagatcctgaccgccgacaaccagacctacatggccgtgcagggcagcaccgcctacctgctgtgcaaggccttcggcgcccccgtgcccagcgtgcagtggctggacgaggacggcaccaccgtgctgcaggacgagagattcttcccctacgccaacggcaccctgggcatcagagacctgcaggccaacgacaccggcagatacttctgcctggccgccaacgaccagaacaacgtgaccatcatggccaacctgaaggtgaaggacgccacccagatcacccagggccccagaagcaccatcgagaagaagggcagcagagtgaccttcacctgccaggccagcttcgaccccagcctgcagcccagcatcacctggagaggcgacggcagagacctgcaggagctgggcgacagcgacaagtacttcatcgaggacggcagactggtgatccacagcctggactacagcgaccagggcaactacagctgcgtggccagcaccgagctggacgtggtggagagcagagcccagctgctggtggtgggcagccccggccccgtgcccagactggtgctgagcgacctgcacctgctgacccagagccaggtgagagtgagctggagccccgccgaggaccacaacgcccccatcgagaagtacgacatcgagttcgaggacaaggagatggcccccgagaagtggtacagcctgggcaaggtgcccggcaaccagaccagcaccaccctgaagctgagcccctacgtgcactacaccttcagagtgaccgccatcaacaagtacggccccggcgagcccagccccgtgagcgagaccgtggtgacccccgaggccgcccccgagaagaaccccgtggacgtgaagggcgagggcaacgagaccaccaacatggtgatcacctggaagcccctgagatggatggactggaacgccccccaggtgcagtacagagtgcagtggagaccccagggcaccagaggcccctggcaggagcagatcgtgagcgaccccttcctggtggtgagcaacaccagcaccttcgtgccctacgagatcaaggtgcaggccgtgaacagccagggcaagggccccgagccccaggtgaccatcggctacagcggcgaggactacccccaggccatccccgagctggagggcatcgagatcctgaacagcagcgccgtgctggtgaagtggagacccgtggacctggcccaggtgaagggccacctgagaggctacaacgtgacctactggagagagggcagccagagaaagcacagcaagagacacatccacaaggaccacgtggtggtgcccgccaacaccaccagcgtgatcctgagcggcctgagaccctacagcagctaccacctggaggtgcaggccttcaacggcagaggcagcggccccgccagcgagttcaccttcagcacccccgagggcgtgcccggccaccccgaggccctgcacctggagtgccagagcaacaccagcctgctgctgagatggcagccccccctgagccacaacggcgtgctgaccggctacgtgctgagctaccaccccctggacgagggcggcaagggccagctgagcttcaacctgagagaccccgagctgagaacccacaacctgaccgacctgagcccccacctgagatacagattccagctgcaggccaccaccaaggagggccccggcgaggccatcgtgagagagggcggcaccatggccctgagcggcatcagcgacttcggcaacatcagcgccaccgccggcgagaactacagcgtggtgagctgggtgcccaaggagggccagtgcaacttcagattccacatcctgttcaaggccctgggcgaggagaagggcggcgccagcctgagcccccagtacgtgagctacaaccagagcagctacacccagtgggacctgcagcccgacaccgactacgagatccacctgttcaaggagagaatgttcagacaccagatggccgtgaagaccaacggcaccggcagagtgagactgccccccgccggcttcgccaccgagggctggttcatcggcttcgtgagcgccatcatcctgctgctgctggtgctgctgatcctgtgcttcatcaagagaagcaagggcggcaagtacagcgtgaaggacaaggaggacacccaggtggacagcgaggccagacccatgaaggacgagaccttcggcgagtacagcgacaacgaggagaaggccttcggcagcagccagcccagcctgaacggcgacatcaagcccctgggcagcgacgacagcctggccgactacggcggcagcgtggacgtgcagttcaacgaggacggcagcttcatcggccagtacagcggcaagaaggagaaggaggccgccggcggcaacgacagcagcggcgccaccagccccatcaaccccgccgtggccctggagtag

SEQ ID NO: 86413 - DNA, 3747 bp, synthetic construct; identical to SEQ ID NO: 86412
  misc_feature 1..3747: note = Description of Artificial Sequence: Synthetic coding sequence
  source 1..3747: mol_type = other DNA

SEQ ID NO: 86414 - DNA, 3774 bp, synthetic construct
  misc_feature 1..3774: note = Description of Artificial Sequence: Synthetic coding sequence
  source 1..3774: mol_type = other DNA
atggtggtggccctgagatacgtgtggcccctgctgctgtgcagcccctgcctgctgatccagatccccgaggagtacgagggccaccacgtgatggagccccccgtgatcaccgagcagagccccagaagactggtggtgttccccaccgacgacatcagcctgaagtgcgaggccagcggcaagcccgaggtgcagttcagatggaccagagacggcgtgcacttcaagcccaaggaggagctgggcgtgaccgtgtaccagagcccccacagcggcagcttcaccatcaccggcaacaacagcaacttcgcccagagattccagggcatctacagatgcttcgccagcaacaagctgggcaccgccatgagccacgagatcagactgatggccgagggcgcccccaagtggcccaaggagaccgtgaagcccgtggaggtggaggagggcgagagcgtggtgctgccctgcaaccccccccccagcgccgagcccctgagaatctactggatgaacagcaagatcctgcacatcaagcaggacgagagagtgaccatgggccagaacggcaacctgtacttcgccaacgtgctgaccagcgacaaccacagcgactacatctgccacgcccacttccccggcaccagaaccatcatccagaaggagcccatcgacctgagagtgaaggccaccaacagcatgatcgacagaaagcccagactgctgttccccaccaacagcagcagccacctggtggccctgcagggccagcccctggtgctggagtgcatcgccgagggcttccccacccccaccatcaagtggctgagacccagcggccccatgcccgccgacagagtgacctaccagaaccacaacaagaccctgcagctgctgaaggtgggcgaggaggacgacggcgagtacagatgcctggccgagaacagcctgggcagcgccagacacgcctactacgtgaccgtggaggccgccccctactggctgcacaagccccagagccacctgtacggccccggcgagaccgccagactggactgccaggtgcagggcagaccccagcccgaggtgacctggagaatcaacggcatccccgtggaggagctggccaaggaccagaagtacagaatccagagaggcgccctgatcctgagcaacgtgcagcccagcgacaccatggtgacccagtgcgaggccagaaacagacacggcctgctgctggccaacgcctacatctacgtggtgcagctgcccgccaagatcctgaccgccgacaaccagacctacatggccgtgcagggcagcaccgcctacctgctgtgcaaggccttcggcgcccccgtgcccagcgtgcagtggctggacgaggacggcaccaccgtgctgcaggacgagagattcttcccctacgccaacggcaccctgggcatcagagacctgcaggccaacgacaccggcagatacttctgcctggccgccaacgaccagaacaacgtgaccatcatggccaacctgaaggtgaaggacgccacccagatcacccagggccccagaagcaccatcgagaagaagggcagcagagtgaccttcacctgccaggccagcttcgaccccagcctgcagcccagcatcacctggagaggcgacggcagagacctgcaggagctgggcgacagcgacaagtacttcatcgaggacggcagactggtgatccacagcctggactacagcgaccagggcaactacagctgcgtggccagcaccgagctggacgtggtggagagcagagcccagctgctggtggtgggcagccccggccccgtgcccagactggtgctgagcgacctgcacctgctgacccagagccaggtgagagtgagctggagccccgccgaggaccacaacgcccccatcgagaagtacgacatcgagttcgaggacaaggagatggcccccgagaagtggtacagcctgggcaaggtgcccggcaaccagaccagcaccaccctgaagctgagcccctacgtgcactacaccttcagagtgaccgccatcaacaagtacggccccggcgagcccagccccgtgagcgagaccgtggtgacccccgaggccgcccccgagaagaaccccgtggacgtgaagggcgagggcaacgagaccaccaacatggtgatcacctggaagcccctgagatggatggactggaacgccccccaggtgcagtacagagtgcagtggagaccccagggcaccagaggcccctggcaggagcagatcgtgagcgaccccttcctggtggtgagcaacaccagcaccttcgtgccctacgagatcaaggtgcaggccgtgaacagccagggcaagggccccgagccccaggtgaccatcggctacagcggcgaggactacccccaggccatccccgagctggagggcatcgagatcctgaacagcagcgccgtgctggtgaagtggagacccgtggacctggcccaggtgaagggccacctgagaggctacaacgtgacctactggagagagggcagccagagaaagcacagcaagagacacatccacaaggaccacgtggtggtgcccgccaacaccaccagcgtgatcctgagcggcctgagaccctacagcagctaccacctggaggtgcaggccttcaacggcagaggcagcggccccgccagcgagttcaccttcagcacccccgagggcgtgcccggccaccccgaggccctgcacctggagtgccagagcaacaccagcctgctgctgagatggcagccccccctgagccacaacggcgtgctgaccggctacgtgctgagctaccaccccctggacgagggcggcaagggccagctgagcttcaacctgagagaccccgagctgagaacccacaacctgaccgacctgagcccccacctgagatacagattccagctgcaggccaccaccaaggagggccccggcgaggccatcgtgagagagggcggcaccatggccctgagcggcatcagcgacttcggcaacatcagcgccaccgccggcgagaactacagcgtggtgagctgggtgcccaaggagggccagtgcaacttcagattccacatcctgttcaaggccctgggcgaggagaagggcggcgccagcctgagcccccagtacgtgagctacaaccagagcagctacacccagtgggacctgcagcccgacaccgactacgagatccacctgttcaaggagagaatgttcagacaccagatggccgtgaagaccaacggcaccggcagagtgagactgccccccgccggcttcgccaccgagggctggttcatcggcttcgtgagcgccatcatcctgctgctgctggtgctgctgatcctgtgcttcatcaagagaagcaagggcggcaagtacagcgtgaaggacaaggaggacacccaggtggacagcgaggccagacccatgaaggacgagaccttcggcgagtacagaagcctggagagcgacaacgaggagaaggccttcggcagcagccagcccagcctgaacggcgacatcaagcccctgggcagcgacgacagcctggccgactacggcggcagcgtggacgtgcagttcaacgaggacggcagcttcatcggccagtacagcggcaagaaggagaaggaggccgccggcggcaacgacagcagcggcgccaccagccccatcaaccccgccgtggccctggagtag

SEQ ID NO: 86415 - DNA, 3774 bp, synthetic construct; identical to SEQ ID NO: 86414
  misc_feature 1..3774: note = Description of Artificial Sequence: Synthetic coding sequence
  source 1..3774: mol_type = other DNA

SEQ ID NO: 86416 - DNA, 456 bp, synthetic construct
  misc_feature 1..456: note = Description of Artificial Sequence: Synthetic coding sequence
  source 1..456: mol_type = other DNA
atggtggtggccctgagatacgtgtggcccctgctgctgtgcagcccctgcctgctgatccagatccccgaggagtacgagggccaccacgtgatggagccccccgtgatcaccgagcagagccccagaagactggtggtgttccccaccgacgacatcagcctgaagtgcgaggccagcggcaagcccgaggtgcagttcagatggaccagagacggcgtgcacttcaagcccaaggaggagctgggcgtgaccgtgtaccagagcccccacagcggcagcttcaccatcaccggcaacaacagcaacttcgcccagagattccagggcatctacagatgcttcgccagcaacaagctgggcaccgccatgagccacgagatcagactgatggccgagggcgcccccaagtggcccaaggagaccgtgaagcccgtggaggtggaggagggctag

SEQ ID NO: 86417 - DNA, 255 bp, synthetic construct
  misc_feature 1..255: note = Description of Artificial Sequence: Synthetic coding sequence
  source 1..255: mol_type = other DNA
atggtggtggccctgagatacgtgtggcccctgctgctgtgcagcccctgcctgctgatccagatccccgaggagtacgagggccaccacgtgatggagccccccgtgatcaccgagcagagccccagaagactggtggtgttccccaccgacgacatcagcctgaagtgcgaggccagcggcaagcccgaggtgcagttcagatggaccagagacggcgtgcacttcaagcccaaggaggagctgggcgtgtag

SEQ ID NO: 86418 - DNA, 3768 bp, synthetic construct
  misc_feature 1..3768: note = Description of Artificial Sequence: Synthetic coding sequence
  source 1..3768: mol_type = other DNA
atggtggtggccctgagatacgtgtggcccctgctgctgtgcagcccctgcctgctgatccagatccccgaggagagcttccccggccacagagtggtgatggagccccccgtgatcaccgagcagagccccagaagactggtggtgttccccaccgacgacatcagcctgaagtgcgaggccagcggcaagcccgaggtgcagttcagatggaccagagacggcgtgcacttcaagcccaaggaggagctgggcgtgaccgtgtaccagagcccccacagcggcagcttcaccatcaccggcaacaacagcaacttcgcccagagattccagggcatctacagatgcttcgccagcaacaagctgggcaccgccatgagccacgagatcagactgatggccgagggcgcccccaagtggcccaaggagaccgtgaagcccgtggaggtggaggagggcgagagcgtggtgctgccctgcaaccccccccccagcgccgagcccctgagaatctactggatgaacagcaagatcctgcacatcaagcaggacgagagagtgaccatgggccagaacggcaacctgtacttcgccaacgtgctgaccagcgacaaccacagcgactacatctgccacgcccacttccccggcaccagaaccatcatccagaaggagcccatcgacctgagagtgaaggccaccaacagcatgatcgacagaaagcccagactgctgttccccaccaacagcagcagccacctggtggccctgcagggccagcccctggtgctggagtgcatcgccgagggcttccccacccccaccatcaagtggctgagacccagcggccccatgcccgccgacagagtgacctaccagaaccacaacaagaccctgcagctgctgaaggtgggcgaggaggacgacggcgagtacagatgcctggccgagaacagcctgggcagcgccagacacgcctactacgtgaccgtggaggccgccccctactggctgcacaagccccagagccacctgtacggccccggcgagaccgccagactggactgccaggtgcagggcagaccccagcccgaggtgacctggagaatcaacggcatccccgtggaggagctggccaaggaccagaagtacagaatccagagaggcgccctgatcctgagcaacgtgcagcccagcgacaccatggtgacccagtgcgaggccagaaacagacacggcctgctgctggccaacgcctacatctacgtggtgcagctgcccgccaagatcctgaccgccgacaaccagacctacatggccgtgcagggcagcaccgcctacctgctgtgcaaggccttcggcgcccccgtgcccagcgtgcagtggctggacgaggacggcaccaccgtgctgcaggacgagagattcttcccctacgccaacggcaccctgggcatcagagacctgcaggccaacgacaccggcagatacttctgcctggccgccaacgaccagaacaacgtgaccatcatggccaacctgaaggtgaaggacgccacccagatcacccagggccccagaagcaccatcgagaagaagggcagcagagtgaccttcacctgccaggccagcttcgaccccagcctgcagcccagcatcacctggagaggcgacggcagagacctgcaggagctgggcgacagcgacaagtacttcatcgaggacggcagactggtgatccacagcctggactacagcgaccagggcaactacagctgcgtggccagcaccgagctggacgtggtggagagcagagcccagctgctggtggtgggcagccccggccccgtgcccagactggtgctgagcgacctgcacctgctgacccagagccaggtgagagtgagctggagccccgccgaggaccacaacgcccccatcgagaagtacgacatcgagttcgaggacaaggagatggcccccgagaagtggtacagcctgggcaaggtgcccggcaaccagaccagcaccaccctgaagctgagcccctacgtgcactacaccttcagagtgaccgccatcaacaagtacggccccggcgagcccagccccgtgagcgagaccgtggtgacccccgaggccgcccccgagaagaaccccgtggacgtgaagggcgagggcaacgagaccaccaacatggtgatcacctggaagcccctgagatggatggactggaacgccccccaggtgcagtacagagtgcagtggagaccccagggcaccagaggcccctggcaggagcagatcgtgagcgaccccttcctggtggtgagcaacaccagcaccttcgtgccctacgagatcaaggtgcaggccgtgaacagccagggcaagggccccgagccccaggtgaccatcggctacagcggcgaggactacccccaggccatccccgagctggagggcatcgagatcctgaacagcagcgccgtgctggtgaagtggagacccgtggacctggcccaggtgaagggccacctgagaggctacaacgtgacctactggagagagggcagccagagaaagcacagcaagagacacatccacaaggaccacgtggtggtgcccgccaacaccaccagcgtgatcctgagcggcctgagaccctacagcagctaccacctggaggtgcaggccttcaacggcagaggcagcggccccgccagcgagttcaccttcagcacccccgagggcgtgcccggccaccccgaggccctgcacctggagtgccagagcaacaccagcctgctgctgagatggcagccccccctgagccacaacggcgtgctgaccggctacgtgctgagctaccaccccctggacgagggcggcaagggccagctgagcttcaacctgagagaccccgagctgagaacccacaacctgaccgacctgagcccccacctgagatacagattccagctgcaggccaccaccaaggagggccccggcgaggccatcgtgagagagggcggcaccatggccctgagcggcatcagcgacttcggcaacatcagcgccaccgccggcgagaactacagcgtggtgagctgggtgcccaaggagggccagtgcaacttcagattccacatcctgttcaaggccctgggcgaggagaagggcggcgccagcctgagcccccagtacgtgagctacaaccagagcagctacacccagtgggacctgcagcccgacaccgactacgagatccacctgttcaaggagagaatgttcagacaccagatggccgtgaagaccaacggcaccggcagagtgagactgccccccgccggcttcgccaccgagggctggttcatcggcttcgtgagcgccatcatcctgctgctgctggtgctgctgatcctgtgcttcatcaagagaagcaagggcggcaagtacagcgtgaaggacaaggaggacacccaggtggacagcgaggccagacccatgaaggacgagaccttcggcgagtacagcgacaacgaggagaaggccttcggcagcagccagcccagcctgaacggcgacatcaagcccctgggcagcgacgacagcctggccgactacggcggcagcgtggacgtgcagttcaacgaggacggcagcttcatcggccagtacagcggcaagaaggagaaggaggccgccggcggcaacgacagcagcggcgccaccagccccatcaaccccgccgtggccctggagtag

SEQ ID NO: 86419 - DNA, 351 bp, synthetic construct
  misc_feature 1..351: note = Description of Artificial Sequence: Synthetic coding sequence
  source 1..351: mol_type = other DNA
atggccgagggcgcccccaagtggcccaaggagaccgtgaagcccgtggaggtggaggagggcgagagcgtggtgctgccctgcaaccccccccccagcgccgagcccctgagaatctactggatgaacagcaagatcctgcacatcaagcaggacgagagagtgaccatgggccagaacggcaacctgtacttcgccaacgtgctgaccagcgacaaccacagcgactacatctgccacgcccacttccccggcaccagaaccatcatccagaaggagcccatcgacctgagagtgaaggccaccaacagcatgatcgacagaaagcccagactgctgttccccacctag

SEQ ID NO: 86420 - DNA, 3780 bp, synthetic construct
  misc_feature 1..3780: note = Description of Artificial Sequence: Synthetic coding sequence
  source 1..3780: mol_type = other DNA
atggtggtggccctgagatacgtgtggcccctgctgctgtgcagcccctgcctgctgatccagatccccgaggagagcttccccggccacagagtggtgatggagccccccgtgatcaccgagcagagccccagaagactggtggtgttccccaccgacgacatcagcctgaagtgcgaggccagcggcaagcccgaggtgcagttcagatggaccagagacggcgtgcacttcaagcccaaggaggagctgggcgtgaccgtgtaccagagcccccacagcggcagcttcaccatcaccggcaacaacagcaacttcgcccagagattccagggcatctacagatgcttcgccagcaacaagctgggcaccgccatgagccacgagatcagactgatggccgagggcgcccccaagtggcccaaggagaccgtgaagcccgtggaggtggaggagggcgagagcgtggtgctgccctgcaaccccccccccagcgccgagcccctgagaatctactggatgaacagcaagatcctgcacatcaagcaggacgagagagtgaccatgggccagaacggcaacctgtacttcgccaacgtgctgaccagcgacaaccacagcgactacatctgccacgcccacttccccggcaccagaaccatcatccagaaggagcccatcgacctgagagtgaaggccaccaacagcatgatcgacagaaagcccagactgctgttccccaccaacagcagcagccacctggtggccctgcagggccagcccctggtgctggagtgcatcgccgagggcttccccacccccaccatcaagtggctgagacccagcggccccatgcccgccgacagagtgacctaccagaaccacaacaagaccctgcagctgctgaaggtgggcgaggaggacgacggcgagtacagatgcctggccgagaacagcctgggcagcgccagacacgcctactacgtgaccgtggaggccgccccctactggctgcacaagccccagagccacctgtacggccccggcgagaccgccagactggactgccaggtgcagggcagaccccagcccgaggtgacctggagaatcaacggcatccccgtggaggagctggccaaggaccagaagtacagaatccagagaggcgccctgatcctgagcaacgtgcagcccagcgacaccatggtgacccagtgcgaggccagaaacagacacggcctgctgctggccaacgcctacatctacgtggtgcagctgcccgccaagatcctgaccgccgacaaccagacctacatggccgtgcagggcagcaccgcctacctgctgtgcaaggccttcggcgcccccgtgcccagcgtgcagtggctggacgaggacggcaccaccgtgctgcaggacgagagattcttcccctacgccaacggcaccctgggcatcagagacctgcaggccaacgacaccggcagatacttctgcctggccgccaacgaccagaacaacgtgaccatcatggccaacctgaaggtgaaggacgccacccagatcacccagggccccagaagcaccatcgagaagaagggcagcagagtgaccttcacctgccaggccagcttcgaccccagcctgcagcccagcatcacctggagaggcgacggcagagacctgcaggagctgggcgacagcgacaagtacttcatcgaggacggcagactggtgatccacagcctggactacagcgaccagggcaactacagctgcgtggccagcaccgagctggacgtggtggagagcagagcccagctgctggtggtgggcagccccggccccgtgcccagactggtgctgagcgacctgcacctgctgacccagagccaggtgagagtgagctggagccccgccgaggaccacaacgcccccatcgagaagtacgacatcgagttcgaggacaaggagatggcccccgagaagtggtacagcctgggcaaggtgcccggcaaccagaccagcaccaccctgaagctgagcccctacgtgcactacaccttcagagtgaccgccatcaacaagtacggccccggcgagcccagccccgtgagcgagaccgtggtgacccccgaggccgcccccgagaagaaccccgtggacgtgaagggcgagggcaacgagaccaccaacatggtgatcacctggaagcccctgagatggatggactggaacgccccccaggtgcagtacagagtgcagtggagaccccagggcaccagaggcccctggcaggagcagatcgtgagcgaccccttcctggtggtgagcaacaccagcaccttcgtgccctacgagatcaaggtgcaggccgtgaacagccagggcaagggccccgagccccaggtgaccatcggctacagcggcgaggactacccccaggccatccccgagctggagggcatcgagatcctgaacagcagcgccgtgctggtgaagtggagacccgtggacctggcccaggtgaagggccacctgagaggctacaacgtgacctactggagagagggcagccagagaaagcacagcaagagacacatccacaaggaccacgtggtggtgcccgccaacaccaccagcgtgatcctgagcggcctgagaccctacagcagctaccacctggaggtgcaggccttcaacggcagaggcagcggccccgccagcgagttcaccttcagcacccccgagggcgtgcccggccaccccgaggccctgcacctggagtgccagagcaacaccagcctgctgctgagatggcagccccccctgagccacaacggcgtgctgaccggctacgtgctgagctaccaccccctggacgagggcggcaagggccagctgagcttcaacctgagagaccccgagctgagaacccacaacctgaccgacctgagcccccacctgagatacagattccagctgcaggccaccaccaaggagggccccggcgaggccatcgtgagagagggcggcaccatggccctgagcggcatcagcgacttcggcaacatcagcgccaccgccggcgagaactacagcgtggtgagctgggtgcccaaggagggccagtgcaacttcagattccacatcctgttcaaggccctgggcgaggagaagggcggcgccagcctgagcccccagtacgtgagctacaaccagagcagctacacccagtgggacctgcagcccgacaccgactacgagatccacctgttcaaggagagaatgttcagacaccagatggccgtgaagaccaacggcaccggcagagtgagactgccccccgccggcttcgccaccgagggctggttcatcggcttcgtgagcgccatcatcctgctgctgctggtgctgctgatcctgtgcttcatcaagagaagcaagggcggcaagtacagcgtgaaggacaaggaggacacccaggtggacagcgaggccagacccatgaaggacgagaccttcggcgagtacagaagcctggagagcgacaacgaggagaaggccttcggcagcagccagcccagcctgaacggcgacatcaagcccctgggcagcgacgacagcctggccgactacggcggcagcgtggacgtgcagttcaacgaggacggcagcttcatcggccagtacagcggcaagaaggagaaggaggccgccggcggcaacgacagcagcggcgccaccagccccatcaaccccgccgtggccctggagtag

SEQ ID NO: 86421 - DNA, 1326 bp, synthetic construct
  misc_feature 1..1326: note = Description of Artificial Sequence: Synthetic coding sequence
  source 1..1326: mol_type = other DNA
atggtgcccgccctgagatacctggtgggcgcctgcggcagagccagaggcctgttcgccggcggcagccccggcgcctgcggcttcgccagcggcagacccagacccctgtgcggcggcagcagaagcgccagcaccagcagcttcgacatcgtgatcgtgggcggcggcatcgtgggcctggccagcgccagagccctgatcctgagacaccccagcctgagcatcggcgtgctggagaaggagaaggacctggccgtgcaccagaccggccacaacagcggcgtgatccacagcggcatctactacaagcccgagagcctgaaggccaagctgtgcgtgcagggcgccgccctgctgtacgagtactgccagcagaagggcatcagctacaagcagtgcggcaagctgatcgtggccgtggagcaggaggagatccccagactgcaggccctgtacgagaagggcctgcagaacggcgtgcccggcctgagactgatccagcaggaggacatcaagaagaaggagccctactgcagaggcctgatggccatcgactgcccccacaccggcatcgtggactacagacaggtggccctgagcttcgcccaggacttccaggaggccggcggcagcgtgctgaccaacttcgaggtgaagggcatcgagatggccaaggagagccccagcagaagcatcgacggcatgcagtaccccatcgtgatcaagaacaccaagggcgaggagatcagatgccagtacgtggtgacctgcgccggcctgtacagcgacagaatcagcgagctgagcggctgcacccccgaccccagaatcgtgcccttcagaggcgactacctgctgctgaagcccgagaagtgctacctggtgaagggcaacatctaccccgtgcccgacagcagattccccttcctgggcgtgcacttcacccccagaatggacggcagcatctggctgggccccaacgccgtgctggccttcaagagagagggctacagacccttcgacttcagcgccaccgacgtgatggacatcatcatcaacagcggcctgatcaagctggccagccagaacttcagctacggcgtgaccgagatgtacaaggcctgcttcctgggcgccaccgtgaagtacctgcagaagttcatccccgagatcaccatcagcgacatcctgagacaggtggccgtgagaggccccagctggctgtggcagcagcccatgaaggtgagcgacaacaacatctactgcttcctgtggagatgcttcgccctgctgctgaccggcagcgcctgcagcttcaagtag

SEQ ID NO: 86422 - DNA, 1392 bp, synthetic construct
  misc_feature 1..1392: note = Description of Artificial Sequence: Synthetic coding sequence
  source 1..1392: mol_type = other DNA
atggtgcccgccctgagatacctggtgggcgcctgcggcagagccagaggcctgttcgccggcggcagccccggcgcctgcggcttcgccagcggcagacccagacccctgtgcggcggcagcagaagcgccagcaccagcagcttcgacatcgtgatcgtgggcggcggcatcgtgggcctggccagcgccagagccctgatcctgagacaccccagcctgagcatcggcgtgctggagaaggagaaggacctggccgtgcaccagaccggccacaacagcggcgtgatccacagcggcatctactacaagcccgagagcctgaaggccaagctgtgcgtgcagggcgccgccctgctgtacgagtactgccagcagaagggcatcagctacaagcagtgcggcaagctgatcgtggccgtggagcaggaggagatccccagactgcaggccctgtacgagaagggcctgcagaacggcgtgcccggcctgagactgatccagcaggaggacatcaagaagaaggagccctactgcagaggcctgatggccatcgactgcccccacaccggcatcgtggactacagacaggtggccctgagcttcgcccaggacttccaggaggccggcggcagcgtgctgaccaacttcgaggtgaagggcatcgagatggccaaggagagccccagcagaagcatcgacggcatgcagtaccccatcgtgatcaagaacaccaagggcgaggagatcagatgccagtacgtggtgacctgcgccggcctgtacagcgacagaatcagcgagctgagcggctgcacccccgaccccagaatcgtgcccttcagaggcgactacctgctgctgaagcccgagaagtgctacctggtgaagggcaacatctaccccgtgcccgacagcagattccccttcctgggcgtgcacttcacccccagaatggacggcagcatctggctgggccccaacgccgtgctggccttcaagagagagggctacagacccttcgacttcagcgccaccgacgtgatggacatcatcatcaacagcggcctgatcaagctggccagccagaacttcagctacggcgtgaccgagatgtacaaggcctgcttcctgggcgccaccgtgaagtacctgcagaagttcatccccgagatcaccatcagcgacatcctgagaggccccgccggcgtgagagcccaggccctggacagagacggcaacctggtggaggacttcgtgttcgacgccggcgtgggcgacatcggcaacagaatcctgcacgtgagaaacgcccccagccccgccgccaccagcagcatcgccatcagcggcatgatcgccgacgaggtgcagcagagattcgagctgtag

SEQ ID NO: 86423 - DNA, 1392 bp, synthetic construct; identical to SEQ ID NO: 86422
  misc_feature 1..1392: note = Description of Artificial Sequence: Synthetic coding sequence
  source 1..1392: mol_type = other DNA

SEQ ID NO: 86424 - DNA, 3060 bp, synthetic construct
  misc_feature 1..3060: note = Description of Artificial Sequence: Synthetic coding sequence
  source 1..3060: mol_type = other DNA
atgctgtggagagtgctgctgagcaagagaccccccttcccccaccccgagctggacttccaggaggcccccatccccagctgccccggcagactgcccggcagaaagaacagcgtggccctggccgccgcccccagaaaggagcccaccggcgacagagagaagcccctgcccttccccgtgctggcccccttcagcaaccccgagcacagcgcccccgccaaggtggtgagagccgccgtgcccaagcagagaaagggcagcaaggtgggcgacttcggcgacgccatcaactggcccacccccggcgagatcgcccacaagagcgtgcagccccagagccacaagccccagcccaccagaaagctgccccccaagaaggacatgaaggagcaggagaagggcgagggcagcgacagcaaggagagccccaagaccaagagcgacgagagcggcgaggagaagaacggcgacgaggactgccagagaggcggccagaagaagaagggcaacaagcacaagtgggtgcccctgcagatcgacatgaagcccgaggtgcccagagagaagctggccagcagacccaccagaccccccgagcccagacacatccccgccaacagaggcgagatcaagggcagcgagagcgccacctacgtgcccgtggccccccccacccccgcctggcagcccgagatcaagcccgagcccgcctggcacgaccaggacgagaccagcagcgtgaagagcgacggcgccggcggcgccagagccagcttcagaggcagaggcagaggcagaggcagaggcagaggcagaggcagaggcggcaccagaacccacttcgactaccagttcggctacagaaagttcgacggcgtggagggccccagaacccccaagtacatgaacaacatcacctactacttcgacaacgtgagcagcaccgagctgtacagcgtggaccaggagctgctgaaggactacatcaagagacagatcgagtactacttcagcgtggacaacctggagagagacttcttcctgagaagaaagatggacgccgacggcttcctgcccatcaccctgatcgccagcttccacagagtgcaggccctgaccaccgacatcagcctgatcttcgccgccctgaaggacagcaaggtggtggagatcgtggacgagaaggtgagaagaagagaggagcccgagaagtggcccctgccccccatcgtggactacagccagaccgacttcagccagctgctgaactgccccgagttcgtgcccagacagcactaccagaaggagaccgagagcgcccccggcagccccagagccgtgacccccgtgcccaccaagaccgaggaggtgagcaacctgaagaccctgcccaagggcctgagcgccagcctgcccgacctggacagcgagaactggatcgaggtgaagaagagacccagacccagccccgccagacccaagaagagcgaggagagcagattcagccacctgaccagcctgccccagcagctgcccagccagcagctgatgagcaaggaccaggacgagcaggaggagctggacttcctgttcgacgaggagatggagcagatggacggcagaaagaacaccttcaccgcctggagcgacgaggagagcgactacgagatcgacgacagagacgtgaacaagatcctgatcgtgacccagaccccccactacatgagaagacaccccggcggcgacagaaccggcaaccacaccagcagagccaagatgagcgccgagctggccaaggtgatcaacgacggcctgttctactacgagcaggacctgtgggccgagaagttcgagcccgagtacagccagatcaagcaggaggtggagaacttcaagaaggtgaacatgatcagcagagagcagttcgacaccctgacccccgagccccccgtggaccccaaccaggaggtgccccccggcccccccagattccagcaggtgcccaccgacgccctggccaacaagctgttcggcgcccccgagcccagcaccatcgccagaagcctgcccaccaccgtgcccgagagccccaactacagaaacaccagaacccccagaacccccagaaccccccagctgaaggacagcagccagaccagcagattctaccccgtggtgaaggagggcagaaccctggacgccaagatgcccagaaagagaaagaccagacacagcagcaacccccccctggagagccacgtgggctgggtgatggacagcagagagcacagacccagaaccgccagcatcagcagcagccccagcgagggcacccccaccgtgggcagctacggctgcaccccccagagcctgcccaagttccagcaccccagccacgagctgctgaaggagaacggcttcacccagcacgtgtaccacaagtacagaagaagatgcctgaacgagagaaagagactgggcatcggccagagccaggagatgaacaccctgttcagattctggagcttcttcctgagagaccacttcaacaagaagatgtacgaggagttcaagcagctggccctggaggacgccaaggagggctacagatacggcctggagtgcctgttcagatactacagctacggcctggagaagaagttcagactggacatcttcaaggacttccaggaggagaccgtgaaggactacgaggccggccagctgtacggcctggagaagttctgggccttcctgaagtacagcaaggccaagaacctggacatcgaccccaagctgcaggagtacctgggcaagttcagaagactggaggacttcagagtggacccccccatgggcgaggagggcaaccacaagagacacagcgtggtggccggcggcggcggcggcgagggcagaaagagatgccccagccagagcagcagcagacccgccgccatgatcagccagccccccaccccccccaccggccagcccgtgagagaggacgccaagtggaccagccagcacagcaacacccagaccctgggcaagtag

SEQ ID NO: 86425 - DNA, 2451 bp, synthetic construct
  misc_feature 1..2451: note = Description of Artificial Sequence: Synthetic coding sequence
  source 1..2451: mol_type = other DNA
atggccacccaggtggagcccctgctgcccggcggcgccaccctgctgcaggccgaggagcacggcggcctggtgagaaagaagcccccccccgcccccgagggcaagggcgagcccggccccaacgacgtgagaggcggcgagcccgacggcagcgccagaagacccagacccccctgcgccaagccccacaaggagggcaccggccagcaggagagagagagccccagacccctgcagctgcccggcgccgagggccccgccatcagcgacggcgaggagggcggcggcgagcccggcgccggcggcggcgccgccggcgccgccggcgccggcagaagagacttcgtggaggcccccccccccaaggtgaacccctggaccaagaacgccctgccccccgtgctgaccaccgtgaacggccagagcccccccgagcacagcgcccccgccaaggtggtgagagccgccgtgcccaagcagagaaagggcagcaaggtgggcgacttcggcgacgccatcaactggcccacccccggcgagatcgcccacaagagcgtgcagccccagagccacaagccccagcccaccagaaagctgccccccaagaaggacatgaaggagcaggagaagggcgagggcagcgacagcaaggagagccccaagaccaagagcgacgagagcggcgaggagaagaacggcgacgaggactgccagagaggcggccagaagaagaagggcaacaagcacaagtgggtgcccctgcagatcgacatgaagcccgaggtgcccagagagaagctggccagcagacccaccagaccccccgagcccagacacatccccgccaacagaggcgagatcaagggcagcgagagcgccacctacgtgcccgtggccccccccacccccgcctggcagcccgagatcaagcccgagcccgcctggcacgaccaggacgagaccagcagcgtgaagagcgacggcgccggcggcgccagagccagcttcagaggcagaggcagaggcagaggcagaggcagaggcagaggcagaggcggcaccagaacccacttcgactaccagttcggctacagaaagttcgacggcgtggagggccccagaacccccaagtacatgaacaacatcacctactacttcgacaacgtgagcagcaccgagctgtacagcgtggaccaggagctgctgaaggactacatcaagagacagatcgagtactacttcagcgtggacaacctggagagagacttcttcctgagaagaaagatggacgccgacggcttcctgcccatcaccctgatcgccagcttccacagagtgcaggccctgaccaccgacatcagcctgatcttcgccgccctgaaggacagcaaggtggtggagatcgtggacgagaaggtgagaagaagagaggagcccgagaagtggcccctgccccccatcgtggactacagccagaccgacttcagccagctgctgaactgccccgagttcgtgcccagacagcactaccagaaggagaccgagagcgcccccggcagccccagagccgtgacccccgtgcccaccaagaccgaggaggtgagcaacctgaagaccctgcccaagggcctgagcgccagcctgcccgacctggacagcgagaactggatcgaggtgaagaagagacccagacccagccccgccagacccaagaagagcgaggagagcagattcagccacctgaccagcctgccccagcagctgcccagccagcagctgatgagcaaggaccaggacgagcaggaggagctggacttcctgttcgacgaggagatggagcagatggacggcagaaagaacaccttcaccgcctggagcgacgaggagagcgactacgagatcgacgacagagacgtgaacaagatcctgatcgtgacccagaccccccactacatgagaagacaccccggcggcgacagaaccggcaaccacaccagcagagccaagatgagcgccgagctggccaaggtgatcaacgacggcctgttctactacgagcaggacctgtgggccgagaagttcgagcccgagtacagccagatcaagcaggaggtggagaacttcaagaaggtgaacatgatcagcagagagcagttcgacaccctgacccccgagccccccgtggaccccaaccaggaggtgccccccggcccccccagattccagcaggtgcccaccgacgccctggccaacaagctgttcggcgcccccgagcccagcaccatcgccagaagcctgcccaccaccgtgcccgagagccccaactacagaaacaccagaacccccagaacccccagaaccccccagctgaaggacagcagccagaccagcagattctaccccgtggtgaaggagggcagaaccctggacgccaagatgcccagatag

SEQ ID NO: 86426 - DNA, 282 bp, synthetic construct
  misc_feature 1..282: note = Description of Artificial Sequence: Synthetic coding sequence
  source 1..282: mol_type = other DNA
atgaaggagcaggagaagggcgagggcagcgacagcaaggagagccccaagaccaagagcgacgagagcggcgaggagaagaacggcgacgaggactgccagagaggcggccagaagaagaagggcaacaagcacaagtgggtgcccctgcagatcgacatgaagcccgaggtgcccagagagaagctggccagcagacccaccagaccccccgagcccagacacatccccgccaacagaggcgagatcaagggcagcgagagcgccacctacgtgccctag

SEQ ID NO: 86427 - DNA, 1836 bp, synthetic construct
  misc_feature 1..1836: note = Description of Artificial Sequence: Synthetic coding sequence
  source 1..1836: mol_type = other DNA
atgaaggagcaggagaagggcgagggcagcgacagcaaggagagccccaagaccaagagcgacgagagcggcgaggagaagaacggcgacgaggactgccagagaggcggccagaagaagaagggcaacaagcacaagtgggtgcccctgcagatcgacatgaagcccgaggtgcccagagagaagctggccagcagacccaccagaccccccgagcccagacacatccccgccaacagaggcgagatcaagggcagcgagagcgccacctacgtgcccgtggccccccccacccccgcctggcagcccgagatcaagcccgagcccgcctggcacgaccaggacgagaccagcagcgtgaagagcgacggcgccggcggcgccagagccagcttcagaggcagaggcagaggcagaggcagaggcagaggcagaggcagaggcggcaccagaacccacttcgactaccagttcggctacagaaagttcgacggcgtggagggccccagaacccccaagtacatgaacaacatcacctactacttcgacaacgtgagcagcaccgagctgtacagcgtggaccaggagctgctgaaggactacatcaagagacagatcgagtactacttcagcgtggacaacctggagagagacttcttcctgagaagaaagatggacgccgacggcttcctgcccatcaccctgatcgccagcttccacagagtgcaggccctgaccaccgacatcagcctgatcttcgccgccctgaaggacagcaaggtggtggagatcgtggacgagaaggtgagaagaagagaggagcccgagaagtggcccctgccccccatcgtggactacagccagaccgacttcagccagctgctgaactgccccgagttcgtgcccagacagcactaccagaaggagaccgagagcgcccccggcagccccagagccgtgacccccgtgcccaccaagaccgaggaggtgagcaacctgaagaccctgcccaagggcctgagcgccagcctgcccgacctggacagcgagaactggatcgaggtgaagaagagacccagacccagccccgccagacccaagaagagcgaggagagcagattcagccacctgaccagcctgccccagcagctgcccagccagcagctgatgagcaaggaccaggacgagcaggaggagctggacttcctgttcgacgaggagatggagcagatggacggcagaaagaacaccttcaccgcctggagcgacgaggagagcgactacgagatcgacgacagagacgtgaacaagatcctgatcgtgacccagaccccccactacatgagaagacaccccggcggcgacagaaccggcaaccacaccagcagagccaagatgagcgccgagctggccaaggtgatcaacgacggcctgttctactacgagcaggacctgtgggccgagaagttcgagcccgagtacagccagatcaagcaggaggtggagaacttcaagaaggtgaacatgatcagcagagagcagttcgacaccctgacccccgagccccccgtggaccccaaccaggaggtgccccccggcccccccagattccagcaggtgcccaccgacgccctggccaacaagctgttcggcgcccccgagcccagcaccatcgccagaagcctgcccaccaccgtgcccgagagccccaactacagaaacaccagaacccccagaacccccagaaccccccagctgaaggacagcagccagaccagcagattctaccccgtggtgaaggagggcagaaccctggacgccaagatgcccagatag

SEQ ID NO: 86428 - DNA, 1749 bp, synthetic construct
  misc_feature 1..1749: note = Description of Artificial Sequence: Synthetic coding sequence
  source 1..1749: mol_type = other DNA
atggagaccgagagcggcaaccaggagaaggtgatggaggaggagagcaccgagaagaagaaggaggtggagaagaagaagagaagcagagtgaagcaggtgctggccgacatcgccaagcaggtggacttctggttcggcgacgccaacctgcacaaggacagattcctgagagagcagatcgagaagagcagagacggctacgtggacatcagcctgctggtgagcttcaacaagatgaagaagctgaccaccgacggcaagctgatcgccagagccctgagaagcagcgccgtggtggagctggacctggagggcaccagaatcagaagaaagaagcccctgggcgagagacccaaggacgaggacgagagaaccgtgtacgtggagctgctgcccaagaacgtgaaccacagctggatcgagagagtgttcggcaagtgcggcaacgtggtgtacatcagcatcccccactacaagagcaccggcgaccccaagggcttcgccttcgtggagttcgagaccaaggagcaggccgccaaggccatcgagttcctgaacaacccccccgaggaggcccccagaaagcccggcatcttccccaagaccgtgaagaacaagcccatccccgccctgagagtggtggaggagaagaagaagaagaagaagaagaagggcagaatgaagaaggaggacaacatccaggccaaggaggagaacatggacaccagcaacaccagcatcagcaagatgaagagaagcagacccaccagcgagggcagcgacatcgagagcaccgagccccagaagcagtgcagcaagaagaagaagaagagagacagagtggaggccagcagcctgcccgaggtgagaaccggcaagagaaagagaagcagcagcgaggacgccgagagcctggcccccagaagcaaggtgaagaagatcatccagaaggacatcatcaaggaggccagcgaggccagcaaggagaacagagacatcgagatcagcaccgaggaggagaaggacaccggcgacctgaaggacagcagcctgctgaagaccaagagaaagcacaagaagaagcacaaggagagacacaagatgggcgaggaggtgatccccctgagagtgctgagcaagagcgagtggatggacctgaagaaggagtacctggccctgcagaaggccagcatggccagcctgaagaagaccatcagccagatcaagagcgagagcgagatggagaccgacagcggcgtgccccagaacaccggcatgaagaacgagaagaccgccaacagagaggagtgcagaacccaggagaaggtgaacgccaccggcccccagttcgtgagcggcgtgatcgtgaagatcatcagcaccgagcccctgcccggcagaaagcaggtgagagacaccctggccgccatcagcgaggtgctgtacgtggacctgctggagggcgacaccgagtgccacgccagattcaagacccccgaggacgcccaggccgtgatcaacgcctacaccgagatcaacaagaagcactgctggaagctggagatcctgagcggcgaccacgagcagagatactggcagaagatcctggtggacagacaggccaagctgaaccagcccagagagaagaagagaggcaccgagaagctgatcaccaaggccgagaagatcagactggccaagacccagcaggccagcaagcacatcagattcagcgagtacgactag

SEQ ID NO: 86429 - DNA, 1749 bp, synthetic construct; identical to SEQ ID NO: 86428
  misc_feature 1..1749: note = Description of Artificial Sequence: Synthetic coding sequence
  source 1..1749: mol_type = other DNA

SEQ ID NO: 86430 - DNA, 900 bp, synthetic construct
  misc_feature 1..900: note = Description of Artificial Sequence: Synthetic coding sequence
  source 1..900: mol_type = other DNA
atggagaccgagagcggcaaccaggagaaggtgatggaggaggagagcaccgagaagaagaaggaggtggagaagaagaagagaagcagagtgaagcaggtgctggccgacatcgccaagcaggtggacttctggttcggcgacgccaacctgcacaaggacagattcctgagagagcagatcgagaagagcagagacggctacgtggacatcagcctgctggtgagcttcaacaagatgaagaagctgaccaccgacggcaagctgatcgccagagccctgagaagcagcgccgtggtggagctggacctggagggcaccagaatcagaagaaagaagcccctgggcgagagacccaaggacgaggacgagagaaccgtgtacgtggagctgctgcccaagaacgtgaaccacagctggatcgagagagtgttcggcaagtgcggcaacgtggtgtacatcagcatcccccactacaagagcaccggcgaccccaagggcttcgccttcgtggagttcgagaccaaggagcaggccgccaaggccatcgagttcctgaacaacccccccgaggaggcccccagaaagcccggcatcttccccaagaccgtgaagaacaagcccatccccgccctgagagtggtggaggagaagaagaagaagaagaagaagaagggcagaatgaagaaggaggacaacatccaggccaaggaggagaacatggacaccagcaacaccagcatcagcaagatgaagagaagcagacccaccagcgagggcagcgacatcgagagcaccgagccccagaagcagtgcagcaagaagaagaagaagagagacagagtggaggccagcagcctgcccgaggtgagaaccggcaagagaaagagaagcagctag

SEQ ID NO: 86431 - DNA, 390 bp, synthetic construct
  misc_feature 1..390: note = Description of Artificial Sequence: Synthetic coding sequence
  source 1..390: mol_type = other DNA
atggagaccgagagcggcaaccaggagaaggtgatggaggaggagagcaccgagaagaagaaggaggtggagaagaagaagagaagcagagtgaagcaggtgctggccgacatcgccaagcaggtggacttctggttcggcgacgccaacctgcacaaggacagattcctgagagagcagatcgagaagagcagagacggctacgtggacatcagcctgctggtgagcttcaacaagatgaagaagctgaccaccgacggcaagctgatcgccagagccctgagaagcagcgccgtggtggagctggacctggagggcaccagaatcagaagaaagaagcccctgggcgagagacccaaggacgaggacgagagaaccgtgtacgtgtag

SEQ ID NO: 86432 - DNA, 360 bp, synthetic construct
  misc_feature 1..360: note = Description of Artificial Sequence: Synthetic coding sequence
  source 1..360: mol_type = other DNA
atggagaccgagagcggcaaccaggagaaggtgatggaggaggagagcaccgagaagaagaaggaggtggagaagaagaagagaagcagagtgaagcaggtgctggccgacatcgccaagcaggtggacttctggttcggcgacgccaacctgcacaaggacagattcctgagagagcagatcgagaagagcagagacggctacgtggacatcagcctgctggtgagcttcaacaagatgaagaagctgaccaccgacggcaagctgatcgccagagccctgagaagcagcgccgtggtggagctggacctggagggcaccagaatcagaagaaagaagcccctgggcgagagaccctag

SEQ ID NO: 86433 - DNA, 1770 bp, synthetic construct
  misc_feature 1..1770: note = Description of Artificial Sequence: Synthetic coding sequence
  source 1..1770: mol_type = other DNA
atgatccccaacatcgagggcatggagaccgagagcggcaaccaggagaaggtgatggaggaggagagcaccgagaagaagaaggaggtggagaagaagaagagaagcagagtgaagcaggtgctggccgacatcgccaagcaggtggacttctggttcggcgacgccaacctgcacaaggacagattcctgagagagcagatcgagaagagcagagacggctacgtggacatcagcctgctggtgagcttcaacaagatgaagaagctgaccaccgacggcaagctgatcgccagagccctgagaagcagcgccgtggtggagctggacctggagggcaccagaatcagaagaaagaagcccctgggcgagagacccaaggacgaggacgagagaaccgtgtacgtggagctgctgcccaagaacgtgaaccacagctggatcgagagagtgttcggcaagtgcggcaacgtggtgtacatcagcatcccccactacaagagcaccggcgaccccaagggcttcgccttcgtggagttcgagaccaaggagcaggccgccaaggccatcgagttcctgaacaacccccccgaggaggcccccagaaagcccggcatcttccccaagaccgtgaagaacaagcccatccccgccctgagagtggtggaggagaagaagaagaagaagaagaagaagggcagaatgaagaaggaggacaacatccaggccaaggaggagaacatggacaccagcaacaccagcatcagcaagatgaagagaagcagacccaccagcgagggcagcgacatcgagagcaccgagccccagaagcagtgcagcaagaagaagaagaagagagacagagtggaggccagcagcctgcccgaggtgagaaccggcaagagaaagagaagcagcagcgaggacgccgagagcctggcccccagaagcaaggtgaagaagatcatccagaaggacatcatcaaggaggccagcgaggccagcaaggagaacagagacatcgagatcagcaccgaggaggagaaggacaccggcgacctgaaggacagcagcctgctgaagaccaagagaaagcacaagaagaagcacaaggagagacacaagatgggcgaggaggtgatccccctgagagtgctgagcaagagcgagtggatggacctgaagaaggagtacctggccctgcagaaggccagcatggccagcctgaagaagaccatcagccagatcaagagcgagagcgagatggagaccgacagcggcgtgccccagaacaccggcatgaagaacgagaagaccgccaacagagaggagtgcagaacccaggagaaggtgaacgccaccggcccccagttcgtgagcggcgtgatcgtgaagatcatcagcaccgagcccctgcccggcagaaagcaggtgagagacaccctggccgccatcagcgaggtgctgtacgtggacctgctggagggcgacaccgagtgccacgccagattcaagacccccgaggacgcccaggccgtgatcaacgcctacaccgagatcaacaagaagcactgctggaagctggagatcctgagcggcgaccacgagcagagatactggcagaagatcctggtggacagacaggccaagctgaaccagcccagagagaagaagagaggcaccgagaagctgatcaccaaggccgagaagatcagactggccaagacccagcaggccagcaagcacatcagattcagcgagtacgactag

SEQ ID NO: 86434 - DNA, 417 bp, synthetic construct
  misc_feature 1..417: note = Description of Artificial Sequence: Synthetic coding sequence
  source 1..417: mol_type = other DNA
atgaagttcaccaccctgctgttcctggccgccgtggccggcgccctggtgtacgccgaggacgccagcagcgacagcaccggcgccgaccccgcccaggaggccggcaccagcaagcccaacgaggagatcagcggccccgccgagcccgccagcccccccgagaccaccaccaccgcccaggagaccagcgccgccgccgtgcagggcaccgccaaggtgaccagcagcagacaggagctgaaccccctgaagagcatcgtggagaagagcatcctgctgaccgagcaggccctggccaaggccggcaagggcatgcacggcggcgtgcccggcggcaagcagttcatcgagaacggcagcgagttcgcccagaagctgctgaagaagttcagcctgctgaagccctgggcctag

SEQ ID NO: 86435 - DNA, 429 bp, synthetic construct
  misc_feature 1..429: note = Description of Artificial Sequence: Synthetic coding sequence
  source 1..429: mol_type = other DNA
atgagattcttcgtgcccctgttcctggtgggcatcctgttccccgccatcctggccaagcagttcaccaagtgcgagctgagccagctgctgaaggacatcgacggctacggcggcatcgccctgcccgagctgatctgcaccatgttccacaccagcggctacgacacccaggccatcgtggagaacaacgagagcaccgagtacggcctgttccagatcagcaacaagctgtggtgcaagagcagccaggtgccccagagcagaaacatctgcgacatcagctgcgacaagttcctggacgacgacatcaccgacgacatcatgtgcgccaagaagatcctggacatcaagggcatcgactactggctggcccacaaggccctgtgcaccgagaagctggagcagtggctgtgcgagaagctgtag

SEQ ID NO: 86436 - DNA, 1644 bp, synthetic construct
  misc_feature 1..1644: note = Description of Artificial Sequence: Synthetic coding sequence
  source 1..1644: mol_type = other DNA
atgtacagactgatgagcgccgtgaccgccagagccgccgcccccggcggcctggccagcagctgcggcagaagaggcgtgcaccagagagccggcctgccccccctgggccacggctgggtgggcggcctgggcctgggcctgggcctggccctgggcgtgaagctggccggcggcctgagaggcgccgcccccgcccagagccccgccgcccccgaccccgaggccagccccctggccgagcccccccaggagcagagcctggccccctggagcccccagacccccgcccccccctgcagcagatgcttcgccagagccatcgagagcagcagagacctgctgcacagaatcaaggacgaggtgggcgcccccggcatcgtggtgggcgtgagcgtggacggcaaggaggtgtggagcgagggcctgggctacgccgacgtggagaacagagtgccctgcaagcccgagaccgtgatgagaatcgccagcatcagcaagagcctgaccatggtggccctggccaagctgtgggaggccggcaagctggacctggacatccccgtgcagcactacgtgcccgagttccccgagaaggagtacgagggcgagaaggtgagcgtgaccaccagactgctgatcagccacctgagcggcatcagacactacgagaaggacatcaagaaggtgaaggaggagaaggcctacaaggccctgaagatgatgaaggagaacgtggccttcgagcaggagaaggagggcaagagcaacgagaagaacgacttcaccaagttcaagaccgagcaggagaacgaggccaagtgcagaaacagcaagcccggcaagaagaagaacgacttcgagcagggcgagctgtacctgagagagaagttcgagaacagcatcgagagcctgagactgttcaagaacgaccccctgttcttcaagcccggcagccagttcctgtacagcaccttcggctacaccctgctggccgccatcgtggagagagccagcggctgcaagtacctggactacatgcagaagatcttccacgacctggacatgctgaccaccgtgcaggaggagaacgagcccgtgatctacaacagagccagattctacgtgtacaacaagaagaagagactggtgaacaccccctacgtggacaacagctacaagtgggccggcggcggcttcctgagcaccgtgggcgacctgctgaagttcggcaacgccatgctgtacggctaccaggtgggcctgttcaagaacagcaacgagaacctgctgcccggctacctgaagcccgagaccatggtgatgatgtggacccccgtgcccaacaccgagatgagctgggacaaggagggcaagtacgccatggcctggggcgtggtggagagaaagcagacctacggcagctgcagaaagcagagacactacgccagccacaccggcggcgccgtgggcgccagcagcgtgctgctggtgctgcccgaggagctggacaccgagaccatcaacaacaaggtgccccccagaggcatcatcgtgagcatcatctgcaacatgcagagcgtgggcctgaacagcaccgccctgaagatcgccctggagttcgacaaggacagaagcgactag

SEQ ID NO: 86437 - DNA, 1122 bp, synthetic construct
  misc_feature 1..1122: note = Description of Artificial Sequence: Synthetic coding sequence
  source 1..1122: mol_type = other DNA
atgtacagactgatgagcgccgtgaccgccagagccgccgcccccggcggcctggccagcagctgcggcagaagaggcgtgcaccagagagccggcctgccccccctgggccacggctgggtgggcggcctgggcctgggcctgggcctggccctgggcgtgaagctggccggcggcctgagaggcgccgcccccgcccagagccccgccgcccccgaccccgaggccagccccctggccgagcccccccaggagcagagcctggccccctggagcccccagacccccgcccccccctgcagcagatgcttcgccagagccatcgagagcagcagagacctgctgcacagaatcaaggacgaggtgggcgcccccggcatcgtggtgggcgtgagcgtggacggcaaggaggtgtggagcgagggcctgggctacgccgacgtggagaacagagtgccctgcaagcccgagaccgtgatgagaatcgccagcatcagcaagagcctgaccatggtggccctggccaagctgtgggaggccggcaagctggacctggacatccccgtgcagcactacgtgcccgagttccccgagaaggagtacgagggcgagaaggtgagcgtgaccaccagactgctgatcagccacctgagcggcatcagacactacgagaaggacatcaagaaggtgaaggaggagaaggcctacaaggccctgaagatgatgaaggagaacgtggccttcgagcaggagaaggagggcaagagcaacgagaagaacgacttcaccaagttcaagaccgagcaggagaacgaggccaagtgcagaaacagcaagcccggcaagaagaagaacgacttcgagcagggcgagctgtacctgagagagaagttcgagaacagcatcgagagcctgagactgttcaagaacgaccccctgttcttcaagcccggcagccagttcctgtacagcaccttcggctacaccctgctggccgccatcgtggagagagccagcggctgcaagtacctggactacatgcagaagatcttccacgacctggacatgctgaccaccgtgcaggaggagaacgagcccgtgatctacaacagagccagatag

SEQ ID NO: 86438 - DNA, 5784 bp, synthetic construct
  misc_feature 1..5784: note = Description of Artificial Sequence: Synthetic coding sequence
  source 1..5784: mol_type = other DNA
atggagctgagctggcacgtggtgttcatcgccctgctgagcttcagctgctggggcagcgactgggagagcgacagaaacttcatcagcaccgccggccccctgaccaacgacctgctgcacaacctgagcggcctgctgggcgaccagagcagcaacttcgtggccggcgacaaggacatgtacgtgtgccaccagcccctgcccaccttcctgcccgagtacttcagcagcctgcacgccagccagatcacccactacaaggtgttcctgagctgggcccagctgctgcccgccggcagcacccagaaccccgacgagaagaccgtgcagtgctacagaagactgctgaaggccctgaagaccgccagactgcagcccatggtgatcctgcaccaccagaccctgcccgccagcaccctgagaagaaccgaggccttcgccgacctgttcgccgactacgccaccttcgccttccacagcttcggcgacctggtgggcatctggttcaccttcagcgacctggaggaggtgatcaaggagctgccccaccaggagagcagagccagccagctgcagaccctgagcgacgcccacagaaaggcctacgagatctaccacgagagctacgccttccagggcggcaagctgagcgtggtgctgagagccgaggacatccccgagctgctgctggagccccccatcagcgccctggcccaggacaccgtggacttcctgagcctggacctgagctacgagtgccagaacgaggccagcctgagacagaagctgagcaagctgcagaccatcgagcccaaggtgaaggtgttcatcttcaacctgaagctgcccgactgccccagcaccatgaagaaccccgccagcctgctgttcagcctgttcgaggccatcaacaaggaccaggtgctgaccatcggcttcgacatcaacgagttcctgagctgcagcagcagcagcaagaagagcatgagctgcagcctgaccggcagcctggccctgcagcccgaccagcagcaggaccacgagaccaccgacagcagccccgccagcgcctaccagagaatctgggaggccttcgccaaccagagcagagccgagagagacgccttcctgcaggacaccttccccgagggcttcctgtggggcgccagcaccggcgccttcaacgtggagggcggctgggccgagggcggcagaggcgtgagcatctgggaccccagaagacccctgaacaccaccgagggccaggccaccctggaggtggccagcgacagctaccacaaggtggccagcgacgtggccctgctgtgcggcctgagagcccaggtgtacaagttcagcatcagctggagcagaatcttccccatgggccacggcagcagccccagcctgcccggcgtggcctactacaacaagctgatcgacagactgcaggacgccggcatcgagcccatggccaccctgttccactgggacctgccccaggccctgcaggaccacggcggctggcagaacgagagcgtggtggacgccttcctggactacgccgccttctgcttcagcaccttcggcgacagagtgaagctgtgggtgaccttccacgagccctgggtgatgagctacgccggctacggcaccggccagcacccccccggcatcagcgaccccggcgtggccagcttcaaggtggcccacctggtgctgaaggcccacgccagaacctggcaccactacaacagccaccacagaccccagcagcagggccacgtgggcatcgtgctgaacagcgactgggccgagcccctgagccccgagagacccgaggacctgagagccagcgagagattcctgcacttcatgctgggctggttcgcccaccccgtgttcgtggacggcgactaccccgccaccctgagaacccagatccagcagatgaacagacagtgcagccaccccgtggcccagctgcccgagttcaccgaggccgagaagcagctgctgaagggcagcgccgacttcctgggcctgagccactacaccagcagactgatcagcaacgccccccagaacacctgcatccccagctacgacaccatcggcggcttcagccagcacgtgaaccacgtgtggccccagaccagcagcagctggatcagagtggtgccctggggcatcagaagactgctgcagttcgtgagcctggagtacaccagaggcaaggtgcccatctacctggccggcaacggcatgcccatcggcgagagcgagaacctgttcgacgacagcctgagagtggactacttcaaccagtacatcaacgaggtgctgaaggccatcaaggaggacagcgtggacgtgagaagctacatcgccagaagcctgatcgacggcttcgagggccccagcggctacagccagagattcggcctgcaccacgtgaacttcagcgacagcagcaagagcagaacccccagaaagagcgcctacttcttcaccagcatcatcgagaagaacggcttcctgaccaagggcgccaagagactgctgccccccaacaccgtgaacctgcccagcaaggtgagagccttcaccttccccagcgaggtgcccagcaaggccaaggtggtgtgggagaagttcagcagccagcccaagttcgagagagacctgttctaccacggcaccttcagagacgacttcctgtggggcgtgagcagcagcgcctaccagatcgagggcgcctgggacgccgacggcaagggccccagcatctgggacaacttcacccacacccccggcagcaacgtgaaggacaacgccaccggcgacatcgcctgcgacagctaccaccagctggacgccgacctgaacatgctgagagccctgaaggtgaaggcctacagattcagcatcagctggagcagaatcttccccaccggcagaaacagcagcatcaacagccacggcgtggactactacaacagactgatcaacggcctggtggccagcaacatcttccccatggtgaccctgttccactgggacctgccccaggccctgcaggacatcggcggctgggagaaccccgccctgatcgacctgttcgacagctacgccgacttctgcttccagaccttcggcgacagagtgaagttctggatgaccttcaacgagcccatgtacctggcctggctgggctacggcagcggcgagttcccccccggcgtgaaggaccccggctgggccccctacagaatcgcccacgccgtgatcaaggcccacgccagagtgtaccacacctacgacgagaagtacagacaggagcagaagggcgtgatcagcctgagcctgagcacccactgggccgagcccaagagccccggcgtgcccagagacgtggaggccgccgacagaatgctgcagttcagcctgggctggttcgcccaccccatcttcagaaacggcgactaccccgacaccatgaagtggaaggtgggcaacagaagcgagctgcagcacctggccaccagcagactgcccagcttcaccgaggaggagaagagattcatcagagccaccgccgacgtgttctgcctgaacacctactacagcagaatcgtgcagcacaagacccccagactgaacccccccagctacgaggacgaccaggagatggccgaggaggaggaccccagctggcccagcaccgccatgaacagagccgccccctggggcaccagaagactgctgaactggatcaaggaggagtacggcgacatccccatctacatcaccgagaacggcgtgggcctgaccaaccccaacaccgaggacaccgacagaatcttctaccacaagacctacatcaacgaggccctgaaggcctacagactggacggcatcgacctgagaggctacgtggcctggagcctgatggacaacttcgagtggctgaacggctacaccgtgaagttcggcctgtaccacgtggacttcaacaacaccaacagacccagaaccgccagagccagcgccagatactacaccgaggtgatcaccaacaacggcatgcccctggccagagaggacgagttcctgtacggcagattccccgagggcttcatctggagcgccgccagcgccgcctaccagatcgagggcgcctggagagccgacggcaagggcctgagcatctgggacaccttcagccacacccccctgagagtggagaacgacgccatcggcgacgtggcctgcgacagctaccacaagatcgccgaggacctggtgaccctgcagaacctgggcgtgagccactacagattcagcatcagctggagcagaatcctgcccgacggcaccaccagatacatcaacgaggccggcctgaactactacgtgagactgatcgacaccctgctggccgccagcatccagccccaggtgaccatctaccactgggacctgccccagaccctgcaggacgtgggcggctgggagaacgagaccatcgtgcagagattcaaggagtacgccgacgtgctgttccagagactgggcgacaaggtgaagttctggatcaccctgaacgagcccttcgtgatcgcctaccagggctacggctacggcaccgccgcccccggcgtgagcaacagacccggcaccgccccctacatcgtgggccacaacctgatcaaggcccacgccgaggcctggcacctgtacaacgacgtgtacagagccagccagggcggcgtgatcagcatcaccatcagcagcgactgggccgagcccagagaccccagcaaccaggaggacgtggaggccgccagaagatacgtgcagttcatgggcggctggttcgcccaccccatcttcaagaacggcgactacaacgaggtgatgaagaccagaatcagagacagaagcctggccgccggcctgaacaagagcagactgcccgagttcaccgagagcgagaagagaagaatcaacggcacctacgacttcttcggcttcaaccactacaccaccgtgctggcctacaacctgaactacgccaccgccatcagcagcttcgacgccgacagaggcgtggccagcatcgccgacagaagctggcccgacagcggcagcttctggctgaagatgacccccttcggcttcagaagaatcctgaactggctgaaggaggagtacaacgacccccccatctacgtgaccgagaacggcgtgagccagagagaggagaccgacctgaacgacaccgccagaatctactacctgagaacctacatcaacgaggccctgaaggccgtgcaggacaaggtggacctgagaggctacaccgtgtggagcgccatggacaacttcgagtgggccaccggcttcagcgagagattcggcctgcacttcgtgaactacagcgaccccagcctgcccagaatccccaaggccagcgccaagttctacgccagcgtggtgagatgcaacggcttccccgaccccgccaccggcccccacgcctgcctgcaccagcccgacgccggccccaccatcagccccgtgagacaggaggaggtgcagttcctgggcctgatgctgggcaccaccgaggcccagaccgccctgtacgtgctgttcagcctggtgctgctgggcgtgtgcggcctggccttcctgagctacaagtactgcaagagaagcaagcagggcaagacccagagaagccagcaggagctgagccccgtgagcagcttctag

SEQ ID NO: 86439 - DNA, 3012 bp, synthetic construct
  misc_feature 1..3012: note = Description of Artificial Sequence: Synthetic coding sequence
  source 1..3012: mol_type = other DNA
aaggtggcccacctggtgctgaaggcccacgccagaacctggcaccactacaacagccaccacagaccccagcagcagggccacgtgggcatcgtgctgaacagcgactgggccgagcccctgagccccgagagacccgaggacctgagagccagcgagagattcctgcacttcatgctgggctggttcgcccaccccgtgttcgtggacggcgactaccccgccaccctgagaacccagatccagcagatgaacagacagtgcagccaccccgtggcccagctgcccgagttcaccgaggccgagaagcagctgctgaagggcagcgccgacttcctgggcctgagccactacaccagcagactgatcagcaacgccccccagaacacctgcatccccagctacgacaccatcggcggcttcagccagcacgtgaaccacgtgtggccccagaccagcagcagctggatcagagtggtgccctggggcatcagaagactgctgcagttcgtgagcctggagtacaccagaggcaaggtgcccatctacctggccggcaacggcatgcccatcggcgagagcgagaacctgttcgacgacagcctgagagtggactacttcaaccagtacatcaacgaggtgctgaaggccatcaaggaggacagcgtggacgtgagaagctacatcgccagaagcctgatcgacggcttcgagggccccagcggctacagccagagattcggcctgcaccacgtgaacttcagcgacagcagcaagagcagaacccccagaaagagcgcctacttcttcaccagcatcatcgagaagaacggcttcctgaccaagggcgccaagagactgctgccccccaacaccgtgaacctgcccagcaaggtgagagccttcaccttccccagcgaggtgcccagcaaggccaaggtggtgtgggagaagttcagcagccagcccaagttcgagagagacctgttctaccacggcaccttcagagacgacttcctgtggggcgtgagcagcagcgcctaccagatcgagggcgcctgggacgccgacggcaagggccccagcatctgggacaacttcacccacacccccggcagcaacgtgaaggacaacgccaccggcgacatcgcctgcgacagctaccaccagctggacgccgacctgaacatgctgagagccctgaaggtgaaggcctacagattcagcatcagctggagcagaatcttccccaccggcagaaacagcagcatcaacagccacggcgtggactactacaacagactgatcaacggcctggtggccagcaacatcttccccatggtgaccctgttccactgggacctgccccaggccctgcaggacatcggcggctgggagaaccccgccctgatcgacctgttcgacagctacgccgacttctgcttccagaccttcggcgacagagtgaagttctggatgaccttcaacgagcccatgtacctggcctggctgggctacggcagcggcgagttcccccccggcgtgaaggaccccggctgggccccctacagaatcgcccacgccgtgatcaaggcccacgccagagtgtaccacacctacgacgagaagtacagacaggagcagaagggcgtgatcagcctgagcctgagcacccactgggccgagcccaagagccccggcgtgcccagagacgtggaggccgccgacagaatgctgcagttcagcctgggctggttcgcccaccccatcttcagaaacggcgactaccccgacaccatgaagtggaaggtgggcaacagaagcgagctgcagcacctggccaccagcagactgcccagcttcaccgaggaggagaagagattcatcagagccaccgccgacgtgttctgcctgaacacctactacagcagaatcgtgcagcacaagacccccagactgaacccccccagctacgaggacgaccaggagatggccgaggaggaggaccccagctggcccagcaccgccatgaacagagccgccccctggggcaccagaagactgctgaactggatcaaggaggagtacggcgacatccccatctacatcaccgagaacggcgtgggcctgaccaaccccaacaccgaggacaccgacagaatcttctaccacaagacctacatcaacgaggccctgaaggcctacagactggacggcatcgacctgagaggctacgtggcctggagcctgatggacaacttcgagtggctgaacggctacaccgtgaagttcggcctgtaccacgtggacttcaacaacaccaacagacccagaaccgccagagccagcgccagatactacaccgaggtgatcaccaacaacggcatgcccctggccagagaggacgagttcctgtacggcagattccccgagggcttcatctggagcgccgccagcgccgcctaccagatcgagggcgcctggagagccgacggcaagggcctgagcatctgggacaccttcagccacacccccctgagagtggagaacgacgccatcggcgacgtggcctgcgacagctaccacaagatcgccgaggacctggtgaccctgcagaacctgggcgtgagccactacagattcagcatcagctggagcagaatcctgcccgacggcaccaccagatacatcaacgaggccggcctgaactactacgtgagactgatcgacaccctgctggccgccagcatccagccccaggtgaccatctaccactgggacctgccccagaccctgcaggacgtgggcggctgggagaacgagaccatcgtgcagagattcaaggagtacgccgacgtgctgttccagagactgggcgacaaggtgaagttctggatcaccctgaacgagcccttcgtgatcgcctaccagggctacggctacggcaccgccgcccccgtgcacggcagactggtgtgcaccagctacttccaggagtggagactgcagtag

SEQ ID NO: 86440 - DNA, 1005 bp, synthetic construct
  misc_feature 1..1005: note = Description of Artificial Sequence: Synthetic coding sequence
  source 1..1005: mol_type = other DNA
atggccaccctgaaggagaagctgatcgcccccgtggccgaggaggaggccaccgtgcccaacaacaagatcaccgtggtgggcgtgggccaggtgggcatggcctgcgccatcagcatcctgggcaagagcctggccgacgagctggccctggtggacgtgctggaggacaagctgaagggcgagatgatggacctgcagcacggcagcctgttcctgcagacccccaagatcgtggccgacaaggactacagcgtgaccgccaacagcaagatcgtggtggtgaccgccggcgtgagacagcaggagggcgagagcagactgaacctggtgcagagaaacgtgaacgtgttcaagttcatcatcccccagatcgtgaagtacagccccgactgcatcatcatcgtggtgagcaaccccgtggacatcctgacctacgtgacctggaagctgagcggcctgcccaagcacagagtgatcggcagcggctgcaacctggacagcgccagattcagatacctgatggccgagaagctgggcatccaccccagcagctgccacggctggatcctgggcgagcacggcgacagcagcgtggccgtgtggagcggcgtgaacgtggccggcgtgagcctgcaggagctgaaccccgagatgggcaccgacaacgacagcgagaactggaaggaggtgcacaagatggtggtggagagcgcctacgaggtgatcaagctgaagggctacaccaactgggccatcggcctgagcgtggccgacctgatcgagagcatgctgaagaacctgagcagaatccaccccgtgagcaccatggtgaagggcatgtacggcatcgagaacgaggtgttcctgagcctgccctgcatcctgaacgccagaggcctgaccagcgtgatcaaccagaagctgaaggacgacgaggtggcccagctgaagaagagcgccgacaccctgtgggacatccagaaggacctgaaggacctgtag

SEQ ID NO: 86441 - DNA, 699 bp, synthetic construct
  misc_feature 1..699: note = Description of Artificial Sequence: Synthetic coding sequence
  source 1..699: mol_type = other DNA
atggccaccctgaaggagaagctgatcgcccccgtggccgaggaggaggccaccgtgcccaacaacaagatcaccgtggtgggcgtgggccaggtgggcatggcctgcgccatcagcatcctgggcaagagcctggccgacgagctggccctggtggacgtgctggaggacaagctgaagggcgagatgatggacctgcagcacggcagcctgttcctgcagacccccaagatcgtggccgacaaggactacagcgtgaccgccaacagcaagatcgtggtggtgaccgccggcgtgagacagcaggagggcgagagcagactgaacctggtgcagagaaacgtgaacgtgttcaagttcatcatcccccagatcgtgaagtacagccccgactgcatcatcatcgtggtgagcaaccccgtggacatcctgacctacgtgacctggaagctgagcggcctgcccaagcacagagtgatcggcagcggctgcaacctggacagcgccagattcagatacctgatggccgagaagctgggcatccaccccagcagctgccacggctggatcctgggcgagcacggcgacagcagcgtggccgtgtggagcggcgtgaacgtggccggcgtgagcctgcaggagctgaaccccgagatgggcaccgacaacgacagcgagaactggaaggaggtgcactag

SEQ ID NO: 86442 - DNA, 1005 bp, synthetic construct; identical to SEQ ID NO: 86440
  misc_feature 1..1005: note = Description of Artificial Sequence: Synthetic coding sequence
  source 1..1005: mol_type = other DNA

SEQ ID NO: 86443 - DNA, 414 bp, synthetic construct
  misc_feature 1..414: note = Description of Artificial Sequence: Synthetic coding sequence
  source 1..414: mol_type = other DNA
atggccaccctgaaggagaagctgatcgcccccgtggccgaggaggaggccaccgtgcccaacaacaagatcaccgtggtgggcgtgggccaggtgggcatggcctgcgccatcagcatcctgggcaagagcctggccgacgagctggccctggtggacgtgctggaggacaagctgaagggcgagatgatggacctgcagcacggcagcctgttcctgcagacccccaagatcgtggccgacaaggactacagcgtgaccgccaacagcaagatcgtggtggtgaccgccggcgtgagacagcaggagggcgagagcagactgaacctggtgcagagaaacgtgaacgtgttcaagttcatcatcccccagatcgtgaagtacagccccgactgcatcatcatcgtggtgtag

SEQ ID NO: 86444 - DNA, 309 bp, synthetic construct
  misc_feature 1..309: note = Description of Artificial Sequence: Synthetic coding sequence
  source 1..309: mol_type = other DNA
atggccaccctgaaggagaagctgatcgcccccgtggccgaggaggaggccaccgtgcccaacaacaagatcaccgtggtgggcgtgggccaggtgggcatggcctgcgccatcagcatcctgggcaagagcctggccgacgagctggccctggtggacgtgctggaggacaagctgaagggcgagatgatggacctgcagcacggcagcctgttcctgcagacccccaagatcgtggccgacaaggactacagcgtgaccgccaacagcaagatcgtggtggtgaccgccggcgtgagacagcagtag

SEQ ID NO: 86445 - DNA, 999 bp, synthetic construct
  misc_feature 1..999: note = Description of Artificial Sequence: Synthetic coding sequence
  source 1..999: mol_type = other DNA
atgagcaccgtgaaggagcagctgatcgagaagctgatcgaggacgacgagaacagccagtgcaagatcaccatcgtgggcaccggcgccgtgggcatggcctgcgccatcagcatcctgctgaaggacctggccgacgagctggccctggtggacgtggccctggacaagctgaagggcgagatgatggacctgcagcacggcagcctgttcttcagcaccagcaagatcaccagcggcaaggactacagcgtgagcgccaacagcagaatcgtgatcgtgaccgccggcgccagacagcaggagggcgagaccagactggccctggtgcagagaaacgtggccatcatgaagagcatcatccccgccatcgtgcactacagccccgactgcaagatcctggtggtgagcaaccccgtggacatcctgacctacatcgtgtggaagatcagcggcctgcccgtgaccagagtgatcggcagcggctgcaacctggacagcgccagattcagatacctgatcggcgagaagctgggcgtgcaccccaccagctgccacggctggatcatcggcgagcacggcgacagcagcgtgcccctgtggagcggcgtgaacgtggccggcgtggccctgaagaccctggaccccaagctgggcaccgacagcgacaaggagcactggaagaacatccacaagcaggtgatccagagcgcctacgagatcatcaagctgaagggctacaccagctgggccatcggcctgagcgtgatggacctggtgggcagcatcctgaagaacctgagaagagtgcaccccgtgagcaccatggtgaagggcctgtacggcatcaaggaggagctgttcctgagcatcccctgcgtgctgggcagaaacggcgtgagcgacgtggtgaagatcaacctgaacagcgaggaggaggccctgttcaagaagagcgccgagaccctgtggaacatccagaaggacctgatcttctag

SEQ ID NO: 86446 - DNA, 999 bp, synthetic construct; identical to SEQ ID NO: 86445
  misc_feature 1..999: note = Description of Artificial Sequence: Synthetic coding sequence
  source 1..999: mol_type = other DNA

SEQ ID NO: 86447 - DNA, 1524 bp, synthetic construct
  misc_feature 1..1524: note = Description of Artificial Sequence: Synthetic coding sequence
  source 1..1524: mol_type = other DNA
atggccagactgctgagaagcgccacctgggagctgttcccctggagaggctactgcagccagaaggccaagggcgagctgtgcagagacttcgtggaggccctgaaggccgtggtgggcggcagccacgtgagcaccgccgccgtggtgagagagcagcacggcagagacgagagcgtgcacagatgcgagccccccgacgccgtggtgtggccccagaacgtggagcaggtgagcagactggccgccctgtgctacagacagggcgtgcccatcatccccttcggcaccggcaccggcctggagggcggcgtgtgcgccgtgcagggcggcgtgtgcgtgaacctgacccacatggacagaatcctggagctgaaccaggaggacttcagcgtggtggtggagcccggcgtgaccagaaaggccctgaacgcccacctgagagacagcggcctgtggttccccgtggaccccggcgccgacgccagcctgtgcggcatggccgccaccggcgccagcggcaccaacgccgtgagatacggcaccatgagagacaacgtgctgaacctggaggtggtgctgcccgacggcagactgctgcacaccgccggcagaggcagacacttcagattcggcttctggcccgagatcccccaccacaccgcctggtacagcccctgcgtgagcctgggcagaagaaagagcgccgccggctacaacctgaccggcctgttcgtgggcagcgagggcaccctgggcctgatcaccgccaccaccctgagactgcaccccgcccccgaggccaccgtggccgccacctgcgccttccccagcgtgcaggccgccgtggacagcaccgtgcacatcctgcaggccgccgtgcccgtggccagaatcgagttcctggacgaggtgatgatggacgcctgcaacagatacagcaagctgaactgcctggtggcccccaccctgttcctggagttccacggcagccagcaggccctggaggagcagctgcagagaaccgaggagatcgtgcagcagaacggcgccagcgacttcagctgggccaaggaggccgaggagagaagcagactgtggaccgccagacacaacgcctggtacgccgccctggccaccagacccggctgcaagggctacagcaccgacgtgtgcgtgcccatcagcagactgcccgagatcgtggtgcagaccaaggaggacctgaacgccagcggcctgaccggcagcatcgtgggccacgtgggcgacggcaacttccactgcatcctgctggtgaaccccgacgacgccgaggagctgggcagagtgaaggccttcgccgagcagctgggcagaagagccctggccctgcacggcacctgcaccggcgagcacggcatcggcatgggcaagagacagctgctgcaggaggaggtgggcgccgtgggcgtggagaccatgagacagctgaaggccgtgctggacccccagggcctgatgaaccccggcaaggtgctgtag

SEQ ID NO: 86448 - DNA, 1455 bp, synthetic construct
  misc_feature 1..1455: note = Description of Artificial Sequence: Synthetic coding sequence
  source 1..1455: mol_type = other DNA
atggccagactgctgagaagcgccacctgggagctgttcccctggagaggctactgcagccagaaggccaagggcgagctgtgcagagacttcgtggaggccctgaaggccgtggtgggcggcagccacgtgagcaccgccgccgtggtgagagagcagcacggcagagacgagagcgtgcacagatgcgagccccccgacgccgtggtgtggccccagaacgtggagcaggtgagcagactggccgccctgtgctacagacagggcgtgcccatcatccccttcggcaccggcaccggcctggagggcggcgtgtgcgccgtgcagggcggcgtgtgcgtgaacctgacccacatggacagaatcctggagctgaaccaggaggacttcagcgtggtggtggagcccggcgtgaccagaaaggccctgaacgcccacctgagagacagcggcctgtggttccccgtggaccccggcgccgacgccagcctgtgcggcatggccgccaccggcgccagcggcaccaacgccgtgagatacggcaccatgagagacaacgtgctgaacctggaggtggtgctgcccgacggcagactgctgcacaccgccggcagaggcagacacttcagaaagagcgccgccggctacaacctgaccggcctgttcgtgggcagcgagggcaccctgggcctgatcaccgccaccaccctgagactgcaccccgcccccgaggccaccgtggccgccacctgcgccttccccagcgtgcaggccgccgtggacagcaccgtgcacatcctgcaggccgccgtgcccgtggccagaatcgagttcctggacgaggtgatgatggacgcctgcaacagatacagcaagctgaactgcctggtggcccccaccctgttcctggagttccacggcagccagcaggccctggaggagcagctgcagagaaccgaggagatcgtgcagcagaacggcgccagcgacttcagctgggccaaggaggccgaggagagaagcagactgtggaccgccagacacaacgcctggtacgccgccctggccaccagacccggctgcaagggctacagcaccgacgtgtgcgtgcccatcagcagactgcccgagatcgtggtgcagaccaaggaggacctgaacgccagcggcctgaccggcagcatcgtgggccacgtgggcgacggcaacttccactgcatcctgctggtgaaccccgacgacgccgaggagctgggcagagtgaaggccttcgccgagcagctgggcagaagagccctggccctgcacggcacctgcaccggcgagcacggcatcggcatgggcaagagacagctgctgcaggaggaggtgggcgccgtgggcgtggagaccatgagacagctgaaggccgtgctggacccccagggcctgatgaaccccggcaaggtgctgtag

SEQ ID NO: 86449 - DNA, 2139 bp, synthetic construct
  misc_feature 1..2139: note = Description of Artificial Sequence: Synthetic coding sequence
  source 1..2139: mol_type = other DNA
atgagagtgctgctgcacctgcccgccctgctggccagcctgatcctgctgcaggccgccgccagcaccaccagagcccagaccaccagaaccagcgccatcagcgacaccgtgagccaggccaaggtgcaggtgaacaaggccttcctggacagcagaaccagactgaagaccgccatgagcagcgagacccccaccagcagacagctgagcgagtacctgaagcacgccaagggcagaaccagaaccgccatcagaaacggccaggtgtgggaggagagcctgaagagactgagacagaaggccagcctgaccaacgtgaccgaccccagcctggacctgaccagcctgagcctggaggtgggctgcggcgcccccgcccccgtggtgagatgcgacccctgcagcccctacagaaccatcaccggcgactgcaacaacagaagaaagcccgccctgggcgccgccaacagagccctggccagatggctgcccgccgagtacgaggacggcctgagcctgcccttcggctggacccccggcaagaccagaaacggcttccccctgcccctggccagagaggtgagcaacaagatcgtgggctacctgaacgaggagggcgtgctggaccagaacagaagcctgctgttcatgcagtggggccagatcgtggaccacgacctggacttcgcccccgacaccgagctgggcagcagcgagtacagcaaggcccagtgcgacgagtactgcatccagggcgacaactgcttccccatcatgttcccccccaacgaccccaaggccggcacccagggcaagtgcatgcccttcttcagagccggcttcgtgtgccccacccccccctacaagagcctggccagagagcagatcaacgccctgaccagcttcctggacgccagcttcgtgtacagcagcgagcccagcctggccagcagactgagaaacctgagcagccccctgggcctgatggccgtgaaccaggaggtgagcgaccacggcctgccctacctgccctacgacagcaagaagcccagcccctgcgagttcatcaacaccaccgccagagtgccctgcttcctggccggcgacagcagagccagcgagcacatcctgctggccaccagccacaccctgttcctgagagagcacaacagactggccagagagctgaagagactgaacccccagtgggacggcgagaagctgtaccaggaggccagaaagatcctgggcgccttcgtgcagatcatcaccttcagagactacctgcccatcctgctgggcgaccacatgcagaagtggatccccccctaccagggctacagcgagagcgtggaccccagaatcagcaacgtgttcaccttcgccttcagattcggccacctggaggtgcccagcagcatgttcagactggacgagaactaccagccctggggccccgagcccgagctgcccctgcacaccctgttcttcaacacctggagaatggtgaaggacggcggcatcgaccccctggtgagaggcctgctggccaagaagagcaagctgatgaagcagaacaagatgatgaccggcgagctgagaaacaagctgttccagcccacccacagaatccacggcttcgacctggccgccatcaacacccagagatgcagagaccacggccagcccggctacaacagctggagagccttctgcgacctgagccagccccagaccctggaggagctgaacaccgtgctgaagagcaagatgctggccaagaagctgctgggcctgtacggcacccccgacaacatcgacatctggatcggcgccatcgccgagcccctggtggagagaggcagagtgggccccctgctggcctgcctgctgggcaagcagttccagcagatcagagacggcgacagattctggtgggagaaccccggcgtgttcaccaacgagcagaaggacagcctgcagaagatgagcttcagcagactggtgtgcgacaacaccagaatcaccaaggtgcccagagaccccttctgggccaacagctacccctacgacttcgtggactgcagcgccatcgacaagctggacctgagcccctgggccagcgtgaagaactag

SEQ ID NO: 86450 - DNA, 1374 bp, synthetic construct
  misc_feature 1..1374: note = Description of Artificial Sequence: Synthetic coding sequence
  source 1..1374: mol_type = other DNA
tgcttccccgtgcagttcccccccaacgaccccaaggccggcacccagggcaagtgcatgcccttcttcagagccggcttcgtgtgccccacccccccctacaagagcctggccagagagcagatcaacgccctgaccagcttcctggacgccagcttcgtgtacagcagcgagcccagcctggccagcagactgagaaacctgagcagccccctgggcctgatggccgtgaaccaggaggtgagcgaccacggcctgccctacctgccctacgacagcaagaagcccagcccctgcgagttcatcaacaccaccgccagagtgccctgcttcctggccggcgacagcagagccagcgagcacatcctgctggccaccagccacaccctgttcctgagagagcacaacagactggccagagagctgaagagactgaacccccagtgggacggcgagaagctgtaccaggaggccagaaagatcctgggcgccttcgtgcagatcatcaccttcagagactacctgcccatcctgctgggcgaccacatgcagaagtggatccccccctaccagggctacagcgagagcgtggaccccagaatcagcaacgtgttcaccttcgccttcagattcggccacctggaggtgcccagcagcatgttcagactggacgagaactaccagccctggggccccgagcccgagctgcccctgcacaccctgttcttcaacacctggagaatggtgaaggacggcggcatcgaccccctggtgagaggcctgctggccaagaagagcaagctgatgaagcagaacaagatgatgaccggcgagctgagaaacaagctgttccagcccacccacagaatccacggcttcgacctggccgccatcaacacccagagatgcagagaccacggccagcccggctacaacagctggagagccttctgcgacctgagccagccccagaccctggaggagctgaacaccgtgctgaagagcaagatgctggccaagaagctgctgggcctgtacggcacccccgacaacatcgacatctggatcggcgccatcgccgagcccctggtggagagaggcagagtgggccccctgctggcctgcctgctgggcaagcagttccagcagatcagagacggcgacagattctggtgggagaaccccggcgtgttcaccaacgagcagaaggacagcctgcagaagatgagcttcagcagactggtgtgcgacaacaccagaatcaccaaggtgcccagagaccccttctgggccaacagctacccctacgacttcgtggactgcagcgccatcgacaagctggacctgagcccctgggccagcgtgaagaactag

SEQ ID NO: 86451 - DNA, 1890 bp, synthetic construct
  misc_feature 1..1890: note = Description of Artificial Sequence: Synthetic coding sequence
  source 1..1890: mol_type = other DNA
atgagagtgctgctgcacctgcccgccctgctggccagcctgatcctgctgcaggccgccgccagcaccaccagagaccccagcctggacctgaccagcctgagcctggaggtgggctgcggcgcccccgcccccgtggtgagatgcgacccctgcagcccctacagaaccatcaccggcgactgcaacaacagaagaaagcccgccctgggcgccgccaacagagccctggccagatggctgcccgccgagtacgaggacggcctgagcctgcccttcggctggacccccggcaagaccagaaacggcttccccctgcccctggccagagaggtgagcaacaagatcgtgggctacctgaacgaggagggcgtgctggaccagaacagaagcctgctgttcatgcagtggggccagatcgtggaccacgacctggacttcgcccccgacaccgagctgggcagcagcgagtacagcaaggcccagtgcgacgagtactgcatccagggcgacaactgcttccccatcatgttcccccccaacgaccccaaggccggcacccagggcaagtgcatgcccttcttcagagccggcttcgtgtgccccacccccccctacaagagcctggccagagagcagatcaacgccctgaccagcttcctggacgccagcttcgtgtacagcagcgagcccagcctggccagcagactgagaaacctgagcagccccctgggcctgatggccgtgaaccaggaggtgagcgaccacggcctgccctacctgccctacgacagcaagaagcccagcccctgcgagttcatcaacaccaccgccagagtgccctgcttcctggccggcgacagcagagccagcgagcacatcctgctggccaccagccacaccctgttcctgagagagcacaacagactggccagagagctgaagagactgaacccccagtgggacggcgagaagctgtaccaggaggccagaaagatcctgggcgccttcgtgcagatcatcaccttcagagactacctgcccatcctgctgggcgaccacatgcagaagtggatccccccctaccagggctacagcgagagcgtggaccccagaatcagcaacgtgttcaccttcgccttcagattcggccacctggaggtgcccagcagcatgttcagactggacgagaactaccagccctggggccccgagcccgagctgcccctgcacaccctgttcttcaacacctggagaatggtgaaggacggcggcatcgaccccctggtgagaggcctgctggccaagaagagcaagctgatgaagcagaacaagatgatgaccggcgagctgagaaacaagctgttccagcccacccacagaatccacggcttcgacctggccgccatcaacacccagagatgcagagaccacggccagcccggctacaacagctggagagccttctgcgacctgagccagccccagaccctggaggagctgaacaccgtgctgaagagcaagatgctggccaagaagctgctgggcctgtacggcacccccgacaacatcgacatctggatcggcgccatcgccgagcccctggtggagagaggcagagtgggccccctgctggcctgcctgctgggcaagcagttccagcagatcagagacggcgacagattctggtgggagaaccccggcgtgttcaccaacgagcagaaggacagcctgcagaagatgagcttcagcagactggtgtgcgacaacaccagaatcaccaaggtgcccagagaccccttctgggccaacagctacccctacgacttcgtggactgcagcgccatcgacaagctggacctgagcccctgggccagcgtgaagaactag

SEQ ID NO: 86452 - DNA, 1962 bp, synthetic construct
  misc_feature 1..1962: note = Description of Artificial Sequence: Synthetic coding sequence
  source 1..1962: mol_type = other DNA
atgagcagcgagacccccaccagcagacagctgagcgagtacctgaagcacgccaagggcagaaccagaaccgccatcagaaacggccaggtgtgggaggagagcctgaagagactgagacagaaggccagcctgaccaacgtgaccgaccccagcctggacctgaccagcctgagcctggaggtgggctgcggcgcccccgcccccgtggtgagatgcgacccctgcagcccctacagaaccatcaccggcgactgcaacaacagaagaaagcccgccctgggcgccgccaacagagccctggccagatggctgcccgccgagtacgaggacggcctgagcctgcccttcggctggacccccggcaagaccagaaacggcttccccctgcccctggccagagaggtgagcaacaagatcgtgggctacctgaacgaggagggcgtgctggaccagaacagaagcctgctgttcatgcagtggggccagatcgtggaccacgacctggacttcgcccccgacaccgagctgggcagcagcgagtacagcaaggcccagtgcgacgagtactgcatccagggcgacaactgcttccccatcatgttcccccccaacgaccccaaggccggcacccagggcaagtgcatgcccttcttcagagccggcttcgtgtgccccacccccccctacaagagcctggccagagagcagatcaacgccctgaccagcttcctggacgccagcttcgtgtacagcagcgagcccagcctggccagcagactgagaaacctgagcagccccctgggcctgatggccgtgaaccaggaggtgagcgaccacggcctgccctacctgccctacgacagcaagaagcccagcccctgcgagttcatcaacaccaccgccagagtgccctgcttcctggccggcgacagcagagccagcgagcacatcctgctggccaccagccacaccctgttcctgagagagcacaacagactggccagagagctgaagagactgaacccccagtgggacggcgagaagctgtaccaggaggccagaaagatcctgggcgccttcgtgcagatcatcaccttcagagactacctgcccatcctgctgggcgaccacatgcagaagtggatccccccctaccagggctacagcgagagcgtggaccccagaatcagcaacgtgttcaccttcgccttcagattcggccacctggaggtgcccagcagcatgttcagactggacgagaactaccagccctggggccccgagcccgagctgcccctgcacaccctgttcttcaacacctggagaatggtgaaggacggcggcatcgaccccctggtgagaggcctgctggccaagaagagcaagctgatgaagcagaacaagatgatgaccggcgagctgagaaacaagctgttccagcccacccacagaatccacggcttcgacctggccgccatcaacacccagagatgcagagaccacggccagcccggctacaacagctggagagccttctgcgacctgagccagccccagaccctggaggagctgaacaccgtgctgaagagcaagatgctggccaagaagctgctgggcctgtacggcacccccgacaacatcgacatctggatcggcgccatcgccgagcccctggtggagagaggcagagtgggccccctgctggcctgcctgctgggcaagcagttccagcagatcagagacggcgacagattctggtgggagaaccccggcgtgttcaccaacgagcagaaggacagcctgcagaagatgagcttcagcagactggtgtgcgacaacaccagaatcaccaaggtgcccagagaccccttctgggccaacagctacccctacgacttcgtggactgcagcgccatcgacaagctggacctgagcccctgggccagcgtgaagaactag

SEQ ID NO: 86453 - DNA, 1323 bp, synthetic construct
  misc_feature 1..1323: note = Description of Artificial Sequence: Synthetic coding sequence
  source 1..1323: mol_type = other DNA
atgggcgacctggagctgctgctgcccggcgaggccgaggtgctggtgagaggcctgagaagcttccccctgagagagatgggcagcgagggctggaaccagcagcacgagaacctggagaagctgaacatgcaggccatcctggacgccaccgtgagccagggcgagcccatccaggagctgctggtgacccacggcaaggtgcccaccctggtggaggagctgatcgccgtggagatgtggaagcagaaggtgttccccgtgttctgcagagtggaggacttcaagccccagaacaccttccccatctacatggtggtgcaccacgaggccagcatcatcaacctgctggagaccgtgttcttccacaaggaggtgtgcgagagcgccgaggacaccgtgctggacctggtggactactgccacagaaagctgaccctgctggtggcccagagcggctgcggcggcccccccgagggcgagggcagccaggacagcaaccccatgcaggagctgcagaagcaggccgagctgatggagttcgagatcgccctgaaggccctgagcgtgctgagatacatcaccgactgcgtggacagcctgagcctgagcaccctgagcagaatgctgagcacccacaacctgccctgcctgctggtggagctgctggagcacagcccctggagcagaagagagggcggcaagctgcagcagttcgagggcagcagatggcacaccgtggcccccagcgagcagcagaagctgagcaagctggacggccaggtgtggatcgccctgtacaacctgctgctgagccccgaggcccaggccagatactgcctgaccagcttcgccaagggcagactgctgaagctgagagccttcctgaccgacaccctgctggaccagctgcccaacctggcccacctgcagagcttcctggcccacctgaccctgaccgagacccagccccccaagaaggacctggtgctggagcagatccccgagatctgggagagactggagagagagaacagaggcaagtggcaggccatcgccaagcaccagctgcagcacgtgttcagccccagcgagcaggacctgagactgcaggccagaagatgggccgagacctacagactggacgtgctggaggccgtggcccccgagagacccagatgcgcctactgcagcgccgaggccagcaagagatgcagcagatgccagaacgagtggtactgctgcagagagtgccaggtgaagcactgggagaagcacggcaagacctgcgtgctggccgcccagggcgacagagccaagtag

SEQ ID NO: 86454 - DNA, 2001 bp, synthetic construct
  misc_feature 1..2001: note = Description of Artificial Sequence: Synthetic coding sequence
  source 1..2001: mol_type = other DNA
atgagaaaggtgagaggcccccccgtgagctgcatcaagagagacagccccatccagtgcatccaggccatcgccgagaacagagccgacgccgtgaccctggacggcggcttcatctacgaggccggcctggccccctacaagctgagacccgtggccgccgaggtgtacggcaccgagagacagcccagaacccactactacgccgtggccgtggtgaagaagggcggcagcttccagctgaacgagctgcagggcctgaagagctgccacaccggcctgagaagaaccgccggctggaacgtgcccatcggcaccctgagacccttcctgaactggaccggcccccccgagcccatcgaggccgccgtggccagattcttcagcgccagctgcgtgcccggcgccgacaagggccagttccccaacctgtgcagactgtgcgccggcaccggcgagaacaagtgcgccttcagcagccaggagccctacttcagctacagcggcgccttcaagtgcctgagagacggcgccggcgacgtggccttcatcagagagagcaccgtgttcgaggacctgagcgacgaggccgagagagacgagtacgagctgctgtgccccgacaacaccagaaagcccgtggacaagttcaaggactgccacctggccagagtgcccagccacgccgtggtggccagaagcgtgaacggcaaggaggacgccatctggaacctgctgagacaggcccaggagaagttcggcaaggacaagagccccaagttccagctgttcggcagccccagcggccagaaggacctgctgttcaaggacagcgccatcggcttcagcagagtgccccccagaatcgacagcggcctgtacctgggcagcggctacttcaccgccatccagaacctgagaaagagcgaggaggaggtggccgccagaagagccagagtggtgtggtgcgccgtgggcgagcaggagctgagaaagtgcaaccagtggagcggcctgagcgagggcagcgtgacctgcagcagcgccagcaccaccgaggactgcatcgccctggtgctgaagggcgaggccgacgccatgagcctggacggcggctacgtgtacaccgccggcaagtgcggcctggtgcccgtgctggccgagaactacaagagccagcagagcagcgaccccgaccccaactgcgtggacagacccgtggagggctacctggccgtggccgtggtgagaagaagcgacaccagcctgacctggaacagcgtgaagggcaagaagagctgccacaccgccgtggacagaaccgccggctggaacatccccatgggcctgctgttcaaccagaccggcagctgcaagttcgacgagtacttcagccagagctgcgcccccggcagcgaccccagaagcaacctgtgcgccctgtgcatcggcgacgagcagggcgagaacaagtgcgtgcccaacagcaacgagagatactacggctacaccggcgccttcagatgcctggccgagaacgccggcgacgtggccttcgtgaaggacgtgaccgtgctgcagaacaccgacggcaacaacaacgaggcctgggccaaggacctgaagctggccgacttcgccctgctgtgcctggacggcaagagaaagcccgtgaccgaggccagaagctgccacctggccatggcccccaaccacgccgtggtgagcagaatggacaaggtggagagactgaagcaggtgctgctgcaccagcaggccaagttcggcagaaacggcagcgactgccccgacaagttctgcctgttccagagcgagaccaagaacctgctgttcaacgacaacaccgagtgcctggccagactgcacggcaagaccacctacgagaagtacctgggcccccagtacgtggccggcatcaccaacctgaagaagtgcagcaccagccccctgctggaggcctgcgagttcctgagaaagtag

SEQ ID NO: 86455 - DNA, 453 bp, synthetic construct
  misc_feature 1..453: note = Description of Artificial Sequence: Synthetic coding sequence
  source 1..453: mol_type = other DNA
atgaagctggtgttcctggtgctgctgttcctgggcgccctgggcctgtgcctggccggcagaagaagaagcgtgcagtggtgcgccgtgagccagcccgaggccaccaagtgcttccagtggcagagaaacatgagaaaggtgagaggcccccccgtgagctgcatcaagagagacagccccatccagtgcatccaggccatcgccgagaacagagccgacgccgtgaccctggacggcggcttcatctacgaggccggcctggccccctacaagctgagacccgtggccgccgaggtgtacggcaccgagagacagcccgccgtgttccccgtgcagatcaaggacagcagccccacctgcgtggcctgcgtgagaggccagggcaagaccaacgtgcccagcccccccagaaacagaaccagcgccaccctggtgcccagcagcgtgtag

SEQ ID NO: 86456 - DNA, 846 bp, synthetic construct
  misc_feature 1..846: note = Description of Artificial Sequence: Synthetic coding sequence
  source 1..846: mol_type = other DNA
atgaccagcaaggaggacggcaaggccgcccccggcgaggagagaagaagaagccccctggaccacctgcccccccccgccaacagcaacaagcccctgacccccttcagcatcgaggacatcctgaacaagcccagcgtgagaagaagctacagcctgtgcggcgccgcccacctgctggccgccgccgacaagcacgcccagggcggcctgcccctggccggcagagccctgctgagccagaccagccccctgtgcgccctggaggagctggccagcaagaccttcaagggcctggaggtgagcgtgctgcaggccgccgagggcagagacggcatgaccatcttcggccagagacagacccccaagaagagaagaaagagcagaaccgccttcaccaaccaccagatctacgagctggagaagagattcctgtaccagaagtacctgagccccgccgacagagaccagatcgcccagcagctgggcctgaccaacgcccaggtgatcacctggttccagaacagaagagccaagctgaagagagacctggaggagatgaaggccgacgtggagagcgccaagaagctgggccccagcggccagatggacatcgtggccctggccgagctggagcagaacagcgaggccaccgccggcggcggcggcggctgcggcagagccaagagcagacccggcagccccgtgctgccccccggcgcccccaaggcccccggcgccggcgccctgcagctgagccccgccagccccctgaccgaccagcccgccagcagccaggactgcagcgaggacgaggaggacgaggagatcgacgtggacgactag

SEQ ID NO: 86457 - DNA, 597 bp, synthetic construct
  misc_feature 1..597: note = Description of Artificial Sequence: Synthetic coding sequence
  source 1..597: mol_type = other DNA
atgaacagcggcagagagcccagaacccccagaaccctgctgagcatcgccgacatcctggcccccagaatggtgcccagagcccccagcgccccccagctgcccgagagcggccccggccccaccagccccctgtgcgccctggaggagctgaccagcaagaccttcagaggcctggacgccagagccctgcagcccagcgagggcagagccggccccgacgccctgggccccggccccttcggcagaaagagaagaaagagcagaaccgccttcaccgcccagcaggtgctggagctggagagaagattcgtgttccagaagtacctggcccccagcgagagagacggcctggccaccagactgggcctggccaacgcccaggtggtgacctggttccagaacagaagagccaagctgaagagagacgtggaggagatgagagccgacgtggccagcctgagagccctgagccccgaggtgctgtgcagcctggccctgcccgagggcgcccccgaccccggcctgtgcctgggccccgccggccccgacagcagaccccacctgagcgacgaggagatccaggtggacgactag

SEQ ID NO: 86458 - DNA, 585 bp, synthetic construct
  misc_feature 1..585: note = Description of Artificial Sequence: Synthetic coding sequence
  source 1..585: mol_type = other DNA
atgggcaagagaaccagcctggaggtgagcctgggcgagctgggcggcgagaagtgcagaggcggcagaagaagcttcccccccctggccgccagcagacccgccagacccggcggctggagatgggccagaagagacctgtgcaagaccgccagcagagccgagaacaacagccaggcctgcagaccccagagaagagccggccccgacgccctgggccccggccccttcggcagaaagagaagaaagagcagaaccgccttcaccgcccagcaggtgctggagctggagagaagattcgtgttccagaagtacctggcccccagcgagagagacggcctggccaccagactgggcctggccaacgcccaggtggtgacctggttccagaacagaagagccaagctgaagagagacgtggaggagatgagagccgacgtggccagcctgagagccctgagccccgaggtgctgtgcagcctggccctgcccgagggcgcccccgaccccggcctgtgcctgggccccgccggccccgacagcagaccccacctgagcgacgaggagatccaggtggacgactag

SEQ ID NO: 86459 - DNA, 1398 bp, synthetic construct
  misc_feature 1..1398: note = Description of Artificial Sequence: Synthetic coding sequence
  source 1..1398: mol_type = other DNA
atggagacccccagccagagaagagccaccagaagcggcgcccaggccagcagcacccccctgagccccaccagaatcaccagactgcaggagaaggaggacctgcaggagctgaacgacagactggccgtgtacatcgacagagtgagaagcctggagaccgagaacgccggcctgagactgagaatcaccgagagcgaggaggtggtgagcagagaggtgagcggcatcaaggccgcctacgaggccgagctgggcgacgccagaaagaccctggacagcgtggccaaggagagagccagactgcagctggagctgagcaaggtgagagaggagttcaaggagctgaaggccagaaacaccaagaaggagggcgacctgatcgccgcccaggccagactgaaggacctggaggccctgctgaacagcaaggaggccgccctgagcaccgccctgagcgagaagagaaccctggagggcgagctgcacgacctgagaggccaggtggccaagctggaggccgccctgggcgaggccaagaagcagctgcaggacgagatgctgagaagagtggacgccgagaacagactgcagaccatgaaggaggagctggacttccagaagaacatctacagcgaggagctgagagagaccaagagaagacacgagaccagactggtggagatcgacaacggcaagcagagagagttcgagagcagactggccgacgccctgcaggagctgagagcccagcacgaggaccaggtggagcagtacaagaaggagctggagaagacctacagcgccaagctggacaacgccagacagagcgccgagagaaacagcaacctggtgggcgccgcccacgaggagctgcagcagagcagaatcagaatcgacagcctgagcgcccagctgagccagctgcagaagcagctggccgccaaggaggccaagctgagagacctggaggacagcctggccagagagagagacaccagcagaagactgctggccgagaaggagagagagatggccgagatgagagccagaatgcagcagcagctggacgagtaccaggagctgctggacatcaagctggccctggacatggagatccacgcctacagaaagctgctggagggcgaggaggagagactgagactgagccccagccccaccagccagagaagcagaggcagagccagcagccacagcagccagacccagggcggcggcagcgtgaccaagaagagaaagctggagagcaccgagagcagaagcagcttcagccagcacgccagaaccagcggcagagtggccgtggaggaggtggacgaggacgaggacggcgacgacctgctgcaccaccaccacgtgagcggcagcagaagatag

SEQ ID NO: 86460 - DNA, 1905 bp, synthetic construct
  misc_feature 1..1905: note = Description of Artificial Sequence: Synthetic coding sequence
  source 1..1905: mol_type = other DNA
atggagacccccagccagagaagagccaccagaagcggcgcccaggccagcagcacccccctgagccccaccagaatcaccagactgcaggagaaggaggacctgcaggagctgaacgacagactggccgtgtacatcgacagagtgagaagcctggagaccgagaacgccggcctgagactgagaatcaccgagagcgaggaggtggtgagcagagaggtgagcggcatcaaggccgcctacgaggccgagctgggcgacgccagaaagaccctggacagcgtggccaaggagagagccagactgcagctggagctgagcaaggtgagagaggagttcaaggagctgaaggccagaaacaccaagaaggagggcgacctgatcgccgcccaggccagactgaaggacctggaggccctgctgaacagcaaggaggccgccctgagcaccgccctgagcgagaagagaaccctggagggcgagctgcacgacctgagaggccaggtggccaagctggaggccgccctgggcgaggccaagaagcagctgcaggacgagatgctgagaagagtggacgccgagaacagactgcagaccatgaaggaggagctggacttccagaagaacatctacagcgaggagctgagagagaccaagagaagacacgagaccagactggtggagatcgacaacggcaagcagagagagttcgagagcagactggccgacgccctgcaggagctgagagcccagcacgaggaccaggtggagcagtacaagaaggagctggagaagacctacagcgccaagctggacaacgccagacagagcgccgagagaaacagcaacctggtgggcgccgcccacgaggagctgcagcagagcagaatcagaatcgacagcctgagcgcccagctgagccagctgcagaagcagctggccgccaaggaggccaagctgagagacctggaggacagcctggccagagagagagacaccagcagaagactgctggccgagaaggagagagagatggccgagatgagagccagaatgcagcagcagctggacgagtaccaggagctgctggacatcaagctggccctggacatggagatccacgcctacagaaagctgctggagggcgaggaggagagactgagactgagccccagccccaccagccagagaagcagaggcagagccagcagccacagcagccagacccagggcggcggcagcgtgaccaagaagagaaagctggagagcaccgagagcagaagcagcttcagccagcacgccagaaccagcggcagagtggccgtggaggaggtggacgaggagggcaagttcgtgagactgagaaacaagagcaacgaggaccagagcatgggcaactggcagatcaagagacagaacggcgacgaccccctgctgacctacagattcccccccaagttcaccctgaaggccggccaggtggtgaccatctgggccgccggcgccggcgccacccacagcccccccaccgacctggtgtggaaggcccagaacacctggggctgcggcaacagcctgagaaccgccctgatcaacagcaccggcgagggcagccactgcagcagcagcggcgaccccgccgagtacaacctgagaagcagaaccgtgctgtgcggcacctgcggccagcccgccgacaaggccagcgccagcggcagcggcgcccaggtgggcggccccatcagcagcggcagcagcgccagcagcgtgaccgtgaccagaagctacagaagcgtgggcggcagcggcggcggcagcttcggcgacaacctggtgaccagaagctacctgctgggcaacagcagccccagaacccagagcccccagaactgcagcatcatgtag

SEQ ID NO: 86461 - DNA, 1719 bp, synthetic construct
  misc_feature 1..1719: note = Description of Artificial Sequence: Synthetic coding sequence
  source 1..1719: mol_type = other DNA
atggagacccccagccagagaagagccaccagaagcggcgcccaggccagcagcacccccctgagccccaccagaatcaccagactgcaggagaaggaggacctgcaggagctgaacgacagactggccgtgtacatcgacagagtgagaagcctggagaccgagaacgccggcctgagactgagaatcaccgagagcgaggaggtggtgagcagagaggtgagcggcatcaaggccgcctacgaggccgagctgggcgacgccagaaagaccctggacagcgtggccaaggagagagccagactgcagctggagctgagcaaggtgagagaggagttcaaggagctgaaggccagaaacaccaagaaggagggcgacctgatcgccgcccaggccagactgaaggacctggaggccctgctgaacagcaaggaggccgccctgagcaccgccctgagcgagaagagaaccctggagggcgagctgcacgacctgagaggccaggtggccaagctggaggccgccctgggcgaggccaagaagcagctgcaggacgagatgctgagaagagtggacgccgagaacagactgcagaccatgaaggaggagctggacttccagaagaacatctacagcgaggagctgagagagaccaagagaagacacgagaccagactggtggagatcgacaacggcaagcagagagagttcgagagcagactggccgacgccctgcaggagctgagagcccagcacgaggaccaggtggagcagtacaagaaggagctggagaagacctacagcgccaagctggacaacgccagacagagcgccgagagaaacagcaacctggtgggcgccgcccacgaggagctgcagcagagcagaatcagaatcgacagcctgagcgcccagctgagccagctgcagaagcagctggccgccaaggaggccaagctgagagacctggaggacagcctggccagagagagagacaccagcagaagactgctggccgagaaggagagagagatggccgagatgagagccagaatgcagcagcagctggacgagtaccaggagctgctggacatcaagctggccctggacatggagatccacgcctacagaaagctgctggagggcgaggaggagagactgagactgagccccagccccaccagccagagaagcagaggcagagccagcagccacagcagccagacccagggcggcggcagcgtgaccaagaagagaaagctggagagcaccgagagcagaagcagcttcagccagcacgccagaaccagcggcagagtggccgtggaggaggtggacgaggagggcaagttcgtgagactgagaaacaagagcaacgaggaccagagcatgggcaactggcagatcaagagacagaacggcgacgaccccctgctgacctacagattcccccccaagttcaccctgaaggccggccaggtggtgaccatctgggccgccggcgccggcgccacccacagcccccccaccgacctggtgtggaaggcccagaacacctggggctgcggcaacagcctgagaaccgccctgatcaacagcaccggcgaggaggtggccatgagaaagctggtgagaagcgtgaccgtggtggaggacgacgaggacgaggacggcgacgacctgctgcaccaccaccacgtgagcggcagcagaagatag

SEQ ID NO: 86462 - DNA, 1476 bp, synthetic construct
  misc_feature 1..1476: note = Description of Artificial Sequence: Synthetic coding sequence
  source 1..1476: mol_type = other DNA
atgcagcccctgctgtgcctgggcaacctggaggacgccagagagagaaccggcaccctgctggcccagcaccccgcctggggcagaaccagagccaagcccggcagccccctgaacaccaagaaggagggcgacctgatcgccgcccaggccagactgaaggacctggaggccctgctgaacagcaaggaggccgccctgagcaccgccctgagcgagaagagaaccctggagggcgagctgcacgacctgagaggccaggtggccaagctggaggccgccctgggcgaggccaagaagcagctgcaggacgagatgctgagaagagtggacgccgagaacagactgcagaccatgaaggaggagctggacttccagaagaacatctacagcgaggagctgagagagaccaagagaagacacgagaccagactggtggagatcgacaacggcaagcagagagagttcgagagcagactggccgacgccctgcaggagctgagagcccagcacgaggaccaggtggagcagtacaagaaggagctggagaagacctacagcgccaagctggacaacgccagacagagcgccgagagaaacagcaacctggtgggcgccgcccacgaggagctgcagcagagcagaatcagaatcgacagcctgagcgcccagctgagccagctgcagaagcagctggccgccaaggaggccaagctgagagacctggaggacagcctggccagagagagagacaccagcagaagactgctggccgagaaggagagagagatggccgagatgagagccagaatgcagcagcagctggacgagtaccaggagctgctggacatcaagctggccctggacatggagatccacgcctacagaaagctgctggagggcgaggaggagagactgagactgagccccagccccaccagccagagaagcagaggcagagccagcagccacagcagccagacccagggcggcggcagcgtgaccaagaagagaaagctggagagcaccgagagcagaagcagcttcagccagcacgccagaaccagcggcagagtggccgtggaggaggtggacgaggagggcaagttcgtgagactgagaaacaagagcaacgaggaccagagcatgggcaactggcagatcaagagacagaacggcgacgaccccctgctgacctacagattcccccccaagttcaccctgaaggccggccaggtggtgaccatctgggccgccggcgccggcgccacccacagcccccccaccgacctggtgtggaaggcccagaacacctggggctgcggcaacagcctgagaaccgccctgatcaacagcaccggcgaggaggtggccatgagaaagctggtgagaagcgtgaccgtggtggaggacgacgaggacgaggacggcgacgacctgctgcaccaccaccacgtgagcggcagcagaagatag

SEQ ID NO: 86463 - DNA, 1845 bp, synthetic construct
  misc_feature 1..1845: note = Description of Artificial Sequence: Synthetic coding sequence
  source 1..1845: mol_type = other DNA
atggagacccccagccagagaagagccaccagaagcggcgcccaggccagcagcacccccctgagccccaccagaatcaccagactgcaggagaaggaggacctgcaggagctgaacgacagactggccgtgtacatcgacagagtgagaagcctggagaccgagaacgccggcctgagactgagaatcaccgagagcgaggaggtggtgagcagagaggtgagcggcatcaaggccgcctacgaggccgagctgggcgacgccagaaagaccctggacagcgtggccaaggagagagccagactgcagctggagctgagcaaggtgagagaggagttcaaggagctgaaggccagaaacaccaagaaggagggcgacctgatcgccgcccaggccagactgaaggacctggaggccctgctgaacagcaaggaggccgccctgagcaccgccctgagcgagaagagaaccctggagggcgagctgcacgacctgagaggccaggtggccaagctggaggccgccctgggcgaggccaagaagcagctgcaggacgagatgctgagaagagtggacgccgagaacagactgcagaccatgaaggaggagctggacttccagaagaacatctacagcgaggagctgagagagaccaagagaagacacgagaccagactggtggagatcgacaacggcaagcagagagagttcgagagcagactggccgacgccctgcaggagctgagagcccagcacgaggaccaggtggagcagtacaagaaggagctggagaagacctacagcgccaagctggacaacgccagacagagcgccgagagaaacagcaacctggtgggcgccgcccacgaggagctgcagcagagcagaatcagaatcgacagcctgagcgcccagctgagccagctgcagaagcagctggccgccaaggaggccaagctgagagacctggaggacagcctggccagagagagagacaccagcagaagactgctggccgagaaggagagagagatggccgagatgagagccagaatgcagcagcagctggacgagtaccaggagctgctggacatcaagctggccctggacatggagatccacgcctacagaaagctgctggagggcgaggaggagagactgagactgagccccagccccaccagccagagaagcagaggcagagccagcagccacagcagccagacccagggcggcggcagcgtgaccaagaagagaaagctggagagcaccgagagcagaagcagcttcagccagcacgccagaaccagcggcagagtggccgtggaggaggtggacgaggagggcaagttcgtgagactgagaaacaagagcaacgaggaccagagcatgggcaactggcagatcaagagacagaacggcgacgaccccctgctgacctacagattcccccccaagttcaccctgaaggccggccaggtggtgaccatctgggccgccggcgccggcgccacccacagcccccccaccgacctggtgtggaaggcccagaacacctggggctgcggcaacagcctgagaaccgccctgatcaacagcaccggcgaggaggtggccatgagaaagctggtgagaagcgtgaccgtggtggaggacgacgaggacgaggacggcgacgacctgctgcaccaccaccacggcagccactgcagcagcagcggcgaccccgccgagtacaacctgagaagcagaaccgtgctgtgcggcacctgcggccagcccgccgacaaggccagcgccagcggcagcggcgcccagagcccccagaactgcagcatcatgtag

SEQ ID NO: 86464 - DNA, 1995 bp, synthetic construct
  misc_feature 1..1995: note = Description of Artificial Sequence: Synthetic coding sequence
  source 1..1995: mol_type = other DNA
atggagacccccagccagagaagagccaccagaagcggcgcccaggccagcagcacccccctgagccccaccagaatcaccagactgcaggagaaggaggacctgcaggagctgaacgacagactggccgtgtacatcgacagagtgagaagcctggagaccgagaacgccggcctgagactgagaatcaccgagagcgaggaggtggtgagcagagaggtgagcggcatcaaggccgcctacgaggccgagctgggcgacgccagaaagaccctggacagcgtggccaaggagagagccagactgcagctggagctgagcaaggtgagagaggagttcaaggagctgaaggccagaaacaccaagaaggagggcgacctgatcgccgcccaggccagactgaaggacctggaggccctgctgaacagcaaggaggccgccctgagcaccgccctgagcgagaagagaaccctggagggcgagctgcacgacctgagaggccaggtggccaagctggaggccgccctgggcgaggccaagaagcagctgcaggacgagatgctgagaagagtggacgccgagaacagactgcagaccatgaaggaggagctggacttccagaagaacatctacagcgaggagctgagagagaccaagagaagacacgagaccagactggtggagatcgacaacggcaagcagagagagttcgagagcagactggccgacgccctgcaggagctgagagcccagcacgaggaccaggtggagcagtacaagaaggagctggagaagacctacagcgccaagctggacaacgccagacagagcgccgagagaaacagcaacctggtgggcgccgcccacgaggagctgcagcagagcagaatcagaatcgacagcctgagcgcccagctgagccagctgcagaagcagctggccgccaaggaggccaagctgagagacctggaggacagcctggccagagagagagacaccagcagaagactgctggccgagaaggagagagagatggccgagatgagagccagaatgcagcagcagctggacgagtaccaggagctgctggacatcaagctggccctggacatggagatccacgcctacagaaagctgctggagggcgaggaggagagactgagactgagccccagccccaccagccagagaagcagaggcagagccagcagccacagcagccagacccagggcggcggcagcgtgaccaagaagagaaagctggagagcaccgagagcagaagcagcttcagccagcacgccagaaccagcggcagagtggccgtggaggaggtggacgaggagggcaagttcgtgagactgagaaacaagagcaacgaggaccagagcatgggcaactggcagatcaagagacagaacggcgacgaccccctgctgacctacagattcccccccaagttcaccctgaaggccggccaggtggtgaccatctgggccgccggcgccggcgccacccacagcccccccaccgacctggtgtggaaggcccagaacacctggggctgcggcaacagcctgagaaccgccctgatcaacagcaccggcgaggaggtggccatgagaaagctggtgagaagcgtgaccgtggtggaggacgacgaggacgaggacggcgacgacctgctgcaccaccaccacggcagccactgcagcagcagcggcgaccccgccgagtacaacctgagaagcagaaccgtgctgtgcggcacctgcggccagcccgccgacaaggccagcgccagcggcagcggcgcccaggtgggcggccccatcagcagcggcagcagcgccagcagcgtgaccgtgaccagaagctacagaagcgtgggcggcagcggcggcggcagcttcggcgacaacctggtgaccagaagctacctgctgggcaacagcagccccagaacccagagcccccagaactgcagcatcatgtag

SEQ ID NO: 86465 - DNA, 1719 bp, synthetic construct; identical to SEQ ID NO: 86461
  misc_feature 1..1719: note = Description of Artificial Sequence: Synthetic coding sequence
  source 1..1719: mol_type = other DNA

SEQ ID NO: 86466 - DNA, 1476 bp, synthetic construct; identical to SEQ ID NO: 86462
  misc_feature 1..1476: note = Description of Artificial Sequence: Synthetic coding sequence
  source 1..1476: mol_type = other DNA

SEQ ID NO: 86467 - DNA, 1464 bp, synthetic construct
  misc_feature 1..1464: note = Description of Artificial Sequence: Synthetic coding sequence
  source 1..1464: mol_type = other DNA
atggagacccccagccagagaagagccaccagaagcggcgcccaggccagcagcacccccctgagccccaccagaatcaccagactgcaggagaaggaggacctgcaggagctgaacgacagactggccgtgtacatcgacagagtgagaagcctggagaccgagaacgccggcctgagactgagaatcaccgagagcgaggaggtggtgagcagagaggtgagcggcatcaaggccgcctacgaggccgagctgggcgacgccagaaagaccctggacagcgtggccaaggagagagccagactgcagctggagctgagcaaggtgagagaggagttcaaggagctgaaggccagaaacaccaagaaggagggcgacctgatcgccgcccaggccagactgaaggacctggaggccctgctgaacagcaaggaggccgccctgagcaccgccctgagcgagaagagaaccctggagggcgagctgcacgacctgagaggccaggtggccaagctggaggccgccctgggcgaggccaagaagcagctgcaggacgagatgctgagaagagtggacgccgagaacagactgcagaccatgaaggaggagctggacttccagaagaacatctacagcgaggagctgagagagaccaagagaagacacgagaccagactggtggagatcgacaacggcaagcagagagagttcgagagcagactggccgacgccctgcaggagctgagagcccagcacgaggaccaggtggagcagtacaagaaggagctggagaagacctacagcgccaagctggacaacgccagacagagcgccgagagaaacagcaacctggtgggcgccgcccacgaggagctgcagcagagcagaatcagaatcgacagcctgagcgcccagctgagccagctgcagaagcagctggccgccaaggaggccaagctgagagacctggaggacagcctggccagagagagagacaccagcagaagactgctggccgagaaggagagagagatggccgagatgagagccagaatgcagcagcagctggacgagtaccaggagctgctggacatcaagctggccctggacatggagatccacgcctacagaaagctgctggagggcgaggaggagagactgagactgagccccagccccaccagccagagaagcagaggcagagccagcagccacagcagccagacccagggcggcggcagcgtgaccaagaagagaaagctggagagcaccgagagcagaagcagcttcagccagcacgccagaaccagcggcaacagcctgagaaccgccctgatcaacagcaccggcgaggaggtggccatgagaaagctggtgagaagcgtgaccgtggtggaggacgacgaggacgaggacggcgacgacctgctgcaccaccaccacgtgagcggcagcagaagatag

SEQ ID NO: 86468 - DNA, 1725 bp, synthetic construct
  misc_feature 1..1725: note = Description of Artificial Sequence: Synthetic coding sequence
  source 1..1725: mol_type = other DNA
atgggcaacagcgagggctgcaacaccaagaaggagggcgacctgatcgccgcccaggccagactgaaggacctggaggccctgctgaacagcaaggaggccgccctgagcaccgccctgagcgagaagagaaccctggagggcgagctgcacgacctgagaggccaggtggccaagctggaggccgccctgggcgaggccaagaagcagctgcaggacgagatgctgagaagagtggacgccgagaacagactgcagaccatgaaggaggagctggacttccagaagaacatctacagcgaggagctgagagagaccaagagaagacacgagaccagactggtggagatcgacaacggcaagcagagagagttcgagagcagactggccgacgccctgcaggagctgagagcccagcacgaggaccaggtggagcagtacaagaaggagctggagaagacctacagcgccaagctggacaacgccagacagagcgccgagagaaacagcaacctggtgggcgccgcccacgaggagctgcagcagagcagaatcagaatcgacagcctgagcgcccagctgagccagctgcagaagcagctggccgccaaggaggccaagctgagagacctggaggacagcctggccagagagagagacaccagcagaagactgctggccgagaaggagagagagatggccgagatgagagccagaatgcagcagcagctggacgagtaccaggagctgctggacatcaagctggccctggacatggagatccacgcctacagaaagctgctggagggcgaggaggagagactgagactgagccccagccccaccagccagagaagcagaggcagagccagcagccacagcagccagacccagggcggcggcagcgtgaccaagaagagaaagctggagagcaccgagagcagaagcagcttcagccagcacgccagaaccagcggcagagtggccgtggaggaggtggacgaggagggcaagttcgtgagactgagaaacaagagcaacgaggaccagagcatgggcaactggcagatcaagagacagaacggcgacgaccccctgctgacctacagattcccccccaagttcaccctgaaggccggccaggtggtgaccatctgggccgccggcgccggcgccacccacagcccccccaccgacctggtgtggaaggcccagaacacctggggctgcggcaacagcctgagaaccgccctgatcaacagcaccggcgaggaggtggccatgagaaagctggtgagaagcgtgaccgtggtggaggacgacgaggacgaggacggcgacgacctgctgcaccaccaccacggcagccactgcagcagcagcggcgaccccgccgagtacaacctgagaagcagaaccgtgctgtgcggcacctgcggccagcccgccgacaaggccagcgccagcggcagcggcgcccaggtgggcggccccatcagcagcggcagcagcgccagcagcgtgaccgtgaccagaagctacagaagcgtgggcggcagcggcggcggcagcttcggcgacaacctggtgaccagaagctacctgctgggcaacagcagccccagaacccagagcccccagaactgcagcatcatccaggagatgggcatgagatgggaggtggaggagggcagaagaaaggtgagcctgagctgcctgccctag

SEQ ID NO: 86469 - DNA, 1848 bp, synthetic construct
  misc_feature 1..1848: note = Description of Artificial Sequence: Synthetic coding sequence
  source 1..1848: mol_type = other DNA
atgcccagcagaaagttcgccgacggcgaggtggtgagaggcagatggcccggcagcagcctgtactacgaggtggagatcctgagccacgacagcaccagccagctgtacaccgtgaagtacaaggacggcaccgagctggagctgaaggagaacgacatcaagcccctgaccagcttcagacagagaaagggcggcagcaccagcagcagccccagcagaagaagaggcagcagaagcagaagcagaagcagaagccccggcagaccccccaagagcgccagaagaagcgccagcgccagccaccaggccgacatcaaggaggccagaagagaggtggaggtgaagctgacccccctgatcctgaagcccttcggcaacagcatcagcagatacaacggcgagcccgagcacatcgagagaaacgacgccccccacaagaacacccaggagaagttcagcctgagccaggagagcagctacatcgccacccagtacagcctgagacccagaagagaggaggtgaagctgaaggagatcgacagcaaggaggagaagtacgtggccaaggagctggccgtgagaaccttcgaggtgacccccatcagagccaaggacctggagttcggcggcgtgcccggcgtgttcctgatcatgttcggcctgcccgtgttcctgttcctgctgctgctgatgtgcaagcagaaggaccccagcctgctgaacttccccccccccctgcccgccctgtacgagctgtgggagaccagagtgttcggcgtgtacctgctgtggttcctgatccaggtgctgttctacctgctgcccatcggcaaggtggtggagggcacccccctgatcgacggcagaagactgaagtacagactgaacggcttctacgccttcatcctgaccagcgccgtgatcggcaccagcctgttccagggcgtggagttccactacgtgtacagccacttcctgcagttcgccctggccgccaccgtgttctgcgtggtgctgagcgtgtacctgtacatgagaagcctgaaggcccccagaaacgacctgagccccgccagcagcggcaacgccgtgtacgacttcttcatcggcagagagctgaaccccagaatcggcaccttcgacctgaagtacttctgcgagctgagacccggcctgatcggctgggtggtgatcaacctggtgatgctgctggccgagatgaagatccaggacagagccgtgcccagcctggccatgatcctggtgaacagcttccagctgctgtacgtggtggacgccctgtggaacgaggaggccctgctgaccaccatggacatcatccacgacggcttcggcttcatgctggccttcggcgacctggtgtgggtgcccttcatctacagcttccaggccttctacctggtgagccaccccaacgaggtgagctggcccatggccagcctgatcatcgtgctgaagctgtgcggctacgtgatcttcagaggcgccaacagccagaagaacgccttcagaaagaaccccagcgaccccaagctggcccacctgaagaccatccacaccagcaccggcaagaacctgctggtgagcggctggtggggcttcgtgagacaccccaactacctgggcgacctgatcatggccctggcctggagcctgccctgcggcttcaaccacatcctgccctacttctacatcatctacttcaccatgctgctggtgcacagagaggccagagacgagtaccactgcaagaagaagtacggcgtggcctgggagaagtactgccagagagtgccctacagaatcttcccctacatctactag

SEQ ID NO: 86470 - DNA, 1848 bp, synthetic construct; identical to SEQ ID NO: 86469
  misc_feature 1..1848: note = Description of Artificial Sequence: Synthetic coding sequence
  source 1..1848: mol_type = other DNA

SEQ ID NO: 86471 - DNA, 156 bp, synthetic construct
  misc_feature 1..156: note = Description of Artificial Sequence: Synthetic coding sequence
  source 1..156: mol_type = other DNA
atgcccagcagaaagttcgccgacggcgaggtggtgagaggcagatggcccggcagcagcctgtactacgaggtggagatcctgagccacgacagcaccagccagctgtacaccgtgaagtacaaggacggcaccgagctggagctgaaggagtag

SEQ ID NO: 86472 - DNA, 387 bp, synthetic construct
  misc_feature 1..387: note = Description of Artificial Sequence: Synthetic coding sequence
  source 1..387: mol_type = other DNA
atcggcagagagctgaaccccagaatcggcaccttcgacctgaagtacttctgcgagctgagacccggcctgatcggctgggtggtgatcaacctggtgatgctgctggccgagatgaagatccaggacagagccgtgcccagcctggccatgatcctggtgaacagcttccagctgctgtacgtggtggacgccctgtggaacgaggaggccctgctgaccaccatggacatcatccacgacggcttcggcttcatgctggccttcggcgacctggtgtgggtgcccttcatctacagcttccaggccttctacctggtgagccaccccaacgaggtgagctggcccatggccagcctgatcatcgtgctgaagagagagtactag

SEQ ID NO: 86473 - DNA, 642 bp, synthetic construct
  misc_feature 1..642: note = Description of Artificial Sequence: Synthetic coding sequence
  source 1..642: mol_type = other DNA
atgcccagcagaaagttcgccgacggcgaggtggtgagaggcagatggcccggcagcagcctgtactacgaggtggagatcctgagccacgacagcaccagccagctgtacaccgtgaagtacaaggacggcaccgagctggagctgaaggagaacgacatcaagcccctgaccagcttcagacagagaaagggcggcagcaccagcagcagccccagcagaagaagaggcagcagaagcagaagcagaagcagaagccccggcagaccccccaagagcgccagaagaagcgccagcgccagccaccaggccgacatcaaggaggccagaagagaggtggaggtgaagctgacccccctgatcctgaagcccttcggcaacagcatcagcagatacaacggcgagcccgagcacatcgagagaaacgacgccccccacaagaacacccaggagaagttcagcctgagccaggagagcagctacatcgccacccagtacagcctgagacccagaagagaggaggtgaagctgaaggagatcgacagcaaggaggagaagtacgtggccaaggagctggccgtgagaaccttcgaggtgacccccatcagagccaaggacctggagttcggcggcgtgccctag

SEQ ID NO: 86474 - DNA, 324 bp, synthetic construct
  misc_feature 1..324: note = Description of Artificial Sequence: Synthetic coding sequence
  source 1..324: mol_type = other DNA
tgaagcaccagcctgaagatgtacttctacttctacatcgacctgaagaccatccacaccagcaccggcaagaacctgctggtgagcggctggtggggcttcgtgagacaccccaactacctgggcgacctgatcatggccctggcctggagcctgccctgcggcttcaaccacatcctgccctacttctacatcatctacttcaccatgctgctggtgcacagagaggccagagacgagtaccactgcaagaagaagtacggcgtggcctgggagaagtactgccagagagtgccctacagaatcttcccctacatctactag

SEQ ID NO: 86475 - DNA, 1761 bp, synthetic construct
  misc_feature 1..1761: note = Description of Artificial Sequence: Synthetic coding sequence
  source 1..1761: mol_type = other DNA
atggccaccgccacccccgtgccccccagaatgggcagcagagccggcggccccaccacccccctgagccccaccagactgagcagactgcaggagaaggaggagctgagagagctgaacgacagactggccgtgtacatcgacaaggtgagaagcctggagaccgagaacagcgccctgcagctgcaggtgaccgagagagaggaggtgagaggcagagagctgaccggcctgaaggccctgtacgagaccgagctggccgacgccagaagagccctggacgacaccgccagagagagagccaagctgcagatcgagctgggcaagtgcaaggccgagcacgaccagctgctgctgaactacgccaagaaggagagcgacctgaacggcgcccagatcaagctgagagagtacgaggccgccctgaacagcaaggacgccgccctggccaccgccctgggcgacaagaagagcctggagggcgacctggaggacctgaaggaccagatcgcccagctggaggccagcctggccgccgccaagaagcagctggccgacgagaccctgctgaaggtggacctggagaacagatgccagagcctgaccgaggacctggagttcagaaagagcatgtacgaggaggagatcaacgagaccagaagaaagcacgagaccagactggtggaggtggacagcggcagacagatcgagtacgagtacaagctggcccaggccctgcacgagatgagagagcagcacgacgcccaggtgagactgtacaaggaggagctggagcagacctaccacgccaagctggagaacgccagactgagcagcgagatgaacaccagcaccgtgaacagcgccagagaggagctgatggagagcagaatgagaatcgagagcctgagcagccagctgagcaacctgcagaaggagagcagagcctgcctggagagaatccaggagctggaggacctgctggccaaggagaaggacaacagcagaagaatgctgaccgacaaggagagagagatggccgagatcagagaccagatgcagcagcagctgaacgactacgagcagctgctggacgtgaagctggccctggacatggagatcagcgcctacagaaagctgctggagggcgaggaggagagactgaagctgagccccagccccagcagcagagtgaccgtgagcagagccagcagcagcagaagcgtgagaaccaccagaggcaagagaaagagagtggacgtggaggagagcgaggccagcagcagcgtgagcatcagccacagcgccagcgccaccggcaacgtgtgcatcgaggagatcgacgtggacggcaagttcatcagactgaagaacaccagcgagcaggaccagcccatgggcggctgggagatgatcagaaagatcggcgacaccagcgtgagctacaagtacaccagcagatacgtgctgaaggccggccagaccgtgaccatctgggccgccaacgccggcgtgaccgccagcccccccaccgacctgatctggaagaaccagaacagctggggcaccggcgaggacgtgaaggtgatcctgaagaacagccagggcgaggaggtggcccagagaagcaccgtgttcaagaccaccatccccgaggaggaggaggaggaggaggaggccgccggcgtggtggtggaggaggagctgttccaccagcagggcacccccagagccagcaacagaagctgcgccatcatgtag

SEQ ID NO: 86476 - DNA, 1803 bp, synthetic construct
  misc_feature 1..1803: note = Description of Artificial Sequence: Synthetic coding sequence
  source 1..1803: mol_type = other DNA
atggccacccccctgcccggcagagccggcggccccgccacccccctgagccccaccagactgagcagactgcaggagaaggaggagctgagagagctgaacgacagactggcccactacatcgacagagtgagagccctggagctggagaacgacagactgctgctgaagatcagcgagaaggaggaggtgaccaccagagaggtgagcggcatcaaggccctgtacgagagcgagctggccgacgccagaagagtgctggacgagaccgccagagagagagccagactgcagatcgagatcggcaagctgagagccgagctggacgaggtgaacaagagcgccaagaagagagagggcgagctgaccgtggcccagggcagagtgaaggacctggagagcctgttccacagaagcgaggtggagctggccgccgccctgagcgacaagagaggcctggagagcgacgtggccgagctgagagcccagctggccaaggccgaggacggccacgccgtggccaagaagcagctggagaaggagaccctgatgagagtggacctggagaacagatgccagagcctgcaggaggagctggacttcagaaagagcgtgttcgaggaggaggtgagagagaccagaagaagacacgagagaagactggtggaggtggacagcagcagacagcaggagtacgacttcaagatggcccaggccctggaggagctgagaagccagcacgacgagcaggtgagactgtacaagctggagctggagcagacctaccaggccaagctggacagcgccaagctgagcagcgaccagaacgacaaggccgccagcgccgccagagaggagctgaaggaggccagaatgagactggagagcctgagctaccagctgagcggcctgcagaagcaggccagcgccgccgaggacagaatcagagagctggaggaggccatggccggcgagagagacaagttcagaaagatgctggacgccaaggagcaggagatgaccgagatgagagacgtgatgcagcagcagctggccgagtaccaggagctgctggacgtgaagctggccctggacatggagatcaacgcctacagaaagctgctggagggcgaggaggagagactgaagctgagccccagccccagcagcagagtgaccgtgagcagagccaccagcagcagcagcggcagcctgagcgccaccggcagactgggcagaagcaagagaaagagactggaggtggaggagcccctgggcagcggccccagcgtgctgggcaccggcaccggcggcagcggcggcttccacctggcccagcaggccagcgccagcggcagcgtgagcatcgaggagatcgacctggagggcaagttcgtgcagctgaagaacaacagcgacaaggaccagagcctgggcaactggagaatcaagagacaggtgctggagggcgaggagatcgcctacaagttcacccccaagtacatcctgagagccggccagatggtgaccgtgtgggccgccggcgccggcgtggcccacagcccccccagcaccctggtgtggaagggccagagcagctggggcaccggcgagagcttcagaaccgtgctggtgaacgccgacggcgaggaggtggccatgagaaccgtgaagaagagcagcgtgatgagagagaacgagaacggcgaggaggaggaggaggaggccgagttcggcgaggaggacctgttccaccagcagggcgaccccagaaccaccagcagaggctgctacgtgatgtag

SEQ ID NO: 86477 - DNA, 1803 bp, synthetic construct; identical to SEQ ID NO: 86476
  misc_feature 1..1803: note = Description of Artificial Sequence: Synthetic coding sequence
  source 1..1803: mol_type = other DNA

SEQ ID NO: 86478 - DNA, 651 bp, synthetic construct
  misc_feature 1..651: note = Description of Artificial Sequence: Synthetic coding sequence
  source 1..651: mol_type = other DNA
atgctgatcggcggcaacatcgaggtgcacgtgaaccccggcgacggcaccggcctgagaaaggccctgctgcacgcccccaccggcacctgcagcgacggccaggcccacagcatcagcctggtgagaaacagaagaatcatcaccgtgcagctggacgagaacaaccccgtggagatgaagctgggcaccctggtggagagcagaaccatcaacgtgagcaacctgtacgtgggcggcatccccgagggcgagggcaccagcctgctgaccatgagaagaagcttccacggctgcatcaagaacctgatcttcaacctggagctgctggacttcaacagcgccgtgatgagcaagagcacctggacccccgccggctgccagaagggcctgagctggctgcccatgcagagaaccaagctgctgcccgagcccagagccttccccgtgggcgccgccagcttcaccatcagccaggtgcagagcgccaaggagggcctgggccagagagagctgaagtggggcctggccgtgaaggtgcccgccaaggccggcgccggcgccggcgccggcgccgtgctgaagatcagagccggcaccggcagagagagagtgccccaggccacccagatgaccagacccaacccctag

SEQ ID NO: 86479 - DNA, 9228 bp, synthetic construct
  misc_feature 1..9228: note = Description of Artificial Sequence: Synthetic coding sequence
  source 1..9228: mol_type = other DNA
atgagaggcggcgtgctgctggtgctgctgctgtgcgtggccgcccagtgcagacagagaggcctgttccccgccatcctgaacctggccagcaacgcccacatcagcaccaacgccacctgcggcgagaagggccccgagatgttctgcaagctggtggagcacgtgcccggcagacccgtgagaaacccccagtgcagaatctgcgacggcaacagcgccaaccccagagagagacaccccatcagccacgccatcgacggcaccaacaactggtggcagagccccagcatccagaacggcagagagtaccactgggtgaccatcaccctggacctgagacaggtgttccaggtggcctacgtgatcatcaaggccgccaacgcccccagacccggcaactggatcctggagagaagcctggacggcaccaccttcagcccctggcagtactacgccgtgagcgacagcgagtgcctgagcagatacaacatcacccccagaagaggcccccccacctacagagccgacgacgaggtgatctgcaccagctactacagcagactggtgcccctggagcacggcgagatccacaccagcctgatcaacggcagacccagcgccgacgacctgagccccaagctgctggagttcaccagcgccagatacatcagactgagactgcagagaatcagaaccctgaacgccgacctgatgaccctgagccacagagagcccaaggagctggaccccatcgtgaccagaagatactactacagcatcaaggacatcagcgtgggcggcatgtgcatctgctacggccacgccagcagctgcccctgggacgagaccaccaagaagctgcagtgccagtgcgagcacaacacctgcggcgagagctgcaacagatgctgccccggctaccaccagcagccctggagacccggcaccgtgagcagcggcaacacctgcgaggcctgcaactgccacaacaaggccaaggactgctactacgacgagagcgtggccaagcagaagaagagcctgaacaccgccggccagttcagaggcggcggcgtgtgcatcaactgcctgcagaacaccatgggcatcaactgcgagacctgcatcgacggctactacagaccccacaaggtgagcccctacgaggacgagccctgcagaccctgcaactgcgaccccgtgggcagcctgagcagcgtgtgcatcaaggacgacctgcacagcgacctgcacaacggcaagcagcccggccagtgcccctgcaaggagggctacaccggcgagaagtgcgacagatgccagctgggctacaaggactaccccacctgcgtgagctgcggctgcaaccccgtgggcagcgccagcgacgagccctgcaccggcccctgcgtgtgcaaggagaacgtggagggcaaggcctgcgacagatgcaagcccggcttctacaacctgaaggagaagaaccccagaggctgcagcgagtgcttctgcttcggcgtgagcgacgtgtgcagcagcctgagctggcccgtgggccaggtgaacagcatgagcggctggctggtgaccgacctgatcagccccagaaagatccccagccagcaggacgccctgggcggcagacaccaggtgagcatcaacaacaccgccgtgatgcagagactggcccccaagtactactgggccgcccccgaggcctacctgggcaacaagctgaccgccttcggcggcttcctgaagtacaccgtgagctacgacatccccgtggagaccgtggacagcaacctgatgagccacgccgacgtgatcatcaagggcaacggcctgaccctgagcacccaggccgagggcctgagcctgcagccctacgaggagtacctgaacgtggtgagactggtgcccgagaacttccaggacttccacagcaagagacagatcgacagagaccagctgatgaccgtgctggccaacgtgacccacctgctgatcagagccaactacaacagcgccaagatggccctgtacagactggagagcgtgagcctggacatcgccagcagcaacgccatcgacctggtggtggccgccgacgtggagcactgcgagtgcccccagggctacaccggcaccagctgcgagagctgcctgagcggctactacagagtggacggcatcctgttcggcggcatctgccagccctgcgagtgccacggccacgccgccgagtgcaacgtgcacggcgtgtgcatcgcctgcgcccacaacaccaccggcgtgcactgcgagcagtgcctgcccggcttctacggcgagcccagcagaggcacccccggcgactgccagccctgcgcctgccccctgaccatcgccagcaacaacttcagccccacctgccacctgaacgacggcgacgaggtggtgtgcgactggtgcgcccccggctacagcggcgcctggtgcgagagatgcgccgacggctactacggcaaccccaccgtgcccggcgagagctgcgtgccctgcgactgcagcggcaacgtggaccccagcgaggccggccactgcgacagcgtgaccggcgagtgcctgaagtgcctgggcaacaccgacggcgcccactgcgagagatgcgccgacggcttctacggcgacgccgtgaccgccaagaactgcagagcctgcgagtgccacgtgaagggcagccacagcgccgtgtgccacctggagaccggcctgtgcgactgcaagcccaacgtgaccggccagcagtgcgaccagtgcctgcacggctactacggcctggacagcggccacggctgcagaccctgcaactgcagcgtggccggcagcgtgagcgacggctgcaccgacgagggccagtgccactgcgtgcccggcgtggccggcaagagatgcgacagatgcgcccacggcttctacgcctaccaggacggcagctgcaccccctgcgactgcccccacacccagaacacctgcgaccccgagaccggcgagtgcgtgtgccccccccacacccagggcgtgaagtgcgaggagtgcgaggacggccactggggctacgacgccgaggtgggctgccaggcctgcaactgcagcctggtgggcagcacccaccacagatgcgacgtggtgaccggccactgccagtgcaagagcaagttcggcggcagagcctgcgaccagtgcagcctgggctacagagacttccccgactgcgtgccctgcgactgcgacctgagaggcaccagcggcgacgcctgcaacctggagcagggcctgtgcggctgcgtggaggagaccggcgcctgcccctgcaaggagaacgtgttcggcccccagtgcaacgagtgcagagagggcaccttcgccctgagagccgacaaccccctgggctgcagcccctgcttctgcagcggcctgagccacctgtgcagcgagctggaggactacgtgagaacccccgtgaccctgggcagcgaccagcccctgctgagagtggtgagccagagcaacctgagaggcaccaccgagggcgtgtactaccaggcccccgacttcctgctggacgccgccaccgtgagacagcacatcagagccgagcccttctactggagactgccccagcagttccagggcgaccagctgatggcctacggcggcaagctgaagtacagcgtggccttctacagcctggacggcgtgggcaccagcaacttcgagccccaggtgctgatcaagggcggcagaatcagaaagcaggtgatctacatggacgcccccgcccccgagaacggcgtgagacaggagcaggaggtggccatgagagagaacttctggaagtacttcaacagcgtgagcgagaagcccgtgaccagagaggacttcatgagcgtgctgagcgacatcgagtacatcctgatcaaggccagctacggccagggcctgcagcagagcagaatcagcgacatcagcatggaggtgggcagaaaggccgagaagctgcaccccgaggaggaggtggccagcctgctggagaactgcgtgtgcccccccggcaccgtgggcttcagctgccaggactgcgcccccggctaccacagaggcaagctgcccgccggcagcgacagaggccccagacccctggtggccccctgcgtgccctgcagctgcaacaaccacagcgacacctgcgaccccaacaccggcaagtgcctgaactgcggcgacaacaccgccggcgaccactgcgacgtgtgcaccagcggctactacggcaaggtgaccggcagcgccagcgactgcgccctgtgcgcctgcccccacagcccccccgccagcttcagccccacctgcgtgctggagggcgaccacgacttcagatgcgacgcctgcctgctgggctacgagggcaagcactgcgagagatgcagcagcagctactacggcaacccccagacccccggcggcagctgccagaagtgcgactgcaacccccacggcagcgtgcacggcgactgcgacagaaccagcggccagtgcgtgtgcagactgggcgccagcggcctgagatgcgacgagtgcgagcccagacacatcctgatggagaccgactgcgtgagctgcgacgacgagtgcgtgggcgtgctgctgaacgacctggacgagatcggcgacgccgtgctgagcctgaacctgaccggcatcatccccgtgccctacggcatcctgagcaacctggagaacaccaccaagtacctgcaggagagcctgctgaaggagaacatgcagaaggacctgggcaagatcaagctggagggcgtggccgaggagaccgacaacctgcagaagaagctgaccagaatgctggccagcacccagaaggtgaacagagccaccgagagaatcttcaaggagagccaggacctggccatcgccatcgagagactgcagatgagcatcaccgagatcatggagaagaccaccctgaaccagaccctggacgaggacttcctgctgcccaacagcaccctgcagaacatgcagcagaacggcaccagcctgctggagatcatgcagatcagagacttcacccagctgcaccagaacgccaccctggagctgaaggccgccgaggacctgctgagccagatccaggagaactaccagaagcccctggaggagctggaggtgctgaaggaggccgccagccacgtgctgagcaagcacaacaacgagctgaaggccgccgaggccctggtgagagaggccgaggccaagatgcaggagagcaaccacctgctgctgatggtgaacgccaacctgagagagttcagcgacaagaagctgcacgtgcaggaggagcagaacctgaccagcgagctgatcgtgcagggcagaggcctgatcgacgccgccgccgcccagaccgacgccgtgcaggacgccctggagcacctggaggaccaccaggacaagctgctgctgtggagcgccaagatcagacaccacatcgacgacctggtgatgcacatgagccagagaaacgccgtggacctggtgtacagagccgaggaccacgccgccgagttccagagactggccgacgtgctgtacagcggcctggagaacatcagaaacgtgagcctgaacgccaccagcgccgcctacgtgcactacaacatccagagcctgatcgaggagagcgaggagctggccagagacgcccacagaaccgtgaccgagaccagcctgctgagcgagagcctggtgagcaacggcaaggccgccgtgcagagaagcagcagattcctgaaggagggcaacaacctgagcagaaagctgcccggcatcgccctggagctgagcgagctgagaaacaagaccaacagattccaggagaacgccgtggagatcaccagacagaccaacgagagcctgctgatcctgagagccatccccaagggcatcagagacaagggcgccaagaccaaggagctggccaccagcgccagccagagcgccgtgagcaccctgagagacgtggccggcctgagccaggagctgctgaacaccagcgccagcctgagcagagtgaacaccaccctgagagagacccaccagctgctgcaggacagcaccatggccaccctgctggccggcagaaaggtgaaggacgtggagatccaggccaacctgctgttcgacagactgaagcccctgaagatgctggaggagaacctgagcagaaacctgagcgagatcaagctgctgatcagccaggccagaaagcaggccgccagcatcaaggtggccgtgagcgccgacagagactgcatcagagcctaccagccccagatcagcagcaccaactacaacaccctgaccctgaacgtgaagacccaggagcccgacaacctgctgttctacctgggcagcagcaccgccagcgacttcctggccgtggagatgagaagaggcagagtggccttcctgtgggacctgggcagcggcagcaccagactggagttccccgacttccccatcgacgacaacagatggcacagcatccacgtggccagattcggcaacatcggcagcctgagcgtgaaggagatgagcagcaaccagaagagccccaccaagaccagcaagagccccggcaccgccaacgtgctggacgtgaacaacagcaccctgatgttcgtgggcggcctgggcggccagatcaagaagagccccgccgtgaaggtgacccacttcaagggctgcctgggcgaggccttcctgaacggcaagagcatcggcctgtggaactacatcgagagagagggcaagtgcagaggctgcttcggcagcagccagaacgaggaccccagcttccacttcgacggcagcggctacagcgtggtggagaagagcctgcccgccaccgtgacccagatcatcatgctgttcaacaccttcagccccaacggcctgctgctgtacctgggcagctacggcaccaaggacttcctgagcatcgagctgttcagaggcagagtgaaggtgatgaccgacctgggcagcggccccatcaccctgctgaccgacagaagatacaacaacggcacctggtacaagatcgccttccagagaaacagaaagcagggcgtgctggccgtgatcgacgcctacaacaccagcaacaaggagaccaagcagggcgagacccccggcgccagcagcgacctgaacagactggacaaggaccccatctacgtgggcggcctgcccagaagcagagtggtgagaagaggcgtgaccaccaagagcttcgtgggctgcatcaagaacctggagatcagcagaagcaccttcgacctgctgagaaacagctacggcgtgagaaagggctgcctgctggagcccatcagaagcgtgagcttcctgaagggcggctacatcgagctgccccccaagagcctgagccccgagagcgagtggctggtgaccttcgccaccaccaacagcagcggcatcatcctggccgccctgggcggcgacgtggagaagagaggcgacagagaggaggcccacgtgcccttcttcagcgtgatgctgatcggcggcaacatcgaggtgcacgtgaaccccggcgacggcaccggcctgagaaaggccctgctgcacgcccccaccggcacctgcagcgacggccaggcccacagcatcagcctggtgagaaacagaagaatcatcaccgtgcagctggacgagaacaaccccgtggagatgaagctgggcaccctggtggagagcagaaccatcaacgtgagcaacctgtacgtgggcggcatccccgagggcgagggcaccagcctgctgaccatgagaagaagcttccacggctgcatcaagaacctgatcttcaacctggagctgctggacttcaacagcgccgtgggccacgagcaggtggacctggacacctgctggctgagcgagagacccaagctggcccccgacgccgaggacagcaagctgctgcccgagcccagagccttccccgagcagtgcgtggtggacgccgccctggagtacgtgcccggcgcccaccagttcggcctgacccagaacagccacttcatcctgcccttcaaccagagcgccgtgagaaagaagctgagcgtggagctgagcatcagaaccttcgccagcagcggcctgatctactacatggcccaccagaaccaggccgactacgccgtgctgcagctgcacggcggcagactgcacttcatgttcgacctgggcaagggcagaaccaaggtgagccaccccgccctgctgagcgacggcaagtggcacaccgtgaagaccgactacgtgaagagaaagggcttcatcaccgtggacggcagagagagccccatggtgaccgtggtgggcgacggcaccatgctggacgtggagggcctgttctacctgggcggcctgcccagccagtaccaggccagaaagatcggcaacatcacccacagcatccccgcctgcatcggcgacgtgaccgtgaacagcaagcagctggacaaggacagccccgtgagcgccttcaccgtgaacagatgctacgccgtggcccaggagggcacctacttcgacggcagcggctacgccgccctggtgaaggagggctacaaggtgcagagcgacgtgaacatcaccctggagttcagaaccagcagccagaacggcgtgctgctgggcatcagcaccgccaaggtggacgccatcggcctggagctggtggacggcaaggtgctgttccacgtgaacaacggcgccggcagaatcaccgccgcctacgagcccaagaccgccaccgtgctgtgcgacggcaagtggcacaccctgcaggccaacaagagcaagcacagaatcaccctgatcgtggacggcaacgccgtgggcgccgagagcccccacacccagagcaccagcgtggacaccaacaaccccatctacgtgggcggctaccccgccggcgtgaagcagaagtgcctgagaagccagaccagcttcagaggctgcctgagaaagctggccctgatcaagagcccccaggtgcagagcttcgacttcagcagagccttcgagctgcacggcgtgttcctgcacagctgccccggcaccgagagctag

SEQ ID NO: 86480 - DNA, 9366 bp, synthetic construct
  misc_feature 1..9366: note = Description of Artificial Sequence: Synthetic coding sequence
  source 1..9366: mol_type = other DNA
atgcccggcgccgccggcgtgctgctgctgctgctgctgagcggcggcctgggcggcgtgcaggcccagagaccccagcagcagagacagagccaggcccaccagcagagaggcctgttccccgccgtgctgaacctggccagcaacgccctgatcaccaccaacgccacctgcggcgagaagggccccgagatgtactgcaagctggtggagcacgtgcccggccagcccgtgagaaacccccagtgcagaatctgcaaccagaacagcagcaaccccaaccagagacaccccatcaccaacgccatcgacggcaagaacacctggtggcagagccccagcatcaagaacggcatcgagtaccactacgtgaccatcaccctggacctgcagcaggtgttccagatcgcctacgtgatcgtgaaggccgccaacagccccagacccggcaactggatcctggagagaagcctggacgacgtggagtacaagccctggcagtaccacgccgtgaccgacaccgagtgcctgaccctgtacaacatctaccccagaaccggcccccccagctacgccaaggacgacgaggtgatctgcaccagcttctacagcaagatccaccccctggagaacggcgagatccacatcagcctgatcaacggcagacccagcgccgacgaccccagccccgagctgctggagttcaccagcgccagatacatcagactgagattccagagaatcagaaccctgaacgccgacctgatgatgttcgcccacaaggaccccagagagatcgaccccatcgtgaccagaagatactactacagcgtgaaggacatcagcgtgggcggcatgtgcatctgctacggccacgccagagcctgccccctggaccccgccaccaacaagagcagatgcgagtgcgagcacaacacctgcggcgacagctgcgaccagtgctgccccggcttccaccagaagccctggagagccggcaccttcctgaccaagaccgagtgcgaggcctgcaactgccacggcaaggccgaggagtgctactacgacgagaacgtggccagaagaaacctgagcctgaacatcagaggcaagtacatcggcggcggcgtgtgcatcaactgcacccagaacaccgccggcatcaactgcgagacctgcaccgacggcttcttcagacccaagggcgtgagccccaactaccccagaccctgccagccctgccactgcgaccccatcggcagcctgaacgaggtgtgcgtgaaggacgagaagcacgccagaagaggcctggcccccggcagctgccactgcaagaccggcttcggcggcgtgagctgcgacagatgcgccagaggctacaccggctaccccgactgcaaggcctgcaactgcagcggcctgggcagcaagaacgaggacccctgcttcggcccctgcatctgcaaggagaacgtggagggcggcgactgcagcagatgcaagagcggcttcttcaacctgcaggaggacaactggaagggctgcgacgagtgcttctgcagcggcgtgagcaacagatgccagagcagctactggacctacggcaagatccaggacatgagcggctggtacctgaccgacctgcccggcagaatcagagtggccccccagcaggacgacctggacagcccccagcagatcagcatcagcaacgccgaggccagacaggccctgccccacagctactactggagcgcccccgccccctacctgggcaacaagctgcccgccgtgggcggccagctgaccttcaccatcagctacgacctggaggaggaggaggaggacaccgagagagtgctgcagctgatgatcatcctggagggcaacgacctgagcatcagcaccgcccaggacgaggtgtacctgcaccccagcgaggagcacaccaacgtgctgctgctgaaggaggagagcttcaccatccacggcacccacttccccgtgagaagaaaggagttcatgaccgtgctggccaacctgaagagagtgctgctgcagatcacctacagcttcggcatggacgccatcttcagactgagcagcgtgaacctggagagcgccgtgagctaccccaccgacggcagcatcgccgccgccgtggaggtgtgccagtgcccccccggctacaccggcagcagctgcgagagctgctggcccagacacagaagagtgaacggcaccatcttcggcggcatctgcgagccctgccagtgcttcggccacgccgagagctgcgacgacgtgaccggcgagtgcctgaactgcaaggaccacaccggcggcccctactgcgacaagtgcctgcccggcttctacggcgagcccaccaagggcaccagcgaggactgccagccctgcgcctgccccctgaacatccccagcaacaacttcagccccacctgccacctggacagaagcctgggcctgatctgcgacggctgccccgtgggctacaccggccccagatgcgagagatgcgccgagggctacttcggccagcccagcgtgcccggcggcagctgccagccctgccagtgcaacgacaacctggacttcagcatccccggcagctgcgacagcctgagcggcagctgcctgatctgcaagcccggcaccaccggcagatactgcgagctgtgcgccgacggctacttcggcgacgccgtggacgccaagaactgccagccctgcagatgcaacgccggcggcagcttcagcgaggtgtgccacagccagaccggccagtgcgagtgcagagccaacgtgcagggccagagatgcgacaagtgcaaggccggcaccttcggcctgcagagcgccagaggctgcgtgccctgcaactgcaacagcttcggcagcaagagcttcgactgcgaggagagcggccagtgctggtgccagcccggcgtgaccggcaagaagtgcgacagatgcgcccacggctacttcaacttccaggagggcggctgcaccgcctgcgagtgcagccacctgggcaacaactgcgaccccaagaccggcagatgcatctgcccccccaacaccatcggcgagaagtgcagcaagtgcgcccccaacacctggggccacagcatcaccaccggctgcaaggcctgcaactgcagcaccgtgggcagcctggacttccagtgcaacgtgaacaccggccagtgcaactgccaccccaagttcagcggcgccaagtgcaccgagtgcagcagaggccactggaactaccccagatgcaacctgtgcgactgcttcctgcccggcaccgacgccaccacctgcgacagcgagaccaagaagtgcagctgcagcgaccagaccggccagtgcacctgcaaggtgaacgtggagggcatccactgcgacagatgcagacccggcaagttcggcctggacgccaagaaccccctgggctgcagcagctgctactgcttcggcaccaccacccagtgcagcgaggccaagggcctgatcagaacctgggtgaccctgaaggccgagcagaccatcctgcccctggtggacgaggccctgcagcacaccaccaccaagggcatcgtgttccagcaccccgagatcgtggcccacatggacctgatgagagaggacctgcacctggagcccttctactggaagctgcccgagcagttcgagggcaagaagctgatggcctacggcggcaagctgaagtacgccatctacttcgaggccagagaggagaccggcttcagcacctacaacccccaggtgatcatcagaggcggcacccccacccacgccagaatcatcgtgagacacatggccgcccccctgatcggccagctgaccagacacgagatcgagatgaccgagaaggagtggaagtactacggcgacgaccccagagtgcacagaaccgtgaccagagaggacttcctggacatcctgtacgacatccactacatcctgatcaaggccacctacggcaacttcatgagacagagcagaatcagcgagatcagcatggaggtggccgagcagggcagaggcaccaccatgaccccccccgccgacctgatcgagaagtgcgactgccccctgggctacagcggcctgagctgcgaggcctgcctgcccggcttctacagactgagaagccagcccggcggcagaacccccggccccaccctgggcacctgcgtgccctgccagtgcaacggccacagcagcctgtgcgaccccgagaccagcatctgccagaactgccagcaccacaccgccggcgacttctgcgagagatgcgccctgggctactacggcatcgtgaagggcctgcccaacgactgccagcagtgcgcctgccccctgatcagcagcagcaacaacttcagccccagctgcgtggccgagggcctggacgactacagatgcaccgcctgccccagaggctacgagggccagtactgcgagagatgcgcccccggctacaccggcagccccggcaaccccggcggcagctgccaggagtgcgagtgcgacccctacggcagcctgcccgtgccctgcgaccccgtgaccggcttctgcacctgcagacccggcgccaccggcagaaagtgcgacggctgcaagcactggcacgccagagagggctgggagtgcgtgttctgcggcgacgagtgcaccggcctgctgctgggcgacctggccagactggagcagatggtgatgagcatcaacctgaccggccccctgcccgccccctacaagatgctgtacggcctggagaacatgacccaggagctgaagcacctgctgagcccccagagagcccccgagagactgatccagctggccgagggcaacctgaacaccctggtgaccgagatgaacgagctgctgaccagagccaccaaggtgaccgccgacggcgagcagaccggccaggacgccgagagaaccaacaccagagccaagagcctgggcgagttcatcaaggagctggccagagacgccgaggccgtgaacgagaaggccatcaagctgaacgagaccctgggcaccagagacgaggccttcgagagaaacctggagggcctgcagaaggagatcgaccagatgatcaaggagctgagaagaaagaacctggagacccagaaggagatcgccgaggacgagctggtggccgccgaggccctgctgaagaaggtgaagaagctgttcggcgagagcagaggcgagaacgaggagatggagaaggacctgagagagaagctggccgactacaagaacaaggtggacgacgcctgggacctgctgagagaggccaccgacaagatcagagaggccaacagactgttcgccgtgaaccagaagaacatgaccgccctggagaagaagaaggaggccgtggagagcggcaagagacagatcgagaacaccctgaaggagggcaacgacatcctggacgaggccaacagactggccgacgagatcaacagcatcatcgactacgtggaggacatccagaccaagctgccccccatgagcgaggagctgaacgacaagatcgacgacctgagccaggagatcaaggacagaaagctggccgagaaggtgagccaggccgagagccacgccgcccagctgaacgacagcagcgccgtgctggacggcatcctggacgaggccaagaacatcagcttcaacgccaccgccgccttcaaggcctacagcaacatcaaggactacatcgacgaggccgagaaggtggccaaggaggccaaggacctggcccacgaggccaccaagctggccaccggccccagaggcctgctgaaggaggacgccaagggctgcctgcagaagagcttcagaatcctgaacgaggccaagaagctggccaacgacgtgaaggagaacgaggaccacctgaacggcctgaagaccagaatcgagaacgccgacgccagaaacggcgacctgctgagaaccctgaacgacaccctgggcaagctgagcgccatccccaacgacaccgccgccaagctgcaggccgtgaaggacaaggccagacaggccaacgacaccgccaaggacgtgctggcccagatcaccgagctgcaccagaacctggacggcctgaagaagaactacaacaagctggccgacagcgtggccaagaccaacgccgtggtgaaggaccccagcaagaacaccgtggccgacgccgacgccaccgtgaagaacctggagcaggaggccgacagactgatcgacaagctgaagcccatcaaggagctggaggacaacctgaagaagaacatcagcgagatcaaggagctgatcaaccaggccagaaagcaggccaacagcatcaaggtgagcgtgagcagcggcggcgactgcatcagaacctacaagcccgagatcaagaagggcagctacaacaacatcgtggtgaacgtgaagaccgccgtggccgacaacctgctgttctacctgggcagcgccaagttcatcgacttcctggccatcgagatgagaaagggcaaggtgagcttcctgtgggacgtgggcagcggcgtgggcagagtggagtaccccgacctgaccatcgacgacagctactggtacagaatcgtggccagcagaaccggcagaaacggcaccatcagcgtgagagccctggacggccccaaggccagcatcgtgcccagcacccaccacagcaccagcccccccggctacaccatcctggacgtggacgccaacgccatgctgttcgtgggcggcctgaccggcaagctgaagaaggccgacgccgtgagagtgatcaccttcaccggctgcatgggcgagacctacttcgacaacaagcccatcggcctgtggaacttcagagagaaggagggcgactgcaagggctgcaccgtgagcccccaggtggaggacagcgagggcaccatccagttcgacggcgagggctacgccctggtgagcagacccatcagatggtaccccaacatcagcaccgtgatgttcaagttcagaaccttcagcagcagcgccctgctgatgtacctggccaccagagacctgagagacttcatgagcgtggagctgaccgacggccacatcaaggtgagctacgacctgggcagcggcatggccagcgtggtgagcaaccagaaccacaacgacggcaagtggaagagcttcaccctgagcagaatccagaagcaggccaacatcagcatcgtggacatcgacaccaaccaggaggagaacatcgccaccagcagcagcggcaacaacttcggcctggacctgaaggccgacgacaagatctacttcggcggcctgcccaccctgagaaacctgagcatgaaggccagacccgaggtgaacctgaagaagtacagcggctgcctgaaggacatcgagatcagcagaaccccctacaacatcctgagcagccccgactacgtgggcgtgaccaagggctgcagcctggagaacgtgtacaccgtgagcttccccaagcccggcttcgtggagctgagccccgtgcccatcgacgtgggcaccgagatcaacctgagcttcagcaccaagaacgagagcggcatcatcctgctgggcagcggcggcacccccgccccccccagaagaaagagaagacagaccggccaggcctactacgccatcctgctgaacagaggcagactggaggtgcacctgagcaccggcgccagaaccatgagaaagatcgtgatcagacccgagcccaacctgttccacgacggcagagagcacagcgtgcacgtggagagaaccagaggcatcttcaccgtgcaggtggacgagaacagaagatacatgcagaacctgaccgtggagcagcccatcgaggtgaagaagctgttcgtgggcggcgccccccccgagttccagcccagccccctgagaaacatcccccccttcgagggctgcatctggaacctggtgatcaacagcgtgcccatggacttcgccagacccgtgagcttcaagaacgccgacatcggcagatgcgcccaccagaagctgagagaggacgaggacggcgccgcccccgccgagatcgtgatccagcccgagcccgtgcccacccccgccttccccacccccacccccgtgctgacccacggcccctgcgccgccgagagcgagcccgccctgctgatcggcagcaagcagttcggcctgagcagaaacagccacatcgccatcgccttcgacgacaccaaggtgaagaacagactgaccatcgagctggaggtgagaaccgaggccgagagcggcctgctgttctacatggccagaatcaaccacgccgacttcgccaccgtgcagctgagaaacggcctgccctacttcagctacgacctgggcagcggcgacacccacaccatgatccccaccaagatcaacgacggccagtggcacaagatcaagatcatgagaagcaagcaggagggcatcctgtacgtggacggcgccagcaacagaaccatcagccccaagaaggccgacatcctggacgtggtgggcatgctgtacgtgggcggcctgcccatcaactacaccaccagaagaatcggccccgtgacctacagcatcgacggctgcgtgagaaacctgcacatggccgaggcccccgccgacctggagcagcccaccagcagcttccacgtgggcacctgcttcgccaacgcccagagaggcacctacttcgacggcaccggcttcgccaaggccgtgggcggcttcaaggtgggcctggacctgctggtggagttcgagttcagaaccaccaccaccaccggcgtgctgctgggcatcagcagccagaagatggacggcatgggcatcgagatgatcgacgagaagctgatgttccacgtggacaacggcgccggcagattcaccgccgtgtacgacgccggcgtgcccggccacctgtgcgacggccagtggcacaaggtgaccgccaacaagatcaagcacagaatcgagctgaccgtggacggcaaccaggtggaggcccagagccccaaccccgccagcaccagcgccgacaccaacgaccccgtgttcgtgggcggcttccccgacgacctgaagcagttcggcctgaccaccagcatccccttcagaggctgcatcagaagcctgaagctgaccaagggcaccggcaagcccctggaggtgaacttcgccaaggccctggagctgagaggcgtgcagcccgtgagctgccccgccaactag

SEQ ID NO: 86481 - DNA, 9369 bp, synthetic construct
  misc_feature 1..9369: note = Description of Artificial Sequence: Synthetic coding sequence
  source 1..9369: mol_type = other DNA
atgcccggcgccgccggcgtgctgctgctgctgctgctgagcggcggcctgggcggcgtgcaggcccagagaccccagcagcagagacagagccaggcccaccagcagagaggcctgttccccgccgtgctgaacctggccagcaacgccctgatcaccaccaacgccacctgcggcgagaagggccccgagatgtactgcaagctggtggagcacgtgcccggccagcccgtgagaaacccccagtgcagaatctgcaaccagaacagcagcaaccccaaccagagacaccccatcaccaacgccatcgacggcaagaacacctggtggcagagccccagcatcaagaacggcatcgagtaccactacgtgaccatcaccctggacctgcagcaggtgttccagatcgcctacgtgatcgtgaaggccgccaacagccccagacccggcaactggatcctggagagaagcctggacgacgtggagtacaagccctggcagtaccacgccgtgaccgacaccgagtgcctgaccctgtacaacatctaccccagaaccggcccccccagctacgccaaggacgacgaggtgatctgcaccagcttctacagcaagatccaccccctggagaacggcgagatccacatcagcctgatcaacggcagacccagcgccgacgaccccagccccgagctgctggagttcaccagcgccagatacatcagactgagattccagagaatcagaaccctgaacgccgacctgatgatgttcgcccacaaggaccccagagagatcgaccccatcgtgaccagaagatactactacagcgtgaaggacatcagcgtgggcggcatgtgcatctgctacggccacgccagagcctgccccctggaccccgccaccaacaagagcagatgcgagtgcgagcacaacacctgcggcgacagctgcgaccagtgctgccccggcttccaccagaagccctggagagccggcaccttcctgaccaagaccgagtgcgaggcctgcaactgccacggcaaggccgaggagtgctactacgacgagaacgtggccagaagaaacctgagcctgaacatcagaggcaagtacatcggcggcggcgtgtgcatcaactgcacccagaacaccgccggcatcaactgcgagacctgcaccgacggcttcttcagacccaagggcgtgagccccaactaccccagaccctgccagccctgccactgcgaccccatcggcagcctgaacgaggtgtgcgtgaaggacgagaagcacgccagaagaggcctggcccccggcagctgccactgcaagaccggcttcggcggcgtgagctgcgacagatgcgccagaggctacaccggctaccccgactgcaaggcctgcaactgcagcggcctgggcagcaagaacgaggacccctgcttcggcccctgcatctgcaaggagaacgtggagggcggcgactgcagcagatgcaagagcggcttcttcaacctgcaggaggacaactggaagggctgcgacgagtgcttctgcagcggcgtgagcaacagatgccagagcagctactggacctacggcaagatccaggacatgagcggctggtacctgaccgacctgcccggcagaatcagagtggccccccagcaggacgacctggacagcccccagcagatcagcatcagcaacgccgaggccagacaggccctgccccacagctactactggagcgcccccgccccctacctgggcaacaagctgcccgccgtgggcggccagctgaccttcaccatcagctacgacctggaggaggaggaggaggacaccgagagagtgctgcagctgatgatcatcctggagggcaacgacctgagcatcagcaccgcccaggacgaggtgtacctgcaccccagcgaggagcacaccaacgtgctgctgctgaaggaggagagcttcaccatccacggcacccacttccccgtgagaagaaaggagttcatgaccgtgctggccaacctgaagagagtgctgctgcagatcacctacagcttcggcatggacgccatcttcagactgagcagcgtgaacctggagagcgccgtgagctaccccaccgacggcagcatcgccgccgccgtggaggtgtgccagtgcccccccggctacaccggcagcagctgcgagagctgctggcccagacacagaagagtgaacggcaccatcttcggcggcatctgcgagccctgccagtgcttcggccacgccgagagctgcgacgacgtgaccggcgagtgcctgaactgcaaggaccacaccggcggcccctactgcgacaagtgcctgcccggcttctacggcgagcccaccaagggcaccagcgaggactgccagccctgcgcctgccccctgaacatccccagcaacaacttcagccccacctgccacctggacagaagcctgggcctgatctgcgacggctgccccgtgggctacaccggccccagatgcgagagatgcgccgagggctacttcggccagcccagcgtgcccggcggcagctgccagccctgccagtgcaacgacaacctggacttcagcatccccggcagctgcgacagcctgagcggcagctgcctgatctgcaagcccggcaccaccggcagatactgcgagctgtgcgccgacggctacttcggcgacgccgtggacgccaagaactgccagccctgcagatgcaacgccggcggcagcttcagcgaggtgtgccacagccagaccggccagtgcgagtgcagagccaacgtgcagggccagagatgcgacaagtgcaaggccggcaccttcggcctgcagagcgccagaggctgcgtgccctgcaactgcaacagcttcggcagcaagagcttcgactgcgaggagagcggccagtgctggtgccagcccggcgtgaccggcaagaagtgcgacagatgcgcccacggctacttcaacttccaggagggcggctgcaccgcctgcgagtgcagccacctgggcaacaactgcgaccccaagaccggcagatgcatctgcccccccaacaccatcggcgagaagtgcagcaagtgcgcccccaacacctggggccacagcatcaccaccggctgcaaggcctgcaactgcagcaccgtgggcagcctggacttccagtgcaacgtgaacaccggccagtgcaactgccaccccaagttcagcggcgccaagtgcaccgagtgcagcagaggccactggaactaccccagatgcaacctgtgcgactgcttcctgcccggcaccgacgccaccacctgcgacagcgagaccaagaagtgcagctgcagcgaccagaccggccagtgcacctgcaaggtgaacgtggagggcatccactgcgacagatgcagacccggcaagttcggcctggacgccaagaaccccctgggctgcagcagctgctactgcttcggcaccaccacccagtgcagcgaggccaagggcctgatcagaacctgggtgaccctgaaggccgagcagaccatcctgcccctggtggacgaggccctgcagcacaccaccaccaagggcatcgtgttccagcaccccgagatcgtggcccacatggacctgatgagagaggacctgcacctggagcccttctactggaagctgcccgagcagttcgagggcaagaagctgatggcctacggcggcaagctgaagtacgccatctacttcgaggccagagaggagaccggcttcagcacctacaacccccaggtgatcatcagaggcggcacccccacccacgccagaatcatcgtgagacacatggccgcccccctgatcggccagctgaccagacacgagatcgagatgaccgagaaggagtggaagtactacggcgacgaccccagagtgcacagaaccgtgaccagagaggacttcctggacatcctgtacgacatccactacatcctgatcaaggccacctacggcaacttcatgagacagagcagaatcagcgagatcagcatggaggtggccgagcagggcagaggcaccaccatgaccccccccgccgacctgatcgagaagtgcgactgccccctgggctacagcggcctgagctgcgaggcctgcctgcccggcttctacagactgagaagccagcccggcggcagaacccccggccccaccctgggcacctgcgtgccctgccagtgcaacggccacagcagcctgtgcgaccccgagaccagcatctgccagaactgccagcaccacaccgccggcgacttctgcgagagatgcgccctgggctactacggcatcgtgaagggcctgcccaacgactgccagcagtgcgcctgccccctgatcagcagcagcaacaacttcagccccagctgcgtggccgagggcctggacgactacagatgcaccgcctgccccagaggctacgagggccagtactgcgagagatgcgcccccggctacaccggcagccccggcaaccccggcggcagctgccaggagtgcgagtgcgacccctacggcagcctgcccgtgccctgcgaccccgtgaccggcttctgcacctgcagacccggcgccaccggcagaaagtgcgacggctgcaagcactggcacgccagagagggctgggagtgcgtgttctgcggcgacgagtgcaccggcctgctgctgggcgacctggccagactggagcagatggtgatgagcatcaacctgaccggccccctgcccgccccctacaagatgctgtacggcctggagaacatgacccaggagctgaagcacctgctgagcccccagagagcccccgagagactgatccagctggccgagggcaacctgaacaccctggtgaccgagatgaacgagctgctgaccagagccaccaaggtgaccgccgacggcgagcagaccggccaggacgccgagagaaccaacaccagagccaagagcctgggcgagttcatcaaggagctggccagagacgccgaggccgtgaacgagaaggccatcaagctgaacgagaccctgggcaccagagacgaggccttcgagagaaacctggagggcctgcagaaggagatcgaccagatgatcaaggagctgagaagaaagaacctggagacccagaaggagatcgccgaggacgagctggtggccgccgaggccctgctgaagaaggtgaagaagctgttcggcgagagcagaggcgagaacgaggagatggagaaggacctgagagagaagctggccgactacaagaacaaggtggacgacgcctgggacctgctgagagaggccaccgacaagatcagagaggccaacagactgttcgccgtgaaccagaagaacatgaccgccctggagaagaagaaggaggccgtggagagcggcaagagacagatcgagaacaccctgaaggagggcaacgacatcctggacgaggccaacagactggccgacgagatcaacagcatcatcgactacgtggaggacatccagaccaagctgccccccatgagcgaggagctgaacgacaagatcgacgacctgagccaggagatcaaggacagaaagctggccgagaaggtgagccaggccgagagccacgccgcccagctgaacgacagcagcgccgtgctggacggcatcctggacgaggccaagaacatcagcttcaacgccaccgccgccttcaaggcctacagcaacatcaaggactacatcgacgaggccgagaaggtggccaaggaggccaaggacctggcccacgaggccaccaagctggccaccggccccagaggcctgctgaaggaggacgccaagggctgcctgcagaagagcttcagaatcctgaacgaggccaagaagctggccaacgacgtgaaggagaacgaggaccacctgaacggcctgaagaccagaatcgagaacgccgacgccagaaacggcgacctgctgagaaccctgaacgacaccctgggcaagctgagcgccatccccaacgacaccgccgccaagctgcaggccgtgaaggacaaggccagacaggccaacgacaccgccaaggacgtgctggcccagatcaccgagctgcaccagaacctggacggcctgaagaagaactacaacaagctggccgacagcgtggccaagaccaacgccgtggtgaaggaccccagcaagaacaagatcgtggccgacgccgacgccaccgtgaagaacctggagcaggaggccgacagactgatcgacaagctgaagcccatcaaggagctggaggacaacctgaagaagaacatcagcgagatcaaggagctgatcaaccaggccagaaagcaggccaacagcatcaaggtgagcgtgagcagcggcggcgactgcatcagaacctacaagcccgagatcaagaagggcagctacaacaacatcgtggtgaacgtgaagaccgccgtggccgacaacctgctgttctacctgggcagcgccaagttcatcgacttcctggccatcgagatgagaaagggcaaggtgagcttcctgtgggacgtgggcagcggcgtgggcagagtggagtaccccgacctgaccatcgacgacagctactggtacagaatcgtggccagcagaaccggcagaaacggcaccatcagcgtgagagccctggacggccccaaggccagcatcgtgcccagcacccaccacagcaccagcccccccggctacaccatcctggacgtggacgccaacgccatgctgttcgtgggcggcctgaccggcaagctgaagaaggccgacgccgtgagagtgatcaccttcaccggctgcatgggcgagacctacttcgacaacaagcccatcggcctgtggaacttcagagagaaggagggcgactgcaagggctgcaccgtgagcccccaggtggaggacagcgagggcaccatccagttcgacggcgagggctacgccctggtgagcagacccatcagatggtaccccaacatcagcaccgtgatgttcaagttcagaaccttcagcagcagcgccctgctgatgtacctggccaccagagacctgagagacttcatgagcgtggagctgaccgacggccacatcaaggtgagctacgacctgggcagcggcatggccagcgtggtgagcaaccagaaccacaacgacggcaagtggaagagcttcaccctgagcagaatccagaagcaggccaacatcagcatcgtggacatcgacaccaaccaggaggagaacatcgccaccagcagcagcggcaacaacttcggcctggacctgaaggccgacgacaagatctacttcggcggcctgcccaccctgagaaacctgagactgttcaacagacccgaggtgaacctgaagaagtacagcggctgcctgaaggacatcgagatcagcagaaccccctacaacatcctgagcagccccgactacgtgggcgtgaccaagggctgcagcctggagaacgtgtacaccgtgagcttccccaagcccggcttcgtggagctgagccccgtgcccatcgacgtgggcaccgagatcaacctgagcttcagcaccaagaacgagagcggcatcatcctgctgggcagcggcggcacccccgccccccccagaagaaagagaagacagaccggccaggcctactacgccatcctgctgaacagaggcagactggaggtgcacctgagcaccggcgccagaaccatgagaaagatcgtgatcagacccgagcccaacctgttccacgacggcagagagcacagcgtgcacgtggagagaaccagaggcatcttcaccgtgcaggtggacgagaacagaagatacatgcagaacctgaccgtggagcagcccatcgaggtgaagaagctgttcgtgggcggcgccccccccgagttccagcccagccccctgagaaacatcccccccttcgagggctgcatctggaacctggtgatcaacagcgtgcccatggacttcgccagacccgtgagcttcaagaacgccgacatcggcagatgcgcccaccagaagctgagagaggacgaggacggcgccgcccccgccgagatcgtgatccagcccgagcccgtgcccacccccgccttccccacccccacccccgtgctgacccacggcccctgcgccgccgagagcgagcccgccctgctgatcggcagcaagcagttcggcctgagcagaaacagccacatcgccatcgccttcgacgacaccaaggtgaagaacagactgaccatcgagctggaggtgagaaccgaggccgagagcggcctgctgttctacatggccagaatcaaccacgccgacttcgccaccgtgcagctgagaaacggcctgccctacttcagctacgacctgggcagcggcgacacccacaccatgatccccaccaagatcaacgacggccagtggcacaagatcaagatcatgagaagcaagcaggagggcatcctgtacgtggacggcgccagcaacagaaccatcagccccaagaaggccgacatcctggacgtggtgggcatgctgtacgtgggcggcctgcccatcaactacaccaccagaagaatcggccccgtgacctacagcatcgacggctgcgtgagaaacctgcacatggccgaggcccccgccgacctggagcagcccaccagcagcttccacgtgggcacctgcttcgccaacgcccagagaggcacctacttcgacggcaccggcttcgccaaggccgtgggcggcttcaaggtgggcctggacctgctggtggagttcgagttcagaaccaccaccaccaccggcgtgctgctgggcatcagcagccagaagatggacggcatgggcatcgagatgatcgacgagaagctgatgttccacgtggacaacggcgccggcagattcaccgccgtgtacgacgccggcgtgcccggccacctgtgcgacggccagtggcacaaggtgaccgccaacaagatcaagcacagaatcgagctgaccgtggacggcaaccaggtggaggcccagagccccaaccccgccagcaccagcgccgacaccaacgaccccgtgttcgtgggcggcttccccgacgacctgaagcagttcggcctgaccaccagcatccccttcagaggctgcatcagaagcctgaagctgaccaagggcaccggcaagcccctggaggtgaacttcgccaaggccctggagctgagaggcgtgcagcccgtgagctgccccgccaactag

SEQ ID NO: 86482 - DNA, 9369 bp, synthetic construct
  misc_feature 1..9369: note = Description of Artificial Sequence: Synthetic coding sequence
  source 1..9369: mol_type = other DNA
atgcccggcgccgccggcgtgctgctgctgctgctgctgagcggcggcctgggcggcgtgcaggcccagagaccccagcagcagagacagagccaggcccaccagcagagaggcctgttccccgccgtgctgaacctggccagcaacgccctgatcaccaccaacgccacctgcggcgagaagggccccgagatgtactgcaagctggtggagcacgtgcccggccagcccgtgagaaacccccagtgcagaatctgcaaccagaacagcagcaaccccaaccagagacaccccatcaccaacgccatcgacggcaagaacacctggtggcagagccccagcatcaagaacggcatcgagtaccactacgtgaccatcaccctggacctgcagcaggtgttccagatcgcctacgtgatcgtgaaggccgccaacagccccagacccggcaactggatcctggagagaagcctggacgacgtggagtacaagccctggcagtaccacgccgtgaccgacaccgagtgcctgaccctgtacaacatctaccccagaaccggcccccccagctacgccaaggacgacgaggtgatctgcaccagcttctacagcaagatccaccccctggagaacggcgagatccacatcagcctgatcaacggcagacccagcgccgacgaccccagccccgagctgctggagttcaccagcgccagatacatcagactgagattccagagaatcagaaccctgaacgccgacctgatgatgttcgcccacaaggaccccagagagatcgaccccatcgtgaccagaagatactactacagcgtgaaggacatcagcgtgggcggcatgtgcatctgctacggccacgccagagcctgccccctggaccccgccaccaacaagagcagatgcgagtgcgagcacaacacctgcggcgacagctgcgaccagtgctgccccggcttccaccagaagccctggagagccggcaccttcctgaccaagaccgagtgcgaggcctgcaactgccacggcaaggccgaggagtgctactacgacgagaacgtggccagaagaaacctgagcctgaacatcagaggcaagtacatcggcggcggcgtgtgcatcaactgcacccagaacaccgccggcatcaactgcgagacctgcaccgacggcttcttcagacccaagggcgtgagccccaactaccccagaccctgccagccctgccactgcgaccccatcggcagcctgaacgaggtgtgcgtgaaggacgagaagcacgccagaagaggcctggcccccggcagctgccactgcaagaccggcttcggcggcgtgagctgcgacagatgcgccagaggctacaccggctaccccgactgcaaggcctgcaactgcagcggcctgggcagcaagaacgaggacccctgcttcggcccctgcatctgcaaggagaacgtggagggcggcgactgcagcagatgcaagagcggcttcttcaacctgcaggaggacaactggaagggctgcgacgagtgcttctgcagcggcgtgagcaacagatgccagagcagctactggacctacggcaagatccaggacatgagcggctggtacctgaccgacctgcccggcagaatcagagtggccccccagcaggacgacctggacagcccccagcagatcagcatcagcaacgccgaggccagacaggccctgccccacagctactactggagcgcccccgccccctacctgggcaacaagctgcccgccgtgggcggccagctgaccttcaccatcagctacgacctggaggaggaggaggaggacaccgagagagtgctgcagctgatgatcatcctggagggcaacgacctgagcatcagcaccgcccaggacgaggtgtacctgcaccccagcgaggagcacaccaacgtgctgctgctgaaggaggagagcttcaccatccacggcacccacttccccgtgagaagaaaggagttcatgaccgtgctggccaacctgaagagagtgctgctgcagatcacctacagcttcggcatggacgccatcttcagactgagcagcgtgaacctggagagcgccgtgagctaccccaccgacggcagcatcgccgccgccgtggaggtgtgccagtgcccccccggctacaccggcagcagctgcgagagctgctggcccagacacagaagagtgaacggcaccatcttcggcggcatctgcgagccctgccagtgcttcggccacgccgagagctgcgacgacgtgaccggcgagtgcctgaactgcaaggaccacaccggcggcccctactgcgacaagtgcctgcccggcttctacggcgagcccaccaagggcaccagcgaggactgccagccctgcgcctgccccctgaacatccccagcaacaacttcagccccacctgccacctggacagaagcctgggcctgatctgcgacggctgccccgtgggctacaccggccccagatgcgagagatgcgccgagggctacttcggccagcccagcgtgcccggcggcagctgccagccctgccagtgcaacgacaacctggacttcagcatccccggcagctgcgacagcctgagcggcagctgcctgatctgcaagcccggcaccaccggcagatactgcgagctgtgcgccgacggctacttcggcgacgccgtggacgccaagaactgccagccctgcagatgcaacgccggcggcagcttcagcgaggtgtgccacagccagaccggccagtgcgagtgcagagccaacgtgcagggccagagatgcgacaagtgcaaggccggcaccttcggcctgcagagcgccagaggctgcgtgccctgcaactgcaacagcttcggcagcaagagcttcgactgcgaggagagcggccagtgctggtgccagcccggcgtgaccggcaagaagtgcgacagatgcgcccacggctacttcaacttccaggagggcggctgcaccgcctgcgagtgcagccacctgggcaacaactgcgaccccaagaccggcagatgcatctgcccccccaacaccatcggcgagaagtgcagcaagtgcgcccccaacacctggggccacagcatcaccaccggctgcaaggcctgcaactgcagcaccgtgggcagcctggacttccagtgcaacgtgaacaccggccagtgcaactgccaccccaagttcagcggcgccaagtgcaccgagtgcagcagaggccactggaactaccccagatgcaacctgtgcgactgcttcctgcccggcaccgacgccaccacctgcgacagcgagaccaagaagtgcagctgcagcgaccagaccggccagtgcacctgcaaggtgaacgtggagggcatccactgcgacagatgcagacccggcaagttcggcctggacgccaagaaccccctgggctgcagcagctgctactgcttcggcaccaccacccagtgcagcgaggccaagggcctgatcagaacctgggtgaccctgaaggccgagcagaccatcctgcccctggtggacgaggccctgcagcacaccaccaccaagggcatcgtgttccagcaccccgagatcgtggcccacatggacctgatgagagaggacctgcacctggagcccttctactggaagctgcccgagcagttcgagggcaagaagctgatggcctacggcggcaagctgaagtacgccatctacttcgaggccagagaggagaccggcttcagcacctacaacccccaggtgatcatcagaggcggcacccccacccacgccagaatcatcgtgagacacatggccgcccccctgatcggccagctgaccagacacgagatcgagatgaccgagaaggagtggaagtactacggcgacgaccccagagtgcacagaaccgtgaccagagaggacttcctggacatcctgtacgacatccactacatcctgatcaaggccacctacggcaacttcatgagacagagcagaatcagcgagatcagcatggaggtggccgagcagggcagaggcaccaccatgaccccccccgccgacctgatcgagaagtgcgactgccccctgggctacagcggcctgagctgcgaggcctgcctgcccggcttctacagactgagaagccagcccggcggcagaacccccggccccaccctgggcacctgcgtgccctgccagtgcaacggccacagcagcctgtgcgaccccgagaccagcatctgccagaactgccagcaccacaccgccggcgacttctgcgagagatgcgccctgggctactacggcatcgtgaagggcctgcccaacgactgccagcagtgcgcctgccccctgatcagcagcagcaacaacttcagccccagctgcgtggccgagggcctggacgactacagatgcaccgcctgccccagaggctacgagggccagtactgcgagagatgcgcccccggctacaccggcagccccggcaaccccggcggcagctgccaggagtgcgagtgcgacccctacggcagcctgcccgtgccctgcgaccccgtgaccggcttctgcacctgcagacccggcgccaccggcagaaagtgcgacggctgcaagcactggcacgccagagagggctgggagtgcgtgttctgcggcgacgagtgcaccggcctgctgctgggcgacctggccagactggagcagatggtgatgagcatcaacctgaccggccccctgcccgccccctacaagatgctgtacggcctggagaacatgacccaggagctgaagcacctgctgagcccccagagagcccccgagagactgatccagctggccgagggcaacctgaacaccctggtgaccgagatgaacgagctgctgaccagagccaccaaggtgaccgccgacggcgagcagaccggccaggacgccgagagaaccaacaccagagccaagagcctgggcgagttcatcaaggagctggccagagacgccgaggccgtgaacgagaaggccatcaagctgaacgagaccctgggcaccagagacgaggccttcgagagaaacctggagggcctgcagaaggagatcgaccagatgatcaaggagctgagaagaaagaacctggagacccagaaggagatcgccgaggacgagctggtggccgccgaggccctgctgaagaaggtgaagaagctgttcggcgagagcagaggcgagaacgaggagatggagaaggacctgagagagaagctggccgactacaagaacaaggtggacgacgcctgggacctgctgagagaggccaccgacaagatcagagaggccaacagactgttcgccgtgaaccagaagaacatgaccgccctggagaagaagaaggaggccgtggagagcggcaagagacagatcgagaacaccctgaaggagggcaacgacatcctggacgaggccaacagactggccgacgagatcaacagcatcatcgactacgtggaggacatccagaccaagctgccccccatgagcgaggagctgaacgacaagatcgacgacctgagccaggagatcaaggacagaaagctggccgagaaggtgagccaggccgagagccacgccgcccagctgaacgacagcagcgccgtgctggacggcatcctggacgaggccaagaacatcagcttcaacgccaccgccgccttcaaggcctacagcaacatcaaggactacatcgacgaggccgagaaggtggccaaggaggccaaggacctggcccacgaggccaccaagctggccaccggccccagaggcctgctgaaggaggacgccaagggctgcctgcagaagagcttcagaatcctgaacgaggccaagaagctggccaacgacgtgaaggagaacgaggaccacctgaacggcctgaagaccagaatcgagaacgccgacgccagaaacggcgacctgctgagaaccctgaacgacaccctgggcaagctgagcgccatccccaacgacaccgccgccaagctgcaggccgtgaaggacaaggccagacaggccaacgacaccgccaaggacgtgctggcccagatcaccgagctgcaccagaacctggacggcctgaagaagaactacaacaagctggccgacagcgtggccaagaccaacgccgtggtgaaggaccccagcaagaacaagatcatcgccgacgccgacgccaccgtgaagaacctggagcaggaggccgacagactgatcgacaagctgaagcccatcaaggagctggaggacaacctgaagaagaacatcagcgagatcaaggagctgatcaaccaggccagaaagcaggccaacagcatcaaggtgagcgtgagcagcggcggcgactgcatcagaacctacaagcccgagatcaagaagggcagctacaacaacatcgtggtgaacgtgaagaccgccgtggccgacaacctgctgttctacctgggcagcgccaagttcatcgacttcctggccatcgagatgagaaagggcaaggtgagcttcctgtgggacgtgggcagcggcgtgggcagagtggagtaccccgacctgaccatcgacgacagctactggtacagaatcgtggccagcagaaccggcagaaacggcaccatcagcgtgagagccctggacggccccaaggccagcatcgtgcccagcacccaccacagcaccagcccccccggctacaccatcctggacgtggacgccaacgccatgctgttcgtgggcggcctgaccggcaagctgaagaaggccgacgccgtgagagtgatcaccttcaccggctgcatgggcgagacctacttcgacaacaagcccatcggcctgtggaacttcagagagaaggagggcgactgcaagggctgcaccgtgagcccccaggtggaggacagcgagggcaccatccagttcgacggcgagggctacgccctggtgagcagacccatcagatggtaccccaacatcagcaccgtgatgttcaagttcagaaccttcagcagcagcgccctgctgatgtacctggccaccagagacctgagagacttcatgagcgtggagctgaccgacggccacatcaaggtgagctacgacctgggcagcggcatggccagcgtggtgagcaaccagaaccacaacgacggcaagtggaagagcttcaccctgagcagaatccagaagcaggccaacatcagcatcgtggacatcgacaccaaccaggaggagaacatcgccaccagcagcagcggcaacaacttcggcctggacctgaaggccgacgacaagatctacttcggcggcctgcccaccctgagaaacctgagcatgaaggccagacccgaggtgaacctgaagaagtacagcggctgcctgaaggacatcgagatcagcagaaccccctacaacatcctgagcagccccgactacgtgggcgtgaccaagggctgcagcctggagaacgtgtacaccgtgagcttccccaagcccggcttcgtggagctgagccccgtgcccatcgacgtgggcaccgagatcaacctgagcttcagcaccaagaacgagagcggcatcatcctgctgggcagcggcggcacccccgccccccccagaagaaagagaagacagaccggccaggcctactacgccatcctgctgaacagaggcagactggaggtgcacctgagcaccggcgccagaaccatgagaaagatcgtgatcagacccgagcccaacctgttccacgacggcagagagcacagcgtgcacgtggagagaaccagaggcatcttcaccgtgcaggtggacgagaacagaagatacatgcagaacctgaccgtggagcagcccatcgaggtgaagaagctgttcgtgggcggcgccccccccgagttccagcccagccccctgagaaacatcccccccttcgagggctgcatctggaacctggtgatcaacagcgtgcccatggacttcgccagacccgtgagcttcaagaacgccgacatcggcagatgcgcccaccagaagctgagagaggacgaggacggcgccgcccccgccgagatcgtgatccagcccgagcccgtgcccacccccgccttccccacccccacccccgtgctgacccacggcccctgcgccgccgagagcgagcccgccctgctgatcggcagcaagcagttcggcctgagcagaaacagccacatcgccatcgccttcgacgacaccaaggtgaagaacagactgaccatcgagctggaggtgagaaccgaggccgagagcggcctgctgttctacatggccagaatcaaccacgccgacttcgccaccgtgcagctgagaaacggcctgccctacttcagctacgacctgggcagcggcgacacccacaccatgatccccaccaagatcaacgacggccagtggcacaagatcaagatcatgagaagcaagcaggagggcatcctgtacgtggacggcgccagcaacagaaccatcagccccaagaaggccgacatcctggacgtggtgggcatgctgtacgtgggcggcctgcccatcaactacaccaccagaagaatcggccccgtgacctacagcatcgacggctgcgtgagaaacctgcacatggccgaggcccccgccgacctggagcagcccaccagcagcttccacgtgggcacctgcttcgccaacgcccagagaggcacctacttcgacggcaccggcttcgccaaggccgtgggcggcttcaaggtgggcctggacctgctggtggagttcgagttcagaaccaccaccaccaccggcgtgctgctgggcatcagcagccagaagatggacggcatgggcatcgagatgatcgacgagaagctgatgttccacgtggacaacggcgccggcagattcaccgccgtgtacgacgccggcgtgcccggccacctgtgcgacggccagtggcacaaggtgaccgccaacaagatcaagcacagaatcgagctgaccgtggacggcaaccaggtggaggcccagagccccaaccccgccagcaccagcgccgacaccaacgaccccgtgttcgtgggcggcttccccgacgacctgaagcagttcggcctgaccaccagcatccccttcagaggctgcatcagaagcctgaagctgaccaagggcaccggcaagcccctggaggtgaacttcgccaaggccctggagctgagaggcgtgcagcccgtgagctgccccgccaactag

SEQ ID NO: 86483 - DNA, 3387 bp, synthetic construct
  misc_feature 1..3387: note = Description of Artificial Sequence: Synthetic coding sequence
  source 1..3387: mol_type = other DNA
aagaagctggccaacgacgtgaaggagaacgaggaccacctgaacggcctgaagaccagaatcgagaacgccgacgccagaaacggcgacctgctgagaaccctgaacgacaccctgggcaagctgagcgccatccccaacgacaccgccgccaagctgcaggccgtgaaggacaaggccagacaggccaacgacaccgccaaggacgtgctggcccagatcaccgagctgcaccagaacctggacggcctgaagaagaactacaacaagctggccgacagcgtggccaagaccaacgccgtggtgaaggaccccagcaagaacaccgtggccgacgccgacgccaccgtgaagaacctggagcaggaggccgacagactgatcgacaagctgaagcccatcaaggagctggaggacaacctgaagaagaacatcagcgagatcaaggagctgatcaaccaggccagaaagcaggccaacagcatcaaggtgagcgtgagcagcggcggcgactgcatcagaacctacaagcccgagatcaagaagggcagctacaacaacatcgtggtgaacgtgaagaccgccgtggccgacaacctgctgttctacctgggcagcgccaagttcatcgacttcctggccatcgagatgagaaagggcaaggtgagcttcctgtgggacgtgggcagcggcgtgggcagagtggagtaccccgacctgaccatcgacgacagctactggtacagaatcgtggccagcagaaccggcagaaacggcaccatcagcgtgagagccctggacggccccaaggccagcatcgtgcccagcacccaccacagcaccagcccccccggctacaccatcctggacgtggacgccaacgccatgctgttcgtgggcggcctgaccggcaagctgaagaaggccgacgccgtgagagtgatcaccttcaccggctgcatgggcgagacctacttcgacaacaagcccatcggcctgtggaacttcagagagaaggagggcgactgcaagggctgcaccgtgagcccccaggtggaggacagcgagggcaccatccagttcgacggcgagggctacgccctggtgagcagacccatcagatggtaccccaacatcagcaccgtgatgttcaagttcagaaccttcagcagcagcgccctgctgatgtacctggccaccagagacctgagagacttcatgagcgtggagctgaccgacggccacatcaaggtgagctacgacctgggcagcggcatggccagcgtggtgagcaaccagaaccacaacgacggcaagtggaagagcttcaccctgagcagaatccagaagcaggccaacatcagcatcgtggacatcgacaccaaccaggaggagaacatcgccaccagcagcagcggcaacaacttcggcctggacctgaaggccgacgacaagatctacttcggcggcctgcccaccctgagaaacctgagcatgaaggccagacccgaggtgaacctgaagaagtacagcggctgcctgaaggacatcgagatcagcagaaccccctacaacatcctgagcagccccgactacgtgggcgtgaccaagggctgcagcctggagaacgtgtacaccgtgagcttccccaagcccggcttcgtggagctgagccccgtgcccatcgacgtgggcaccgagatcaacctgagcttcagcaccaagaacgagagcggcatcatcctgctgggcagcggcggcacccccgccccccccagaagaaagagaagacagaccggccaggcctactacgccatcctgctgaacagaggcagactggaggtgcacctgagcaccggcgccagaaccatgagaaagatcgtgatcagacccgagcccaacctgttccacgacggcagagagcacagcgtgcacgtggagagaaccagaggcatcttcaccgtgcaggtggacgagaacagaagatacatgcagaacctgaccgtggagcagcccatcgaggtgaagaagctgttcgtgggcggcgccccccccgagttccagcccagccccctgagaaacatcccccccttcgagggctgcatctggaacctggtgatcaacagcgtgcccatggacttcgccagacccgtgagcttcaagaacgccgacatcggcagatgcgcccaccagaagctgagagaggacgaggacggcgccgcccccgccgagatcgtgatccagcccgagcccgtgcccacccccgccttccccacccccacccccgtgctgacccacggcccctgcgccgccgagagcgagcccgccctgctgatcggcagcaagcagttcggcctgagcagaaacagccacatcgccatcgccttcgacgacaccaaggtgaagaacagactgaccatcgagctggaggtgagaaccgaggccgagagcggcctgctgttctacatggccagaatcaaccacgccgacttcgccaccgtgcagctgagaaacggcctgccctacttcagctacgacctgggcagcggcgacacccacaccatgatccccaccaagatcaacgacggccagtggcacaagatcaagatcatgagaagcaagcaggagggcatcctgtacgtggacggcgccagcaacagaaccatcagccccaagaaggccgacatcctggacgtggtgggcatgctgtacgtgggcggcctgcccatcaactacaccaccagaagaatcggccccgtgacctacagcatcgacggctgcgtgagaaacctgcacatggccgaggcccccgccgacctggagcagcccaccagcagcttccacgtgggcacctgcttcgccaacgcccagagaggcacctacttcgacggcaccggcttcgccaaggccgtgggcggcttcaaggtgggcctggacctgctggtggagttcgagttcagaaccaccaccaccaccggcgtgctgctgggcatcagcagccagaagatggacggcatgggcatcgagatgatcgacgagaagctgatgttccacgtggacaacggcgccggcagattcaccgccgtgtacgacgccggcgtgcccggccacctgtgcgacggccagtggcacaaggtgaccgccaacaagatcaagcacagaatcgagctgaccgtggacggcaaccaggtggaggcccagagccccaaccccgccagcaccagcgccgacaccaacgaccccgtgttcgtgggcggcttccccgacgacctgaagcagttcggcctgaccaccagcatccccttcagaggctgcatcagaagcctgaagctgaccaagggcaccgccagccactggagactgatcctgcccagaccctggaactag

SEQ ID NO: 86484 - DNA, 5175 bp, synthetic construct
  misc_feature 1..5175: note = Description of Artificial Sequence: Synthetic coding sequence
  source 1..5175: mol_type = other DNA
atgccccccgccgtgagaagaagcgcctgcagcatgggctggctgtggatcttcggcgccgccctgggccagtgcctgggctacagcagccagcagcagagagtgcccttcctgcagccccccggccagagccagctgcaggccagctacgtggagttcagacccagccagggctgcagccccggctactacagagaccacaagggcctgtacaccggcagatgcgtgccctgcaactgcaacggccacagcaaccagtgccaggacggcagcggcatctgcgtgaactgccagcacaacaccgccggcgagcactgcgagagatgccaggagggctactacggcaacgccgtgcacggcagctgcagagcctgcccctgcccccacaccaacagcttcgccaccggctgcgtggtgaacggcggcgacgtgagatgcagctgcaaggccggctacaccggcacccagtgcgagagatgcgcccccggctacttcggcaacccccagaagttcggcggcagctgccagccctgcagctgcaacagcaacggccagctgggcagctgccaccccctgaccggcgactgcatcaaccaggagcccaaggacagcagccccgccgaggagtgcgacgactgcgacagctgcgtgatgaccctgctgaacgacctggccaccatgggcgagcagctgagactggtgaagagccagctgcagggcctgagcgccagcgccggcctgctggagcagatgagacacatggagacccaggccaaggacctgagaaaccagctgctgaactacagaagcgccatcagcaaccacggcagcaagatcgagggcctggagagagagctgaccgacctgaaccaggagttcgagaccctgcaggagaaggcccaggtgaacagcagaaaggcccagaccctgaacaacaacgtgaacagagccacccagagcgccaaggagctggacgtgaagatcaagaacgtgatcagaaacgtgcacatcctgctgaagcagatcagcggcaccgacggcgagggcaacaacgtgcccagcggcgacttcagcagagagtgggccgaggcccagagaatgatgagagagctgagaaacagaaacttcggcaagcacctgagagaggccgaggccgacaagagagagagccagctgctgctgaacagaatcagaacctggcagaagacccaccagggcgagaacaacggcctggccaacagcatcagagacagcctgaacgagtacgaggccaagctgagcgacctgagagccagactgcaggaggccgccgcccaggccaagcaggccaacggcctgaaccaggagaacgagagagccctgggcgccatccagagacaggtgaaggagatcaacagcctgcagagcgacttcaccaagtacctgaccaccgccgacagcagcctgctgcagaccaacatcgccctgcagctgatggagaagagccagaaggagtacgagaagctggccgccagcctgaacgaggccagacaggagctgagcgacaaggtgagagagctgagcagaagcgccggcaagaccagcctggtggaggaggccgagaagcacgccagaagcctgcaggagctggccaagcagctggaggagatcaagagaaacgccagcggcgacgagctggtgagatgcgccgtggacgccgccaccgcctacgagaacatcctgaacgccatcaaggccgccgaggacgccgccaacagagccgccagcgccagcgagagcgccctgcagaccgtgatcaaggaggacctgcccagaaaggccaagaccctgagcagcaacagcgacaagctgctgaacgaggccaagatgacccagaagaagctgaagcaggaggtgagccccgccctgaacaacctgcagcagaccctgaacatcgtgaccgtgcagaaggaggtgatcgacaccaacctgaccaccctgagagacggcctgcacggcatccagagaggcgacatcgacgccatgatcagcagcgccaagagcatggtgagaaaggccaacgacatcaccgacgaggtgctggacggcctgaaccccatccagaccgacgtggagagaatcaaggacacctacggcagaacccagaacgaggacttcaagaaggccctgaccgacgccgacaacagcgtgaacaagctgaccaacaagctgcccgacctgtggagaaagatcgagagcatcaaccagcagctgctgcccctgggcaacatcagcgacaacatggacagaatcagagagctgatccagcaggccagagacgccgccagcaaggtggccgtgcccatgagattcaacggcaagagcggcgtggaggtgagactgcccaacgacctggaggacctgaagggctacaccagcctgagcctgttcctgcagagacccaacagcagagagaacggcggcaccgagaacatgttcgtgatgtacctgggcaacaaggacgccagcagagactacatcggcatggccgtggtggacggccagctgacctgcgtgtacaacctgggcgacagagaggccgagctgcaggtggaccagatcctgaccaagagcgagaccaaggaggccgtgatggacagagtgaagttccagagaatctaccagttcgccagactgaactacaccaagggcgccaccagcagcaagcccgagacccccggcgtgtacgacatggacggcagaaacagcaacaccctgctgaacctggaccccgagaacgtggtgttctacgtgggcggctacccccccgacttcaagctgcccagcagactgagcttccccccctacaagggctgcatcgagctggacgacctgaacgagaacgtgctgagcctgtacaacttcaagaagaccttcaacctgaacaccaccgaggtggagccctgcagaagaagaaaggaggagagcgacaagaactacttcgagggcaccggctacgccagagtgcccacccagccccacgcccccatccccaccttcggccagaccatccagaccaccgtggacagaggcctgctgttcttcgccgagaacggcgacagattcatcagcctgaacatcgaggacggcaagctgatggtgagatacaagctgaacagcgagctgcccaaggagagaggcgtgggcgacgccatcaacaacggcagagaccacagcatccagatcaagatcggcaagctgcagaagagaatgtggatcaacgtggacgtgcagaacaccatcatcgacggcgaggtgttcgacttcagcacctactacctgggcggcatccccatcgccatcagagagagattcaacatcagcacccccgccttcagaggctgcatgaagaacctgaagaagaccagcggcgtggtgagactgaacgacaccgtgggcgtgaccaagaagtgcagcgaggactggaagctggtgagaagcgccagcttcagcagaggcggccagctgagcttcaccgacctgggcctgccccccaccgaccacctgcaggccagcttcggcttccagaccttccagcccagcggcatcctgctggaccaccagacctggaccagaaacctgcaggtgaccctggaggacggctacatcgagctgagcaccagcgacagcggcagccccatcttcaagagcccccagacctacatggacggcctgctgcactacgtgagcgtgatcagcgacaacagcggcctgagactgctgatcgacgaccagctgctgagaaacagcaagagactgaagcacatcagcagcagcagacagagcctgagactgggcggcagcaacttcgagggctgcatcagcaacgtgttcgtgcagagactgagcctgagccccgaggtgctggacctgaccagcaacagcctgaagagagacgtgagcctgggcggctgcagcctgaacaagccccccttcctgatgctgctgaagggcagcaccagattcaacaagaccaagaccttcagaatcaaccagctgctgcaggacacccccgtggccagccccagaagcgtgaaggtgtggcaggacgcctgcagccccctgcccaagacccaggccaaccacggcgccctgcagttcggcgacatccccaccagccacctgctgttcaagctgccccaggagctgctgaagcccagaagccagttcgccgtggacatgcagaccaccagcagcagaggcctggtgttccacaccggcaccaagaacagcttcatggccctgtacctgagcaagggcagactggtgttcgccctgggcaccgacggcaagaagctgagaatcaagagcaaggagaagtgcaacgacggcaagtggcacaccgtggtgttcggccacgacggcgagaagggcagactggtggtggacggcctgagagccagagagggcagcctgcccggcaacagcaccatcagcatcagagcccccgtgtacctgggcagcccccccagcggcaagcccaagagcctgcccaccaacagcttcgtgggctgcctgaagaacttccagctggacagcaagcccctgtacacccccagcagcagcttcggcgtgagcagctgcctgggcggccccctggagaagggcatctacttcagcgaggagggcggccacgtggtgctggcccacagcgtgctgctgggccccgagttcaagctggtgttcagcatcagacccagaagcctgaccggcatcctgatccacatcggcagccagcccggcaagcacctgtgcgtgtacctggaggccggcaaggtgaccgccagcatggacagcggcgccggcggcaccagcaccagcgtgacccccaagcagagcctgtgcgacggccagtggcacagcgtggccgtgaccatcaagcagcacatcctgcacctggagctggacaccgacagcagctacaccgccggccagatccccttcccccccgccagcacccaggagcccctgcacctgggcggcgcccccgccaacctgaccaccctgagaatccccgtgtggaagagcttcttcggctgcctgagaaacatccacgtgaaccacatccccgtgcccgtgaccgaggccctggaggtgcagggccccgtgagcctgaacggctgccccgaccagtag

SEQ ID NO: 86485 - DNA, 10002 bp, synthetic construct
  misc_feature 1..10002: note = Description of Artificial Sequence: Synthetic coding sequence
  source 1..10002: mol_type = other DNA
atggccgccgccgccagacccagaggcagagccctgggccccgtgctgccccccacccccctgctgctgctggtgctgagagtgctgcccgcctgcggcgccaccgccagagaccccggcgccgccgccggcctgagcctgcaccccacctacttcaacctggccgaggccgccagaatctgggccaccgccacctgcggcgagagaggccccggcgagggcagaccccagcccgagctgtactgcaagctggtgggcggccccaccgcccccggcagcggccacaccatccagggccagttctgcgactactgcaacagcgaggaccccagaaaggcccaccccgtgaccaacgccatcgacggcagcgagagatggtggcagagcccccccctgagcagcggcacccagtacaacagagtgaacctgaccctggacctgggccagctgttccacgtggcctacatcctgatcaagttcgccaacagccccagacccgacctgtgggtgctggagagaagcgtggacttcggcagcacctacagcccctggcagtacttcgcccacagcaaggtggactgcctgaaggagttcggcagagaggccaacatggccgtgaccagagacgacgacgtgctgtgcgtgaccgagtacagcagaatcgtgcccctggagaacggcgaggtggtggtgagcctgatcaacggcagacccggcgccaagaacttcaccttcagccacaccctgagagagttcaccaaggccaccaacatcagactgagattcctgagaaccaacaccctgctgggccacctgatcagcaaggcccagagagaccccaccgtgaccagaagatactactacagcatcaaggacatcagcatcggcggccagtgcgtgtgcaacggccacgccgaggtgtgcaacatcaacaaccccgagaagctgttcagatgcgagtgccagcaccacacctgcggcgagacctgcgacagatgctgcaccggctacaaccagagaagatggagacccgccgcctgggagcagagccacgagtgcgaggcctgcaactgccacggccacgccagcaactgctactacgaccccgacgtggagagacagcaggccagcctgaacacccagggcatctacgccggcggcggcgtgtgcatcaactgccagcacaacaccgccggcgtgaactgcgagcagtgcgccaagggctactacagaccctacggcgtgcccgtggacgcccccgacggctgcatcccctgcagctgcgaccccgagcacgccgacggctgcgagcagggcagcggcagatgccactgcaagcccaacttccacggcgacaactgcgagaagtgcgccatcggctactacaacttccccttctgcctgagaatccccatcttccccgtgagcacccccagcagcgaggaccccgtggccggcgacatcaagggctgcgactgcaacctggagggcgtgctgcccgagatctgcgacgcccacggcagatgcctgtgcagacccggcgtggagggccccagatgcgacacctgcagaagcggcttctacagcttccccatctgccaggcctgctggtgcagcgccctgggcagctaccagatgccctgcagcagcgtgaccggccagtgcgagtgcagacccggcgtgaccggccagagatgcgacagatgcctgagcggcgcctacgacttcccccactgccagggcagcagcagcgcctgcgaccccgccggcaccatcaacagcaacctgggctactgccagtgcaagctgcacgtggagggccccacctgcagcagatgcaagctgctgtactggaacctggacaaggagaaccccagcggctgcagcgagtgcaagtgccacaaggccggcaccgtgagcggcaccggcgagtgcagacagggcgacggcgactgccactgcaagagccacgtgggcggcgacagctgcgacacctgcgaggacggctacttcgccctggagaagagcaactacttcggctgccagggctgccagtgcgacatcggcggcgccctgagcagcatgtgcagcggccccagcggcgtgtgccagtgcagagagcacgtggtgggcaaggtgtgccagagacccgagaacaactactacttccccgacctgcaccacatgaagtacgagatcgaggacggcagcacccccaacggcagagacctgagattcggcttcgaccccctggccttccccgagttcagctggagaggctacgcccagatgaccagcgtgcagaacgacgtgagaatcaccctgaacgtgggcaagagcagcggcagcctgttcagagtgatcctgagatacgtgaaccccggcaccgaggccgtgagcggccacatcaccatctaccccagctggggcgccgcccagagcaaggagatcatcttcctgcccagcaaggagcccgccttcgtgaccgtgcccggcaacggcttcgccgaccccttcagcatcacccccggcatctgggtggcctgcatcaaggccgagggcgtgctgctggactacctggtgctgctgcccagagactactacgaggccagcgtgctgcagctgcccgtgaccgagccctgcgcctacgccggccccccccaggagaactgcctgctgtaccagcacctgcccgtgaccagattcccctgcaccctggcctgcgaggccagacacttcctgctggacggcgagcccagacccgtggccgtgagacagcccacccccgcccaccccgtgatggtggacctgagcggcagagaggtggagctgcacctgagactgagaatcccccaggtgggccactacgtggtggtggtggagtacagcaccgaggccgcccagctgttcgtggtggacgtgaacgtgaagagcagcggcagcgtgctggccggccaggtgaacatctacagctgcaactacagcgtgctgtgcagaagcgccgtgatcgaccacatgagcagaatcgccatgtacgagctgctggccgacgccgacatccagctgaagggccacatggccagattcctgctgcaccaggtgtgcatcatccccatcgaggagttcagcgccgagtacgtgagaccccaggtgcactgcatcgccagctacggcagattcgtgaaccagagcgccacctgcgtgagcctggcccacgagaccccccccaccgccctgatcctggacgtgctgagcggcagacccttcccccacctgccccagcagagcagccccagcgtggacgtgctgcccggcgtgaccctgaaggccccccagaaccaggtgaccctgagaggcagagtgccccacctgggcagatacgtgttcgtgatccacttctaccaggccgcccaccccaccttccccgcccaggtgagcgtggacggcggctggcccagagccggcagcttccacgccagcttctgcccccacgtgctgggctgcagagaccaggtgatcgccgagggccagatcgagttcgacatcagcgagcccgaggtggccgccaccgtgaaggtgcccgagggcaagagcctggtgctggtgagagtgctggtggtgcccgccgagaactacgactaccagatcctgcacaagaagagcatggacaagagcctggagttcatcaccaactgcggcaagaacagcttctacctggacccccagaccgccagcagattctgcaagaacagcgccagaagcctggtggccttctaccacaagggcgccctgccctgcgagtgccaccccaccggcgccaccggcccccactgcagccccgagggcggccagtgcccctgccagcccaacgtgatcggcagacagtgcaccagatgcgccaccggccactacggcttccccagatgcaagccctgcagctgcggcagaagactgtgcgaggagatgaccggccagtgcagatgcccccccagaaccgtgagaccccagtgcgaggtgtgcgagacccacagcttcagcttccaccccatggccggctgcgagggctgcaactgcagcagaagaggcaccatcgaggccgccatgcccgagtgcgacagagacagcggccagtgcagatgcaagcccagaatcaccggcagacagtgcgacagatgcgccagcggcttctacagattccccgagtgcgtgccctgcaactgcaacagagacggcaccgagcccggcgtgtgcgaccccggcaccggcgcctgcctgtgcaaggagaacgtggagggcaccgagtgcaacgtgtgcagagagggcagcttccacctggaccccgccaacctgaagggctgcaccagctgcttctgcttcggcgtgaacaaccagtgccacagcagccacaagagaagaaccaagttcgtggacatgctgggctggcacctggagaccgccgacagagtggacatccccgtgagcttcaaccccggcagcaacagcatggtggccgacctgcaggagctgcccgccaccatccacagcgccagctgggtggcccccaccagctacctgggcgacaaggtgagcagctacggcggctacctgacctaccaggccaagagcttcggcctgcccggcgacatggtgctgctggagaagaagcccgacgtgcagctgaccggccagcacatgagcatcatctacgaggagaccaacacccccagacccgacagactgcaccacggcagagtgcacgtggtggagggcaacttcagacacgccagcagcagagcccccgtgagcagagaggagctgatgaccgtgctgagcagactggccgacgtgagaatccagggcctgtacttcaccgagacccagagactgaccctgagcgaggtgggcctggaggaggccagcgacaccggcagcggcagaatcgccctggccgtggagatctgcgcctgcccccccgcctacgccggcgacagctgccagggctgcagccccggctactacagagaccacaagggcctgtacaccggcagatgcgtgccctgcaactgcaacggccacagcaaccagtgccaggacggcagcggcatctgcgtgaactgccagcacaacaccgccggcgagcactgcgagagatgccaggagggctactacggcaacgccgtgcacggcagctgcagagcctgcccctgcccccacaccaacagcttcgccaccggctgcgtggtgaacggcggcgacgtgagatgcagctgcaaggccggctacaccggcacccagtgcgagagatgcgcccccggctacttcggcaacccccagaagttcggcggcagctgccagccctgcagctgcaacagcaacggccagctgggcagctgccaccccctgaccggcgactgcatcaaccaggagcccaaggacagcagccccgccgaggagtgcgacgactgcgacagctgcgtgatgaccctgctgaacgacctggccaccatgggcgagcagctgagactggtgaagagccagctgcagggcctgagcgccagcgccggcctgctggagcagatgagacacatggagacccaggccaaggacctgagaaaccagctgctgaactacagaagcgccatcagcaaccacggcagcaagatcgagggcctggagagagagctgaccgacctgaaccaggagttcgagaccctgcaggagaaggcccaggtgaacagcagaaaggcccagaccctgaacaacaacgtgaacagagccacccagagcgccaaggagctggacgtgaagatcaagaacgtgatcagaaacgtgcacatcctgctgaagcagatcagcggcaccgacggcgagggcaacaacgtgcccagcggcgacttcagcagagagtgggccgaggcccagagaatgatgagagagctgagaaacagaaacttcggcaagcacctgagagaggccgaggccgacaagagagagagccagctgctgctgaacagaatcagaacctggcagaagacccaccagggcgagaacaacggcctggccaacagcatcagagacagcctgaacgagtacgaggccaagctgagcgacctgagagccagactgcaggaggccgccgcccaggccaagcaggccaacggcctgaaccaggagaacgagagagccctgggcgccatccagagacaggtgaaggagatcaacagcctgcagagcgacttcaccaagtacctgaccaccgccgacagcagcctgctgcagaccaacatcgccctgcagctgatggagaagagccagaaggagtacgagaagctggccgccagcctgaacgaggccagacaggagctgagcgacaaggtgagagagctgagcagaagcgccggcaagaccagcctggtggaggaggccgagaagcacgccagaagcctgcaggagctggccaagcagctggaggagatcaagagaaacgccagcggcgacgagctggtgagatgcgccgtggacgccgccaccgcctacgagaacatcctgaacgccatcaaggccgccgaggacgccgccaacagagccgccagcgccagcgagagcgccctgcagaccgtgatcaaggaggacctgcccagaaaggccaagaccctgagcagcaacagcgacaagctgctgaacgaggccaagatgacccagaagaagctgaagcaggaggtgagccccgccctgaacaacctgcagcagaccctgaacatcgtgaccgtgcagaaggaggtgatcgacaccaacctgaccaccctgagagacggcctgcacggcatccagagaggcgacatcgacgccatgatcagcagcgccaagagcatggtgagaaaggccaacgacatcaccgacgaggtgctggacggcctgaaccccatccagaccgacgtggagagaatcaaggacacctacggcagaacccagaacgaggacttcaagaaggccctgaccgacgccgacaacagcgtgaacaagctgaccaacaagctgcccgacctgtggagaaagatcgagagcatcaaccagcagctgctgcccctgggcaacatcagcgacaacatggacagaatcagagagctgatccagcaggccagagacgccgccagcaaggtggccgtgcccatgagattcaacggcaagagcggcgtggaggtgagactgcccaacgacctggaggacctgaagggctacaccagcctgagcctgttcctgcagagacccaacagcagagagaacggcggcaccgagaacatgttcgtgatgtacctgggcaacaaggacgccagcagagactacatcggcatggccgtggtggacggccagctgacctgcgtgtacaacctgggcgacagagaggccgagctgcaggtggaccagatcctgaccaagagcgagaccaaggaggccgtgatggacagagtgaagttccagagaatctaccagttcgccagactgaactacaccaagggcgccaccagcagcaagcccgagacccccggcgtgtacgacatggacggcagaaacagcaacaccctgctgaacctggaccccgagaacgtggtgttctacgtgggcggctacccccccgacttcaagctgcccagcagactgagcttccccccctacaagggctgcatcgagctggacgacctgaacgagaacgtgctgagcctgtacaacttcaagaagaccttcaacctgaacaccaccgaggtggagccctgcagaagaagaaaggaggagagcgacaagaactacttcgagggcaccggctacgccagagtgcccacccagccccacgcccccatccccaccttcggccagaccatccagaccaccgtggacagaggcctgctgttcttcgccgagaacggcgacagattcatcagcctgaacatcgaggacggcaagctgatggtgagatacaagctgaacagcgagctgcccaaggagagaggcgtgggcgacgccatcaacaacggcagagaccacagcatccagatcaagatcggcaagctgcagaagagaatgtggatcaacgtggacgtgcagaacaccatcatcgacggcgaggtgttcgacttcagcacctactacctgggcggcatccccatcgccatcagagagagattcaacatcagcacccccgccttcagaggctgcatgaagaacctgaagaagaccagcggcgtggtgagactgaacgacaccgtgggcgtgaccaagaagtgcagcgaggactggaagctggtgagaagcgccagcttcagcagaggcggccagctgagcttcaccgacctgggcctgccccccaccgaccacctgcaggccagcttcggcttccagaccttccagcccagcggcatcctgctggaccaccagacctggaccagaaacctgcaggtgaccctggaggacggctacatcgagctgagcaccagcgacagcggcagccccatcttcaagagcccccagacctacatggacggcctgctgcactacgtgagcgtgatcagcgacaacagcggcctgagactgctgatcgacgaccagctgctgagaaacagcaagagactgaagcacatcagcagcagcagacagagcctgagactgggcggcagcaacttcgagggctgcatcagcaacgtgttcgtgcagagactgagcctgagccccgaggtgctggacctgaccagcaacagcctgaagagagacgtgagcctgggcggctgcagcctgaacaagccccccttcctgatgctgctgaagggcagcaccagattcaacaagaccaagaccttcagaatcaaccagctgctgcaggacacccccgtggccagccccagaagcgtgaaggtgtggcaggacgcctgcagccccctgcccaagacccaggccaaccacggcgccctgcagttcggcgacatccccaccagccacctgctgttcaagctgccccaggagctgctgaagcccagaagccagttcgccgtggacatgcagaccaccagcagcagaggcctggtgttccacaccggcaccaagaacagcttcatggccctgtacctgagcaagggcagactggtgttcgccctgggcaccgacggcaagaagctgagaatcaagagcaaggagaagtgcaacgacggcaagtggcacaccgtggtgttcggccacgacggcgagaagggcagactggtggtggacggcctgagagccagagagggcagcctgcccggcaacagcaccatcagcatcagagcccccgtgtacctgggcagcccccccagcggcaagcccaagagcctgcccaccaacagcttcgtgggctgcctgaagaacttccagctggacagcaagcccctgtacacccccagcagcagcttcggcgtgagcagctgcctgggcggccccctggagaagggcatctacttcagcgaggagggcggccacgtggtgctggcccacagcgtgctgctgggccccgagttcaagctggtgttcagcatcagacccagaagcctgaccggcatcctgatccacatcggcagccagcccggcaagcacctgtgcgtgtacctggaggccggcaaggtgaccgccagcatggacagcggcgccggcggcaccagcaccagcgtgacccccaagcagagcctgtgcgacggccagtggcacagcgtggccgtgaccatcaagcagcacatcctgcacctggagctggacaccgacagcagctacaccgccggccagatccccttcccccccgccagcacccaggagcccctgcacctgggcggcgcccccgccaacctgaccaccctgagaatccccgtgtggaagagcttcttcggctgcctgagaaacatccacgtgaaccacatccccgtgcccgtgaccgaggccctggaggtgcagggccccgtgagcctgaacggctgccccgaccagtag

SEQ ID NO: 86486 - DNA, 9834 bp, synthetic construct
  misc_feature 1..9834: note = Description of Artificial Sequence: Synthetic coding sequence
  source 1..9834: mol_type = other DNA
atggccgccgccgccagacccagaggcagagccctgggccccgtgctgccccccacccccctgctgctgctggtgctgagagtgctgcccgcctgcggcgccaccgccagagaccccggcgccgccgccggcctgagcctgcaccccacctacttcaacctggccgaggccgccagaatctgggccaccgccacctgcggcgagagaggccccggcgagggcagaccccagcccgagctgtactgcaagctggtgggcggccccaccgcccccggcagcggccacaccatccagggccagttctgcgactactgcaacagcgaggaccccagaaaggcccaccccgtgaccaacgccatcgacggcagcgagagatggtggcagagcccccccctgagcagcggcacccagtacaacagagtgaacctgaccctggacctgggccagctgttccacgtggcctacatcctgatcaagttcgccaacagccccagacccgacctgtgggtgctggagagaagcgtggacttcggcagcacctacagcccctggcagtacttcgcccacagcaaggtggactgcctgaaggagttcggcagagaggccaacatggccgtgaccagagacgacgacgtgctgtgcgtgaccgagtacagcagaatcgtgcccctggagaacggcgaggtggtggtgagcctgatcaacggcagacccggcgccaagaacttcaccttcagccacaccctgagagagttcaccaaggccaccaacatcagactgagattcctgagaaccaacaccctgctgggccacctgatcagcaaggcccagagagaccccaccgtgaccagaagatactactacagcatcaaggacatcagcatcggcggccagtgcgtgtgcaacggccacgccgaggtgtgcaacatcaacaaccccgagaagctgttcagatgcgagtgccagcaccacacctgcggcgagacctgcgacagatgctgcaccggctacaaccagagaagatggagacccgccgcctgggagcagagccacgagtgcgaggcctgcaactgccacggccacgccagcaactgctactacgaccccgacgtggagagacagcaggccagcctgaacacccagggcatctacgccggcggcggcgtgtgcatcaactgccagcacaacaccgccggcgtgaactgcgagcagtgcgccaagggctactacagaccctacggcgtgcccgtggacgcccccgacggctgcatcccctgcagctgcgaccccgagcacgccgacggctgcgagcagggcagcggcagatgccactgcaagcccaacttccacggcgacaactgcgagaagtgcgccatcggctactacaacttccccttctgcctgagaatccccatcttccccgtgagcacccccagcagcgaggaccccgtggccggcgacatcaagggctgcgactgcaacctggagggcgtgctgcccgagatctgcgacgcccacggcagatgcctgtgcagacccggcgtggagggccccagatgcgacacctgcagaagcggcttctacagcttccccatctgccaggcctgctggtgcagcgccctgggcagctaccagatgccctgcagcagcgtgaccggccagtgcgagtgcagacccggcgtgaccggccagagatgcgacagatgcctgagcggcgcctacgacttcccccactgccagggcagcagcagcgcctgcgaccccgccggcaccatcaacagcaacctgggctactgccagtgcaagctgcacgtggagggccccacctgcagcagatgcaagctgctgtactggaacctggacaaggagaaccccagcggctgcagcgagtgcaagtgccacaaggccggcaccgtgagcggcaccggcgagtgcagacagggcgacggcgactgccactgcaagagccacgtgggcggcgacagctgcgacacctgcgaggacggctacttcgccctggagaagagcaactacttcggctgccagggctgccagtgcgacatcggcggcgccctgagcagcatgtgcagcggccccagcggcgtgtgccagtgcagagagcacgtggtgggcaaggtgtgccagagacccgagaacaactactacttccccgacctgcaccacatgaagtacgagatcgaggacggcagcacccccaacggcagagacctgagattcggcttcgaccccctggccttccccgagttcagctggagaggctacgcccagatgaccagcgtgcagaacgacgtgagaatcaccctgaacgtgggcaagagcagcggcagcctgttcagagtgatcctgagatacgtgaaccccggcaccgaggccgtgagcggccacatcaccatctaccccagctggggcgccgcccagagcaaggagatcatcttcctgcccagcaaggagcccgccttcgtgaccgtgcccggcaacggcttcgccgaccccttcagcatcacccccggcatctgggtggcctgcatcaaggccgagggcgtgctgctggactacctggtgctgctgcccagagactactacgaggccagcgtgctgcagctgcccgtgaccgagccctgcgcctacgccggccccccccaggagaactgcctgctgtaccagcacctgcccgtgaccagattcccctgcaccctggcctgcgaggccagacacttcctgctggacggcgagcccagacccgtggccgtgagacagcccacccccgcccaccccgtgatggtggacctgagcggcagagaggtggagctgcacctgagactgagaatcccccaggtgggccactacgtggtggtggtggagtacagcaccgaggccgcccagctgttcgtggtggacgtgaacgtgaagagcagcggcagcgtgctggccggccaggtgaacatctacagctgcaactacagcgtgctgtgcagaagcgccgtgatcgaccacatgagcagaatcgccatgtacgagctgctggccgacgccgacatccagctgaagggccacatggccagattcctgctgcaccaggtgtgcatcatccccatcgaggagttcagcgccgagtacgtgagaccccaggtgcactgcatcgccagctacggcagattcgtgaaccagagcgccacctgcgtgagcctggcccacgagaccccccccaccgccctgatcctggacgtgctgagcggcagacccttcccccacctgccccagcagagcagccccagcgtggacgtgctgcccggcgtgaccctgaaggccccccagaaccaggtgaccctgagaggcagagtgccccacctgggcagatacgtgttcgtgatccacttctaccaggccgcccaccccaccttccccgcccaggtgagcgtggacggcggctggcccagagccggcagcttccacgccagcttctgcccccacgtgctgggctgcagagaccaggtgatcgccgagggccagatcgagttcgacatcagcgagcccgaggtggccgccaccgtgaaggtgcccgagggcaagagcctggtgctggtgagagtgctggtggtgcccgccgagaactacgactaccagatcctgcacaagaagagcatggacaagagcctggagttcatcaccaactgcggcaagaacagcttctacctggacccccagaccgccagcagattctgcaagaacagcgccagaagcctggtggccttctaccacaagggcgccctgccctgcgagtgccaccccaccggcgccaccggcccccactgcagccccgagggcggccagtgcccctgccagcccaacgtgatcggcagacagtgcaccagatgcgccaccggccactacggcttccccagatgcaagccctgcagctgcggcagaagactgtgcgaggagatgaccggccagtgcagatgcccccccagaaccgtgagaccccagtgcgaggtgtgcgagacccacagcttcagcttccaccccatggccggctgcgagggctgcaactgcagcagaagaggcaccatcgaggccgccatgcccgagtgcgacagagacagcggccagtgcagatgcaagcccagaatcaccggcagacagtgcgacagatgcgccagcggcttctacagattccccgagtgcgtgccctgcaactgcaacagagacggcaccgagcccggcgtgtgcgaccccggcaccggcgcctgcctgtgcaaggagaacgtggagggcaccgagtgcaacgtgtgcagagagggcagcttccacctggaccccgccaacctgaagggctgcaccagctgcttctgcttcggcgtgaacaaccagtgccacagcagccacaagagaagaaccaagttcgtggacatgctgggctggcacctggagaccgccgacagagtggacatccccgtgagcttcaaccccggcagcaacagcatggtggccgacctgcaggagctgcccgccaccatccacagcgccagctgggtggcccccaccagctacctgggcgacaaggtgagcagctacggcggctacctgacctaccaggccaagagcttcggcctgcccggcgacatggtgctgctggagaagaagcccgacgtgcagctgaccggccagcacatgagcatcatctacgaggagaccaacacccccagacccgacagactgcaccacggcagagtgcacgtggtggagggcaacttcagacacgccagcagcagagcccccgtgagcagagaggagctgatgaccgtgctgagcagactggccgacgtgagaatccagggcctgtacttcaccgagacccagagactgaccctgagcgaggtgggcctggaggaggccagcgacaccggcagcggcagaatcgccctggccgtggagatctgcgcctgcccccccgcctacgccggcgacagctgccagggctgcagccccggctactacagagaccacaagggcctgtacaccggcagatgcgtgccctgcaactgcaacggccacagcaaccagtgccaggacggcagcggcatctgcgtgaactgccagcacaacaccgccggcgagcactgcgagagatgccaggagggctactacggcaacgccgtgcacggcagctgcagagcctgcccctgcccccacaccaacagcttcgccaccggctgcgtggtgaacggcggcgacgtgagatgcagctgcaaggccggctacaccggcacccagtgcgagagatgcgcccccggctacttcggcaacccccagaagttcggcggcagctgccagccctgcagctgcaacagcaacggccagctgggcagctgccaccccctgaccggcgactgcatcaaccaggagcccaaggacagcagccccgccgaggagtgcgacgactgcgacagctgcgtgatgaccctgctgaacgacctggccaccatgggcgagcagctgagactggtgaagagccagctgcagggcctgagcgccagcgccggcctgctggagcagatgagacacatggagacccaggccaaggacctgagaaaccagctgctgaactacagaagcgccatcagcaaccacggcagcaagatcgagggcctggagagagagctgaccgacctgaaccaggagttcgagaccctgcaggagaaggcccaggtgaacagcagaaaggcccagaccctgaacaacaacgtgaacagagccacccagagcgccaaggagctggacgtgaagatcaagaacgtgatcagaaacgtgcacatgctgaacagaatcagaacctggcagaagacccaccagggcgagaacaacggcctggccaacagcatcagagacagcctgaacgagtacgaggccaagctgagcgacctgagagccagactgcaggaggccgccgcccaggccaagcaggccaacggcctgaaccaggagaacgagagagccctgggcgccatccagagacaggtgaaggagatcaacagcctgcagagcgacttcaccaagtacctgaccaccgccgacagcagcctgctgcagaccaacatcgccctgcagctgatggagaagagccagaaggagtacgagaagctggccgccagcctgaacgaggccagacaggagctgagcgacaaggtgagagagctgagcagaagcgccggcaagaccagcctggtggaggaggccgagaagcacgccagaagcctgcaggagctggccaagcagctggaggagatcaagagaaacgccagcggcgacgagctggtgagatgcgccgtggacgccgccaccgcctacgagaacatcctgaacgccatcaaggccgccgaggacgccgccaacagagccgccagcgccagcgagagcgccctgcagaccgtgatcaaggaggacctgcccagaaaggccaagaccctgagcagcaacagcgacaagctgctgaacgaggccaagatgacccagaagaagctgaagcaggaggtgagccccgccctgaacaacctgcagcagaccctgaacatcgtgaccgtgcagaaggaggtgatcgacaccaacctgaccaccctgagagacggcctgcacggcatccagagaggcgacatcgacgccatgatcagcagcgccaagagcatggtgagaaaggccaacgacatcaccgacgaggtgctggacggcctgaaccccatccagaccgacgtggagagaatcaaggacacctacggcagaacccagaacgaggacttcaagaaggccctgaccgacgccgacaacagcgtgaacaagctgaccaacaagctgcccgacctgtggagaaagatcgagagcatcaaccagcagctgctgcccctgggcaacatcagcgacaacatggacagaatcagagagctgatccagcaggccagagacgccgccagcaaggtggccgtgcccatgagattcaacggcaagagcggcgtggaggtgagactgcccaacgacctggaggacctgaagggctacaccagcctgagcctgttcctgcagagacccaacagcagagagaacggcggcaccgagaacatgttcgtgatgtacctgggcaacaaggacgccagcagagactacatcggcatggccgtggtggacggccagctgacctgcgtgtacaacctgggcgacagagaggccgagctgcaggtggaccagatcctgaccaagagcgagaccaaggaggccgtgatggacagagtgaagttccagagaatctaccagttcgccagactgaactacaccaagggcgccaccagcagcaagcccgagacccccggcgtgtacgacatggacggcagaaacagcaacaccctgctgaacctggaccccgagaacgtggtgttctacgtgggcggctacccccccgacttcaagctgcccagcagactgagcttccccccctacaagggctgcatcgagctggacgacctgaacgagaacgtgctgagcctgtacaacttcaagaagaccttcaacctgaacaccaccgaggtggagccctgcagaagaagaaaggaggagagcgacaagaactacttcgagggcaccggctacgccagagtgcccacccagccccacgcccccatccccaccttcggccagaccatccagaccaccgtggacagaggcctgctgttcttcgccgagaacggcgacagattcatcagcctgaacatcgaggacggcaagctgatggtgagatacaagctgaacagcgagctgcccaaggagagaggcgtgggcgacgccatcaacaacggcagagaccacagcatccagatcaagatcggcaagctgcagaagagaatgtggatcaacgtggacgtgcagaacaccatcatcgacggcgaggtgttcgacttcagcacctactacctgggcggcatccccatcgccatcagagagagattcaacatcagcacccccgccttcagaggctgcatgaagaacctgaagaagaccagcggcgtggtgagactgaacgacaccgtgggcgtgaccaagaagtgcagcgaggactggaagctggtgagaagcgccagcttcagcagaggcggccagctgagcttcaccgacctgggcctgccccccaccgaccacctgcaggccagcttcggcttccagaccttccagcccagcggcatcctgctggaccaccagacctggaccagaaacctgcaggtgaccctggaggacggctacatcgagctgagcaccagcgacagcggcagccccatcttcaagagcccccagacctacatggacggcctgctgcactacgtgagcgtgatcagcgacaacagcggcctgagactgctgatcgacgaccagctgctgagaaacagcaagagactgaagcacatcagcagcagcagacagagcctgagactgggcggcagcaacttcgagggctgcatcagcaacgtgttcgtgcagagactgagcctgagccccgaggtgctggacctgaccagcaacagcctgaagagagacgtgagcctgggcggctgcagcctgaacaagccccccttcctgatgctgctgaagggcagcaccagattcaacaagaccaagaccttcagaatcaaccagctgctgcaggacacccccgtggccagccccagaagcgtgaaggtgtggcaggacgcctgcagccccctgcccaagacccaggccaaccacggcgccctgcagttcggcgacatccccaccagccacctgctgttcaagctgccccaggagctgctgaagcccagaagccagttcgccgtggacatgcagaccaccagcagcagaggcctggtgttccacaccggcaccaagaacagcttcatggccctgtacctgagcaagggcagactggtgttcgccctgggcaccgacggcaagaagctgagaatcaagagcaaggagaagtgcaacgacggcaagtggcacaccgtggtgttcggccacgacggcgagaagggcagactggtggtggacggcctgagagccagagagggcagcctgcccggcaacagcaccatcagcatcagagcccccgtgtacctgggcagcccccccagcggcaagcccaagagcctgcccaccaacagcttcgtgggctgcctgaagaacttccagctggacagcaagcccctgtacacccccagcagcagcttcggcgtgagcagctgcctgggcggccccctggagaagggcatctacttcagcgaggagggcggccacgtggtgctggcccacagcgtgctgctgggccccgagttcaagctggtgttcagcatcagacccagaagcctgaccggcatcctgatccacatcggcagccagcccggcaagcacctgtgcgtgtacctggaggccggcaaggtgaccgccagcatggacagcggcgccggcggcaccagcaccagcgtgacccccaagcagagcctgtgcgacggccagtggcacagcgtggccgtgaccatcaagcagcacatcctgcacctggagctggacaccgacagcagctacaccgccggccagatccccttcccccccgccagcacccaggagcccctgcacctgggcggcgcccccgccaacctgaccaccctgagaatccccgtgtggaagagcttcttcggctgcctgagaaacatccacgtgaaccacatccccgtgcccgtgaccgaggccctggaggtgcagggccccgtgagcctgaacggctgccccgaccagtag

SEQ ID NO: 86487 - DNA, 4560 bp, synthetic construct
  misc_feature 1..4560: note = Description of Artificial Sequence: Synthetic coding sequence
  source 1..4560: mol_type = other DNA
atggccgccgccgccagacccagaggcagagccctgggccccgtgctgccccccacccccctgctgctgctggtgctgagagtgctgcccgcctgcggcgccaccgccagagaccccggcgccgccgccggcctgagcctgcaccccacctacttcaacctggccgaggccgccagaatctgggccaccgccacctgcggcgagagaggccccggcgagggcagaccccagcccgagctgtactgcaagctggtgggcggccccaccgcccccggcagcggccacaccatccagggccagttctgcgactactgcaacagcgaggaccccagaaaggcccaccccgtgaccaacgccatcgacggcagcgagagatggtggcagagcccccccctgagcagcggcacccagtacaacagagtgaacctgaccctggacctgggccagctgttccacgtggcctacatcctgatcaagttcgccaacagccccagacccgacctgtgggtgctggagagaagcgtggacttcggcagcacctacagcccctggcagtacttcgcccacagcaaggtggactgcctgaaggagttcggcagagaggccaacatggccgtgaccagagacgacgacgtgctgtgcgtgaccgagtacagcagaatcgtgcccctggagaacggcgaggtggtggtgagcctgatcaacggcagacccggcgccaagaacttcaccttcagccacaccctgagagtgtaccagggcaacaagcaccccctgttcctgagaaccaacaccctgctgggccacctgatcagcaaggcccagagagaccccaccgtgaccagaagatactactacagcatcaaggacatcagcatcggcggccagtgcgtgtgcaacggccacgccgaggtgtgcaacatcaacaaccccgagaagctgttcagatgcgagtgccagcaccacacctgcggcgagacctgcgacagatgctgcaccggctacaaccagagaagatggagacccgccgcctgggagcagagccacgagtgcgaggcctgcaactgccacggccacgccagcaactgctactacgaccccgacgtggagagacagcaggccagcctgaacacccagggcatctacgccggcggcggcgtgtgcatcaactgccagcacaacaccgccggcgtgaactgcgagcagtgcgccaagggctactacagaccctacggcgtgcccgtggacgcccccgacggctgcatcccctgcagctgcgaccccgagcacgccgacggctgcgagcagggcagcggcagatgccactgcaagcccaacttccacggcgacaactgcgagaagtgcgccatcggctactacaacttccccttctgcctgagaatccccatcttccccgtgagcacccccagcagcgaggaccccgtggccggcgacatcaagggctgcgactgcaacctggagggcgtgctgcccgagatctgcgacgcccacggcagatgcctgtgcagacccggcgtggagggccccagatgcgacacctgcagaagcggcttctacagcttccccatctgccaggcctgctggtgcagcgccctgggcagctaccagatgccctgcagcagcgtgaccggccagtgcgagtgcagacccggcgtgaccggccagagatgcgacagatgcctgagcggcgcctacgacttcccccactgccagggcagcagcagcgcctgcgaccccgccggcaccatcaacagcaacctgggctactgccagtgcaagctgcacgtggagggccccacctgcagcagatgcaagctgctgtactggaacctggacaaggagaaccccagcggctgcagcgagtgcaagtgccacaaggccggcaccgtgagcggcaccggcgagtgcagacagggcgacggcgactgccactgcaagagccacgtgggcggcgacagctgcgacacctgcgaggacggctacttcgccctggagaagagcaactacttcggctgccagggctgccagtgcgacatcggcggcgccctgagcagcatgtgcagcggccccagcggcgtgtgccagtgcagagagcacgtggtgggcaaggtgtgccagagacccgagaacaactactacttccccgacctgcaccacatgaagtacgagatcgaggacggcagcacccccaacggcagagacctgagattcggcttcgaccccctggccttccccgagttcagctggagaggctacgcccagatgaccagcgtgcagaacgacgtgagaatcaccctgaacgtgggcaagagcagcggcagcctgttcagagtgatcctgagatacgtgaaccccggcaccgaggccgtgagcggccacatcaccatctaccccagctggggcgccgcccagagcaaggagatcatcttcctgcccagcaaggagcccgccttcgtgaccgtgcccggcaacggcttcgccgaccccttcagcatcacccccggcatctgggtggcctgcatcaaggccgagggcgtgctgctggactacctggtgctgctgcccagagactactacgaggccagcgtgctgcagctgcccgtgaccgagccctgcgcctacgccggccccccccaggagaactgcctgctgtaccagcacctgcccgtgaccagattcccctgcaccctggcctgcgaggccagacacttcctgctggacggcgagcccagacccgtggccgtgagacagcccacccccgcccaccccgtgatggtggacctgagcggcagagaggtggagctgcacctgagactgagaatcccccaggtgggccactacgtggtggtggtggagtacagcaccgaggccgcccagctgttcgtggtggacgtgaacgtgaagagcagcggcagcgtgctggccggccaggtgaacatctacagctgcaactacagcgtgctgtgcagaagcgccgtgatcgaccacatgagcagaatcgccatgtacgagctgctggccgacgccgacatccagctgaagggccacatggccagattcctgctgcaccaggtgtgcatcatccccatcgaggagttcagcgccgagtacgtgagaccccaggtgcactgcatcgccagctacggcagattcgtgaaccagagcgccacctgcgtgagcctggcccacgagaccccccccaccgccctgatcctggacgtgctgagcggcagacccttcccccacctgccccagcagagcagccccagcgtggacgtgctgcccggcgtgaccctgaaggccccccagaaccaggtgaccctgagaggcagagtgccccacctgggcagatacgtgttcgtgatccacttctaccaggccgcccaccccaccttccccgcccaggtgagcgtggacggcggctggcccagagccggcagcttccacgccagcttctgcccccacgtgctgggctgcagagaccaggtgatcgccgagggccagatcgagttcgacatcagcgagcccgaggtggccgccaccgtgaaggtgcccgagggcaagagcctggtgctggtgagagtgctggtggtgcccgccgagaactacgactaccagatcctgcacaagaagagcatggacaagagcctggagttcatcaccaactgcggcaagaacagcttctacctggacccccagaccgccagcagattctgcaagaacagcgccagaagcctggtggccttctaccacaagggcgccctgccctgcgagtgccaccccaccggcgccaccggcccccactgcagccccgagggcggcgcccacgccagccccaccagcagcggcggcagcgcccccgccgtgcagcaggcctacggcttccccagatgcaagagaaagagctgcagctgcggcagaagactgtgcgaggagatgaccggccagtgcagatgcccccccagaaccgtgagaccccagtgcgaggtgtgcgagacccacagcttcagcttccaccccatggccggctgcgagggctgcaactgcagcagaagaggcaccatcgaggccgccatgcccgagtgcgacagagacagcggccagtgcagatgcaagcccagaatcaccggcagacagtgcgacagatgcgccagcggcttctacagattccccgagtgcgtgccctgcaactgcaacagagacggcaccgagcccggcgtgtgcgaccccggcaccggcgcctgcctgtgcaaggagaacgtggagggcaccgagtgcaacgtgtgcagagagggcagcttccacctggaccccgccaacctgaagggctgcaccagctgcttctgcttcggcgtgaacaaccagtgccacagcagccacaagagaagaaccaagttcgtggacatgctgggctggcacctggagaccgccgacagagtggacatccccgtgagcttcaaccccggcagcaacagcatggtggccgacctgcaggagctgcccgccaccatccacagcgccagctgggtggccccctag

SEQ ID NO: 86488 - DNA, 1743 bp, synthetic construct
  misc_feature 1..1743: note = Description of Artificial Sequence: Synthetic coding sequence
  source 1..1743: mol_type = other DNA
atggccgccgccgccagacccagaggcagagccctgggccccgtgctgccccccacccccctgctgctgctggtgctgagagtgctgcccgcctgcggcgccaccgccagagaccccggcgccgccgccggcctgagcctgcaccccacctacttcaacctggccgaggccgccagaatctgggccaccgccacctgcggcgagagaggccccggcgagggcagaccccagcccgagctgtactgcaagctggtgggcggccccaccgcccccggcagcggccacaccatccagggccagttctgcgactactgcaacagcgaggaccccagaaaggcccaccccgtgaccaacgccatcgacggcagcgagagatggtggcagagcccccccctgagcagcggcacccagtacaacagagtgaacctgaccctggacctgggccagctgttccacgtggcctacatcctgatcaagttcgccaacagccccagacccgacctgtgggtgctggagagaagcgtggacttcggcagcacctacagcccctggcagtacttcgcccacagcaaggtggactgcctgaaggagttcggcagagaggccaacatggccgtgaccagagacgacgacgtgctgtgcgtgaccgagtacagcagaatcgtgcccctggagaacggcgaggtggtggtgagcctgatcaacggcagacccggcgccaagaacttcaccttcagccacaccctgagagagttcaccaaggccaccaacatcagactgagattcctgagaaccaacaccctgctgggccacctgatcagcaaggcccagagagaccccaccgtgaccagaagatactactacagcatcaaggacatcagcatcggcggccagtgcgtgtgcaacggccacgccgaggtgtgcaacatcaacaaccccgagaagctgttcagatgcgagtgccagcaccacacctgcggcgagacctgcgacagatgctgcaccggctacaaccagagaagatggagacccgccgcctgggagcagagccacgagtgcgaggcctgcaactgccacggccacgccagcaactgctactacgaccccgacgtggagagacagcaggccagcctgaacacccagggcatctacgccggcggcggcgtgtgcatcaactgccagcacaacaccgccggcgtgaactgcgagcagtgcgccaagggctactacagaccctacggcgtgcccgtggacgcccccgacggctgcatcccctgcagctgcgaccccgagcacgccgacggctgcgagcagggcagcggcagatgccactgcaagcccaacttccacggcgacaactgcgagaagtgcgccatcggctactacaacttccccttctgcctgagaatccccatcttccccgtgagcacccccagcagcgaggaccccgtggccggcgacatcaagggcaactggtgcgactgcaacctggagggcgtgctgcccgagatctgcgacgcccacggcagatgcctgtgcagacccggcgtggagggccccagatgcgacacctgcagaagcggcttctacagcttccccatctgccagggccccagcgagaaggtggccatctacaagcccgagagcagacccagcgccgagaccgagcccgccagcacctggatcctggacttccccgccagcagaaccggcgagatcaacttctactgcctgagcccctag

SEQ ID NO: 86489 - DNA, 5007 bp, synthetic construct
  misc_feature 1..5007: note = Description of Artificial Sequence: Synthetic coding sequence
  source 1..5007: mol_type = other DNA
atgccccccgccgtgagaagaagcgcctgcagcatgggctggctgtggatcttcggcgccgccctgggccagtgcctgggctacagcagccagcagcagagagtgcccttcctgcagccccccggccagagccagctgcaggccagctacgtggagttcagacccagccagggctgcagccccggctactacagagaccacaagggcctgtacaccggcagatgcgtgccctgcaactgcaacggccacagcaaccagtgccaggacggcagcggcatctgcgtgaactgccagcacaacaccgccggcgagcactgcgagagatgccaggagggctactacggcaacgccgtgcacggcagctgcagagcctgcccctgcccccacaccaacagcttcgccaccggctgcgtggtgaacggcggcgacgtgagatgcagctgcaaggccggctacaccggcacccagtgcgagagatgcgcccccggctacttcggcaacccccagaagttcggcggcagctgccagccctgcagctgcaacagcaacggccagctgggcagctgccaccccctgaccggcgactgcatcaaccaggagcccaaggacagcagccccgccgaggagtgcgacgactgcgacagctgcgtgatgaccctgctgaacgacctggccaccatgggcgagcagctgagactggtgaagagccagctgcagggcctgagcgccagcgccggcctgctggagcagatgagacacatggagacccaggccaaggacctgagaaaccagctgctgaactacagaagcgccatcagcaaccacggcagcaagatcgagggcctggagagagagctgaccgacctgaaccaggagttcgagaccctgcaggagaaggcccaggtgaacagcagaaaggcccagaccctgaacaacaacgtgaacagagccacccagagcgccaaggagctggacgtgaagatcaagaacgtgatcagaaacgtgcacatgctgaacagaatcagaacctggcagaagacccaccagggcgagaacaacggcctggccaacagcatcagagacagcctgaacgagtacgaggccaagctgagcgacctgagagccagactgcaggaggccgccgcccaggccaagcaggccaacggcctgaaccaggagaacgagagagccctgggcgccatccagagacaggtgaaggagatcaacagcctgcagagcgacttcaccaagtacctgaccaccgccgacagcagcctgctgcagaccaacatcgccctgcagctgatggagaagagccagaaggagtacgagaagctggccgccagcctgaacgaggccagacaggagctgagcgacaaggtgagagagctgagcagaagcgccggcaagaccagcctggtggaggaggccgagaagcacgccagaagcctgcaggagctggccaagcagctggaggagatcaagagaaacgccagcggcgacgagctggtgagatgcgccgtggacgccgccaccgcctacgagaacatcctgaacgccatcaaggccgccgaggacgccgccaacagagccgccagcgccagcgagagcgccctgcagaccgtgatcaaggaggacctgcccagaaaggccaagaccctgagcagcaacagcgacaagctgctgaacgaggccaagatgacccagaagaagctgaagcaggaggtgagccccgccctgaacaacctgcagcagaccctgaacatcgtgaccgtgcagaaggaggtgatcgacaccaacctgaccaccctgagagacggcctgcacggcatccagagaggcgacatcgacgccatgatcagcagcgccaagagcatggtgagaaaggccaacgacatcaccgacgaggtgctggacggcctgaaccccatccagaccgacgtggagagaatcaaggacacctacggcagaacccagaacgaggacttcaagaaggccctgaccgacgccgacaacagcgtgaacaagctgaccaacaagctgcccgacctgtggagaaagatcgagagcatcaaccagcagctgctgcccctgggcaacatcagcgacaacatggacagaatcagagagctgatccagcaggccagagacgccgccagcaaggtggccgtgcccatgagattcaacggcaagagcggcgtggaggtgagactgcccaacgacctggaggacctgaagggctacaccagcctgagcctgttcctgcagagacccaacagcagagagaacggcggcaccgagaacatgttcgtgatgtacctgggcaacaaggacgccagcagagactacatcggcatggccgtggtggacggccagctgacctgcgtgtacaacctgggcgacagagaggccgagctgcaggtggaccagatcctgaccaagagcgagaccaaggaggccgtgatggacagagtgaagttccagagaatctaccagttcgccagactgaactacaccaagggcgccaccagcagcaagcccgagacccccggcgtgtacgacatggacggcagaaacagcaacaccctgctgaacctggaccccgagaacgtggtgttctacgtgggcggctacccccccgacttcaagctgcccagcagactgagcttccccccctacaagggctgcatcgagctggacgacctgaacgagaacgtgctgagcctgtacaacttcaagaagaccttcaacctgaacaccaccgaggtggagccctgcagaagaagaaaggaggagagcgacaagaactacttcgagggcaccggctacgccagagtgcccacccagccccacgcccccatccccaccttcggccagaccatccagaccaccgtggacagaggcctgctgttcttcgccgagaacggcgacagattcatcagcctgaacatcgaggacggcaagctgatggtgagatacaagctgaacagcgagctgcccaaggagagaggcgtgggcgacgccatcaacaacggcagagaccacagcatccagatcaagatcggcaagctgcagaagagaatgtggatcaacgtggacgtgcagaacaccatcatcgacggcgaggtgttcgacttcagcacctactacctgggcggcatccccatcgccatcagagagagattcaacatcagcacccccgccttcagaggctgcatgaagaacctgaagaagaccagcggcgtggtgagactgaacgacaccgtgggcgtgaccaagaagtgcagcgaggactggaagctggtgagaagcgccagcttcagcagaggcggccagctgagcttcaccgacctgggcctgccccccaccgaccacctgcaggccagcttcggcttccagaccttccagcccagcggcatcctgctggaccaccagacctggaccagaaacctgcaggtgaccctggaggacggctacatcgagctgagcaccagcgacagcggcagccccatcttcaagagcccccagacctacatggacggcctgctgcactacgtgagcgtgatcagcgacaacagcggcctgagactgctgatcgacgaccagctgctgagaaacagcaagagactgaagcacatcagcagcagcagacagagcctgagactgggcggcagcaacttcgagggctgcatcagcaacgtgttcgtgcagagactgagcctgagccccgaggtgctggacctgaccagcaacagcctgaagagagacgtgagcctgggcggctgcagcctgaacaagccccccttcctgatgctgctgaagggcagcaccagattcaacaagaccaagaccttcagaatcaaccagctgctgcaggacacccccgtggccagccccagaagcgtgaaggtgtggcaggacgcctgcagccccctgcccaagacccaggccaaccacggcgccctgcagttcggcgacatccccaccagccacctgctgttcaagctgccccaggagctgctgaagcccagaagccagttcgccgtggacatgcagaccaccagcagcagaggcctggtgttccacaccggcaccaagaacagcttcatggccctgtacctgagcaagggcagactggtgttcgccctgggcaccgacggcaagaagctgagaatcaagagcaaggagaagtgcaacgacggcaagtggcacaccgtggtgttcggccacgacggcgagaagggcagactggtggtggacggcctgagagccagagagggcagcctgcccggcaacagcaccatcagcatcagagcccccgtgtacctgggcagcccccccagcggcaagcccaagagcctgcccaccaacagcttcgtgggctgcctgaagaacttccagctggacagcaagcccctgtacacccccagcagcagcttcggcgtgagcagctgcctgggcggccccctggagaagggcatctacttcagcgaggagggcggccacgtggtgctggcccacagcgtgctgctgggccccgagttcaagctggtgttcagcatcagacccagaagcctgaccggcatcctgatccacatcggcagccagcccggcaagcacctgtgcgtgtacctggaggccggcaaggtgaccgccagcatggacagcggcgccggcggcaccagcaccagcgtgacccccaagcagagcctgtgcgacggccagtggcacagcgtggccgtgaccatcaagcagcacatcctgcacctggagctggacaccgacagcagctacaccgccggccagatccccttcccccccgccagcacccaggagcccctgcacctgggcggcgcccccgccaacctgaccaccctgagaatccccgtgtggaagagcttcttcggctgcctgagaaacatccacgtgaaccacatccccgtgcccgtgaccgaggccctggaggtgcagggccccgtgagcctgaacggctgccccgaccagtag

SEQ ID NO: 86490 - DNA, 1065 bp, synthetic construct
  misc_feature 1..1065: note = Description of Artificial Sequence: Synthetic coding sequence
  source 1..1065: mol_type = other DNA
atgcagggcctgctgttcagcaccctgctgctggccggcctggcccagttctgctgcagagtgcagggcaccggccccctggacaccacccccgagggcagacccggcgaggtgagcgacgccccccagagaaagcagttctgccactggccctgcaagtgcccccagcagaagcccagatgcccccccggcgtgagcctggtgagagacggctgcggctgctgcaagatctgcgccaagcagcccggcgagatctgcaacgaggccgacctgtgcgacccccacaagggcctgtactgcgactacagcgtggacagacccagatacgagaccggcgtgtgcgcctacctggtggccgtgggctgcgagttcaaccaggtgcactaccacaacggccaggtgttccagcccaaccccctgttcagctgcctgtgcgtgagcggcgccatcggctgcacccccctgttcatccccaagctggccggcagccactgcagcggcgccaagggcggcaagaagagcgaccagagcaactgcagcctggagcccctgctgcagcagctgagcaccagctacaagaccatgcccgcctacagaaacctgcccctgatctggaagaagaagtgcctggtgcaggccaccaagtggaccccctgcagcagaacctgcggcatgggcatcagcaacagagtgaccaacgagaacagcaactgcgagatgagaaaggagaagagactgtgctacatccagccctgcgacagcaacatcctgaagaccatcaagatccccaagggcaagacctgccagcccaccttccagctgagcaaggccgagaagttcgtgttcagcggctgcagcagcacccagagctacaagcccaccttctgcggcatctgcctggacaagagatgctgcatccccaacaagagcaagatgatcaccatccagttcgactgccccaacgagggcagcttcaagtggaagatgctgtggatcaccagctgcgtgtgccagagaaactgcagagagcccggcgacatcttcagcgagctgaagatcctgtag

SEQ ID NO: 86491 - DNA, 267 bp, synthetic construct
  misc_feature 1..267: note = Description of Artificial Sequence: Synthetic coding sequence
  source 1..267: mol_type = other DNA
atggccctgagcagcgcctggagaagcgtgctgcccctgtggctgctgtggagcgccgcctgcagcagagccgccagcggcgacgacaacgccttccccttcgacatcgagggcagcagcgccgtgggcagacaggacccccccgagaccagcgagcccagagtggccctgggcagactgccccccgccgccgagaagtgcaacgccggcttcttccacaccctgagcggcgagtgcgtgccctgcgactgcaacggcaacagctag

SEQ ID NO: 86492 - DNA, 363 bp, synthetic construct
  misc_feature 1..363: note = Description of Artificial Sequence: Synthetic coding sequence
  source 1..363: mol_type = other DNA
atggccctgagcagcgcctggagaagcgtgctgcccctgtggctgctgtggagcgccgcctgcagcagagccgccagcggcgacgacaacgccttccccttcgacatcgagggcagcagcgccgtgggcagacaggacccccccgagaccagcgagcccagagtggccctgggcagactgccccccgccgccgaggtgcagtgcccctgccactgccaccccgccggcgcccccgccccccccagagccgtgccccacagcagcttcagcctgagcccccccctgagcagcccccagtgcctggagagcttcacctgggccagaagcgtgagaaagctggagatcaagagcttccccctgtag

SEQ ID NO: 86493 - DNA, 549 bp, synthetic construct
  misc_feature 1..549: note = Description of Artificial Sequence: Synthetic coding sequence
  source 1..549: mol_type = other DNA
atggccctgagcagcgcctggagaagcgtgctgcccctgtggctgctgtggagcgccgcctgcagcagagccgccagcggcgacgacaacgccttccccttcgacatcgagggcagcagcgccgtgggcagacaggacccccccgagaccagcgagcccagagtggccctgggcagactgccccccgccgccgagaagtgcaacgccggcttcttccacaccctgagcggcgagtgcgtgccctgcgactgcaacggcaacagcaacgagtgcctggacggcagcggctactgcgtgcactgccagagaaacaccaccggcgagcactgcgagaagtgcctggacggctacatcggcgacagcatcagaggcgccccccagttctgccagccctgcccctgccccctgccccacctggccaacttcgccgagagctgctacagaaagaacggcgccgtgagatgcatctgcaacgagaactacgccggccccaactgcgagagacccagcccccagagcaccagaggcttccccctgaacgacagctag

SEQ ID NO: 86494 - DNA, 537 bp, synthetic construct
  misc_feature 1..537: note = Description of Artificial Sequence: Synthetic coding sequence
  source 1..537: mol_type = other DNA
tgaatcttcgaggactgcgacgaggtgaccggccagtgcagaaactgcctgagaaacaccaccggcttcaagtgcgagagatgcgcccccggctactacggcgacgccagaatcgccaagaactgcgccgtgtgcaactgcggcggcggcccctgcgacagcgtgaccggcgagtgcctggaggagggcttcgagccccccaccggcatggactgccccaccatcagctgcgacaagtgcgtgtgggacctgaccgacgccctgagactggccgccctgagcatcgaggagggcaagagcggcgtgctgagcgtgagcagcggcgccgccgcccacagacacgtgaacgagatcaacgccaccatctacctgctgaagaccaagctgagcgagagagagaaccagtacgccctgagaaagatccagatcaacaacgccgagaacaccatgaagagcctgctgagcgacgtggaggagctggtggagaagcactggaacaagcccagaagaagactggagctgcaggagggcgtgtag

SEQ ID NO: 86495 - DNA, 5451 bp, synthetic construct
  misc_feature 1..5451: note = Description of Artificial Sequence: Synthetic coding sequence
  source 1..5451: mol_type = other DNA
atggccctgagcagcgcctggagaagcgtgctgcccctgtggctgctgtggagcgccgcctgcagcagagccgccagcggcgacgacaacgccttccccttcgacatcgagggcagcagcgccgtgggcagacaggacccccccgagaccagcgagcccagagtggccctgggcagactgccccccgccgccgagaagtgcaacgccggcttcttccacaccctgagcggcgagtgcgtgccctgcgactgcaacggcaacagcaacgagtgcctggacggcagcggctactgcgtgcactgccagagaaacaccaccggcgagcactgcgagaagtgcctggacggctacatcggcgacagcatcagaggcgccccccagttctgccagccctgcccctgccccctgccccacctggccaacttcgccgagagctgctacagaaagaacggcgccgtgagatgcatctgcaacgagaactacgccggccccaactgcgagagatgcgcccccggctactacggcaaccccctgctgatcggcagcacctgcaagaagtgcgactgcagcggcaacagcgaccccaacctgatcttcgaggactgcgacgaggtgaccggccagtgcagaaactgcctgagaaacaccaccggcttcaagtgcgagagatgcgcccccggctactacggcgacgccagaatcgccaagaactgcgccgtgtgcaactgcggcggcggcccctgcgacagcgtgaccggcgagtgcctggaggagggcttcgagccccccaccggctgcgacaagtgcgtgtgggacctgaccgacgccctgagactggccgccctgagcatcgaggagggcaagagcggcgtgctgagcgtgagcagcggcgccgccgcccacagacacgtgaacgagatcaacgccaccatctacctgctgaagaccaagctgagcgagagagagaaccagtacgccctgagaaagatccagatcaacaacgccgagaacaccatgaagagcctgctgagcgacgtggaggagctggtggagaaggagaaccaggccagcagaaagggccagctggtgcagaaggagagcatggacaccatcaaccacgccagccagctggtggagcaggcccacgacatgagagacaagatccaggagatcaacaacaagatgctgtactacggcgaggagcacgagctgagccccaaggagatcagcgagaagctggtgctggcccagaagatgctggaggagatcagaagcagacagcccttcttcacccagagagagctggtggacgaggaggccgacgaggcctacgagctgctgagccaggccgagagctggcagagactgcacaacgagaccagaaccctgttccccgtggtgctggagcagctggacgactacaacgccaagctgagcgacctgcaggaggccctggaccaggccctgaactacgtgagagacgccgaggacatgaacagagccaccgccgccagacagagagaccacgagaagcagcaggagagagtgagagagcagatggaggtggtgaacatgagcctgagcaccagcgccgacagcctgaccacccccagactgaccctgagcgagctggacgacatcatcaagaacgccagcggcatctacgccgagatcgacggcgccaagagcgagctgcaggtgaagctgagcaacctgagcaacctgagccacgacctggtgcaggaggccatcgaccacgcccaggacctgcagcaggaggccaacgagctgagcagaaagctgcacagcagcgacatgaacggcctggtgcagaaggccctggacgccagcaacgtgtacgagaacatcgtgaactacgtgagcgaggccaacgagaccgccgagttcgccctgaacaccaccgacagaatctacgacgccgtgagcggcatcgacacccagatcatctaccacaaggacgagagcgagaacctgctgaaccaggccagagagctgcaggccaaggccgagagcagcagcgacgaggccgtggccgacaccagcagaagagtgggcggcgccctggccagaaagagcgccctgaagaccagactgagcgacgccgtgaagcagctgcaggccgccgagagaggcgacgcccagcagagactgggccagagcagactgatcaccgaggaggccaacagaaccaccatggaggtgcagcaggccaccgcccccatggccaacaacctgaccaactggagccagaacctgcagcacttcgacagcagcgcctacaacaccgccgtgaacagcgccagagacgccgtgagaaacctgaccgaggtggtgccccagctgctggaccagctgagaaccgtggagcagaagagacccgccagcaacgtgagcgccagcatccagagaatcagagagctgatcgcccagaccagaagcgtggccagcaagatccaggtgagcatgatgttcgacggccagagcgccgtggaggtgcacagcagaaccagcatggacgacctgaaggccttcaccagcctgagcctgtacatgaagccccccgtgaagagacccgagctgaccgagaccgccgaccagttcatcctgtacctgggcagcaagaacgccaagaaggagtacatgggcctggccatcaagaacgacaacctggtgtacgtgtacaacctgggcaccaaggacgtggagatccccctggacagcaagcccgtgagcagctggcccgcctacttcagcatcgtgaagatcgagagagtgggcaagcacggcaaggtgttcctgaccgtgcccagcctgagcagcaccgccgaggagaagttcatcaagaagggcgagttcagcggcgacgacagcctgctggacctggaccccgaggacaccgtgttctacgtgggcggcgtgcccagcaacttcaagctgcccaccagcctgaacctgcccggcttcgtgggctgcctggagctggccaccctgaacaacgacgtgatcagcctgtacaacttcaagcacatctacaacatggaccccagcaccagcgtgccctgcgccagagacaagctggccttcacccagagcagagccgccagctacttcttcgacggcagcggctacgccgtggtgagagacatcaccagaagaggcaagttcggccaggtgaccagattcgacatcgaggtgagaacccccgccgacaacggcctgatcctgctgatggtgaacggcagcatgttcttcagactggagatgagaaacggctacctgcacgtgttctacgacttcggcttcagcggcggccccgtgcacctggaggacaccctgaagaaggcccagatcaacgacgccaagtaccacgagatcagcatcatctaccacaacgacaagaagatgatcctggtggtggacagaagacacgtgaagagcatggacaacgagaagatgaagatccccttcaccgacatctacatcggcggcgccccccccgagatcctgcagagcagagccctgagagcccacctgcccctggacatcaacttcagaggctgcatgaagggcttccagttccagaagaaggacttcaacctgctggagcagaccgagaccctgggcgtgggctacggctgccccgaggacagcctgatcagcagaagagcctacttcaacggccagagcttcatcgccagcatccagaagatcagcttcttcgacggcttcgagggcggcttcaacttcagaaccctgcagcccaacggcctgctgttctactacgccagcggcagcgacgtgttcagcatcagcctggacaacggcaccgtgatcatggacgtgaagggcatcaaggtgcagagcgtggacaagcagtacaacgacggcctgagccacttcgtgatcagcagcgtgagccccaccagatacgagctgatcgtggacaagagcagagtgggcagcaagaaccccaccaagggcaagatcgagcagacccaggccagcgagaagaagttctacttcggcggcagccccatcagcgcccagtacgccaacttcaccggctgcatcagcaacgcctacttcaccagagtggacagagacgtggaggtggaggacttccagagatacaccgagaaggtgcacaccagcctgtacgagtgccccatcgagagcagccccctgttcctgctgcacaagaagggcaagaacctgagcaagcccaaggccagccagaacaagaagggcggcaagagcaaggacgcccccagctgggaccccgtggccctgaagctgcccgagagaaacacccccagaaacagccactgccacctgagcaacagccccagagccatcgagcacgcctaccagtacggcggcaccgccaacagcagacaggagttcgagcacctgaagggcgacttcggcgccaagagccagttcagcatcagactgagaaccagaagcagccacggcatgatcttctacgtgagcgaccaggaggagaacgacttcatgaccctgttcctggcccacggcagactggtgtacatgttcaacgtgggccacaagaagctgaagatcagaagccaggagaagtacaacgacggcctgtggcacgacgtgatcttcatcagagagagaagcagcggcagactggtgatcgacggcctgagagtgctggaggagagcctgccccccaccgaggccacctggaagatcaagggccccatctacctgggcggcgtggcccccggcaaggccgtgaagaacgtgcagatcaacagcatctacagcttcagcggctgcctgagcaacctgcagctgaacggcgccagcatcaccagcgccagccagaccttcagcgtgaccccctgcttcgagggccccatggagaccggcacctacttcagcaccgagggcggctacgtggtgctggacgagagcttcaacatcggcctgaagttcgagatcgccttcgaggtgagacccagaagcagcagcggcaccctggtgcacggccacagcgtgaacggcgagtacctgaacgtgcacatgaagaacggccaggtgatcgtgaaggtgaacaacggcatcagagacttcagcaccagcgtgacccccaagcagagcctgtgcgacggcagatggcacagaatcaccgtgatcagagacagcaacgtggtgcagctggacgtggacagcgaggtgaaccacgtggtgggccccctgaaccccaagcccatcgaccacagagagcccgtgttcgtgggcggcgtgcccgagagcctgctgacccccagactggcccccagcaagcccttcaccggctgcatcagacacttcgtgatcgacggccaccccgtgagcttcagcaaggccgccctggtgagcggcgccgtgagcatcaacagctgccccgccgcctag

SEQ ID NO: 86496 - DNA, 5451 bp, synthetic construct; identical to SEQ ID NO: 86495
  misc_feature 1..5451: note = Description of Artificial Sequence: Synthetic coding sequence
  source 1..5451: mol_type = other DNA

SEQ ID NO: 86497 - DNA, 390 bp, synthetic construct
  misc_feature 1..390: note = Description of Artificial Sequence: Synthetic coding sequence
  source 1..390: mol_type = other DNA
atggccctgagcagcgcctggagaagcgtgctgcccctgtggctgctgtggagcgccgcctgcagcagagccgccagcggcgacgacaacgccttccccttcgacatcgagggcagcagcgccgtgggcagacaggacccccccgagaccagcgagcccagagtggccctgggcagactgccccccgccgccgagaagtgcaacgccggcttcttccacaccctgagcggcgagtgcgtgccctgcgactgcaacggcaacagcaacgagtgcctggacggcagcggctactgcgtgaccaccgacggcgaggaccccggcttcagcgccagcgccctgagcttcatcctgagcagccagggcgccagagaggccagagcccccacctag

SEQ ID NO: 86498 - DNA, 363 bp, synthetic construct; identical to SEQ ID NO: 86492
  misc_feature 1..363: note = Description of Artificial Sequence: Synthetic coding sequence
  source 1..363: mol_type = other DNA

SEQ ID NO: 86499 - DNA, 1125 bp, synthetic construct
  misc_feature 1..1125: note = Description of Artificial Sequence: Synthetic coding sequence
  source 1..1125: mol_type = other DNA
atggccctgagcagcgcctggagaagcgtgctgcccctgtggctgctgtggagcgccgcctgcagcagagccgccagcggcgacgacaacgccttccccttcgacatcgagggcagcagcgccgtgggcagacaggacccccccgagaccagcgagcccagagtggccctgggcagactgccccccgccgccgagaagtgcaacgccggcttcttccacaccctgagcggcgagtgcgtgccctgcgactgcaacggcaacagcaacgagtgcctggacggcagcggctactgcgtgcactgccagagaaacaccaccggcgagcactgcgagaagtgcctggacggctacatcggcgacagcatcagaggcgccccccagttctgccagccctgcccctgccccctgccccacctggccaacttcgccgagagctgctacagaaagaacggcgccgtgagatgcatctgcaacgagaactacgccggccccaactgcgagagatgcgcccccggctactacggcaaccccctgctgatcggcagcacctgcaagaagtgcgactgcagcggcaacagcgaccccaacctgatcttcgaggactgcgacgaggtgaccggccagtgcagaaactgcctgagaaacaccaccggcttcaagtgcgagagatgcgcccccggctactacggcgacgccagaatcgccaagaactgcgccgtgtgcaactgcggcggcggcccctgcgacagcgtgaccggcgagtgcctggaggagggcttcgagccccccaccggcatggactgccccaccatcagctgcgacaagtgcgtgtgggacctgaccgacgccctgagactggccgccctgagcatcgaggagggcaagagcggcgtgctgagcgtgagcagcggcgccgccgcccacagacacgtgaacgagatcaacgccaccatctacctgctgaagaccaagctgagcgagagagagaaccagtacgccctgagaaagatccagatcaacaacgccgagaacaccatgaagagcctgctgagcgacgtggaggagctggtggagaagcactggaacaagcccagaagaagactggagctgcaggagggcgtgtag

SEQ ID NO: 86500 - DNA, 363 bp, synthetic construct; identical to SEQ ID NO: 86492
  misc_feature 1..363: note = Description of Artificial Sequence: Synthetic coding sequence
  source 1..363: mol_type = other DNA

SEQ ID NO: 86501 - DNA, 324 bp, synthetic construct
  misc_feature 1..324: note = Description of Artificial Sequence: Synthetic coding sequence
  source 1..324: mol_type = other DNA
atggccctgagcagcgcctggagaagcgtgctgcccctgtggctgctgtggagcgccgcctgcagcagagccgccagcggcgacgacaacgccttccccttcgacatcgagggcagcagcgccgtgggcagacaggacccccccgagaccagcgagcccagagtggccctgggcagactgccccccgccgccgagaagtgcaacgccggcttcttccacaccctgagcggcgagtgcgtgccctgcgactgcaacggcaacagcaacgagtgcctggacggcagcggctactgcgtgcactgccagagaaacaccaccggctag

SEQ ID NO: 86502 - DNA, 996 bp, synthetic construct
  misc_feature 1..996: note = Description of Artificial Sequence: Synthetic coding sequence
  source 1..996: mol_type = other DNA
atggccctgagcagcgcctggagaagcgtgctgcccctgtggctgctgtggagcgccgcctgcagcagagccgccagcggcgacgacaacgccttccccttcgacatcgagggcagcagcgccgtgggcagacaggacccccccgagaccagcgagcccagagtggccctgggcagactgccccccgccgccgagaagtgcaacgccggcttcttccacaccctgagcggcgagtgcgtgccctgcgactgcaacggcaacagcaacgagtgcctggacggcagcggctactgcgtgcactgccagagaaacaccaccggcgagcactgcgagaagtgcctggacggctacatcggcgacagcatcagaggcgccccccagttctgccagccctgcccctgccccctgccccacctggccaacttcgccgagagctgctacagaaagaacggcgccgtgagatgcatctgcaacgagaactacgccggccccaactgcgagagatgcgcccccggctactacggcaaccccctgctgatcggcagcacctgcaagaagtgcgactgcagcggcaacagcgaccccaacctgatcttcgaggactgcgacgaggtgaccggccagtgcagaaactgcctgagaaacaccaccggcttcaagtgcgagagatgcgcccccggctactacggcgacgccagaatcgccaagaactgcgccgtgtgcaactgcggcggcggcccctgcgacagcgtgaccggcgagtgcctggaggagggcttcgagccccccaccggcatggactgccccaccatcagctgcgacaagtgcgtgtgggacctgaccgacgccctgagactggccgccctgagcatcgaggagggcaagagcggcgtgctgagcgtgagcagcggcgccgccgcccacagacacgtgaacgagatcaacgccaccatctacctgctgaagaccaagctgagcgagagagagaaccagtag

SEQ ID NO: 86503 - DNA, 246 bp, synthetic construct
  misc_feature 1..246: note = Description of Artificial Sequence: Synthetic coding sequence
  source 1..246: mol_type = other DNA
atggccctgagcagcgcctggagaagcgtgctgcccctgtggctgctgtggagcgccgcctgcagcagagccgccagcggcgacgacaacgccttccccttcgacatcgagggcagcagcgccgtgggcagacaggacccccccgagaccagcgagcccagagtggccctgggcagactgccccccgccgccgagaagtgcaacgccggcttcttccacaccctgagcggcgagtgcgtgccctag

SEQ ID NO: 86504 - DNA, 5451 bp, synthetic construct; identical to SEQ ID NO: 86495
  misc_feature 1..5451: note = Description of Artificial Sequence: Synthetic coding sequence
  source 1..5451: mol_type = other DNA

SEQ ID NO: 86505 - DNA, 975 bp, synthetic construct
  misc_feature 1..975: note = Description of Artificial Sequence: Synthetic coding sequence
  source 1..975: mol_type = other DNA
atggccctgagcagcgcctggagaagcgtgctgcccctgtggctgctgtggagcgccgcctgcagcagagccgccagcggcgacgacaacgccttccccttcgacatcgagggcagcagcgccgtgggcagacaggacccccccgagaccagcgagcccagagtggccctgggcagactgccccccgccgccgagaagtgcaacgccggcttcttccacaccctgagcggcgagtgcgtgccctgcgactgcaacggcaacagcaacgagtgcctggacggcagcggctactgcgtgcactgccagagaaacaccaccggcgagcactgcgagaagtgcctggacggctacatcggcgacagcatcagaggcgccccccagttctgccagccctgcccctgccccctgccccacctggccaacttcgccgagagctgctacagaaagaacggcgccgtgagatgcatctgcaacgagaactacgccggccccaactgcgagagatgcgcccccggctactacggcaaccccctgctgatcggcagcacctgcaagaagtgcgactgcagcggcaacagcgaccccaacctgatcttcgaggactgcgacgaggtgaccggccagtgcagaaactgcctgagaaacaccaccggcttcaagtgcgagagatgcgcccccggctactacggcgacgccagaatcgccaagaactgcgccgtgtgcaactgcggcggcggcccctgcgacagcgtgaccggcgagtgcctggaggagggcttcgagccccccaccggctgcgacaagtgcgtgtgggacctgaccgacgccctgagactggccgccctgagcatcgaggagggcaagagcggcgtgctgagcgtgagcagcggcgccgccgcccacagacacgtgaacgagatcaacgccaccatctacctgctgaagaagaccaagcagaagaacaacaagaagtag

SEQ ID NO: 86506 - DNA, 11088 bp, synthetic construct
  misc_feature 1..11088: note = Description of Artificial Sequence: Synthetic coding sequence
  source 1..11088: mol_type = other DNA
atggccaagagactgtgcgccggcagcgccctgtgcgtgagaggccccagaggccccgcccccctgctgctggtgggcctggccctgctgggcgccgccagagccagagaggaggccggcggcggcttcagcctgcaccccccctacttcaacctggccgagggcgccagaatcgccgccagcgccacctgcggcgaggaggcccccgccagaggcagccccagacccaccgaggacctgtactgcaagctggtgggcggccccgtggccggcggcgaccccaaccagaccatcagaggccagtactgcgacatctgcaccgccgccaacagcaacaaggcccaccccgccagcaacgccatcgacggcaccgagagatggtggcagagcccccccctgagcagaggcctggagtacaacgaggtgaacgtgaccctggacctgggccaggtgttccacgtggcctacgtgctgatcaagttcgccaacagccccagacccgacctgtgggtgctggagagaagcatggacttcggcagaacctaccagccctggcagttcttcgccagcagcaagagagactgcctggagagattcggcccccagaccctggagagaatcaccagagacgacgccgccatctgcaccaccgagtacagcagaatcgtgcccctggagaacggcgagatcgtggtgagcctggtgaacggcagacccggcgccatgaacttcagctacagccccctgctgagagagttcaccaaggccaccaacgtgagactgagattcctgagaaccaacaccctgctgggccacctgatgggcaaggccctgagagaccccaccgtgaccagaagatactactacagcatcaaggacatcagcatcggcggcagatgcgtgtgccacggccacgccgacgcctgcgacgccaaggaccccaccgaccccttcagactgcagtgcacctgccagcacaacacctgcggcggcacctgcgacagatgctgccccggcttcaaccagcagccctggaagcccgccaccgccaacagcgccaacgagtgccagagctgcaactgctacggccacgccaccgactgctactacgaccccgaggtggacagaagaagagccagccagagcctggacggcacctaccagggcggcggcgtgtgcatcgactgccagcaccacaccaccggcgtgaactgcgagagatgcctgcccggcttctacagaagccccaaccaccccctggacagcccccacgtgtgcagaagatgcaactgcgagagcgacttcaccgacggcacctgcgaggacctgaccggcagatgctactgcagacccaacttcagcggcgagagatgcgacgtgtgcgccgagggcttcaccggcttccccagctgctaccccacccccagcagcagcaacgacaccagagagcaggtgctgcccgccggccagatcgtgaactgcgactgcagcgccgccggcacccagggcaacgcctgcagaaaggaccccagagtgggcagatgcctgtgcaagcccaacttccagggcacccactgcgagctgtgcgcccccggcttctacggccccggctgccagccctgccagtgcagcagccccggcgtggccgacgacagatgcgaccccgacaccggccagtgcagatgcagagtgggcttcgagggcgccacctgcgacagatgcgcccccggctacttccacttccccctgtgccagctgtgcggctgcagccccgccggcaccctgcccgagggctgcgacgaggccggcagatgcctgtgccagcccgagttcgccggcccccactgcgacagatgcagacccggctaccacggcttccccaactgccaggcctgcacctgcgaccccagaggcgccctggaccagctgtgcggcgccggcggcctgtgcagatgcagacccggctacaccggcaccgcctgccaggagtgcagccccggcttccacggcttccccagctgcgtgccctgccactgcagcgccgagggcagcctgcacgccgcctgcgaccccagaagcggccagtgcagctgcagacccagagtgaccggcctgagatgcgacacctgcgtgcccggcgcctacaacttcccctactgcgaggccggcagctgccaccccgccggcctggcccccgtggaccccgccctgcccgaggcccaggtgccctgcatgtgcagagcccacgtggagggccccagctgcgacagatgcaagcccggcttctggggcctgagccccagcaaccccgagggctgcaccagatgcagctgcgacctgagaggcaccctgggcggcgtggccgagtgccagcccggcaccggccagtgcttctgcaagccccacgtgtgcggccaggcctgcgccagctgcaaggacggcttcttcggcctggaccaggccgactacttcggctgcagaagctgcagatgcgacatcggcggcgccctgggccagagctgcgagcccagaaccggcgtgtgcagatgcagacccaacacccagggccccacctgcagcgagcccgccagagaccactacctgcccgacctgcaccacctgagactggagctggaggaggccgccacccccgagggccacgccgtgagattcggcttcaaccccctggagttcgagaacttcagctggagaggctacgcccagatggcccccgtgcagcccagaatcgtggccagactgaacctgaccagccccgacctgttctggctggtgttcagatacgtgaacagaggcgccatgagcgtgagcggcagagtgagcgtgagagaggagggcagaagcgccacctgcgccaactgcaccgcccagagccagcccgtggccttcccccccagcaccgagcccgccttcatcaccgtgccccagagaggcttcggcgagcccttcgtgctgaaccccggcacctgggccctgagagtggaggccgagggcgtgctgctggactacgtggtgctgctgcccagcgcctactacgaggccgccctgctgcagctgagagtgaccgaggcctgcacctacagacccagcgcccagcagagcggcgacaactgcctgctgtacacccacctgcccctggacggcttccccagcgccgccggcctggaggccctgtgcagacaggacaacagcctgcccagaccctgccccaccgagcagctgagccccagccacccccccctgatcacctgcaccggcagcgacgtggacgtgcagctgcaggtggccgtgccccagcccggcagatacgccctggtggtggagtacgccaacgaggacgccagacaggaggtgggcgtggccgtgcacaccccccagagagccccccagcagggcctgctgagcctgcacccctgcctgtacagcaccctgtgcagaggcaccgccagagacacccaggaccacctggccgtgttccacctggacagcgaggccagcgtgagactgaccgccgagcaggccagattcttcctgcacggcgtgaccctggtgcccatcgaggagttcagccccgagttcgtggagcccagagtgagctgcatcagcagccacggcgccttcggccccaacagcgccgcctgcctgcccagcagattccccaagcccccccagcccatcatcctgagagactgccaggtgatccccctgccccccggcctgcccctgacccacgcccaggacctgacccccgccatgagccccgccggccccagacccagaccccccaccgccgtggaccccgacgccgagcccaccctgctgagagagccccaggccaccgtggtgttcaccacccacgtgcccaccctgggcagatacgccttcctgctgcacggctaccagcccgcccaccccaccttccccgtggaggtgctgatcaacgccggcagagtgtggcagggccacgccaacgccagcttctgcccccacggctacggctgcagaaccctggtggtgtgcgagggccaggccctgctggacgtgacccacagcgagctgaccgtgaccgtgagagtgcccaagggcagatggctgtggctggactacgtgctggtggtgcccgagaacgtgtacagcttcggctacctgagagaggagcccctggacaagagctacgacttcatcagccactgcgccgcccagggctaccacatcagccccagcagcagcagcctgttctgcagaaacgccgccgccagcctgagcctgttctacaacaacggcgccagaccctgcggctgccacgaggtgggcgccaccggccccacctgcgagcccttcggcggccagtgcccctgccacgcccacgtgatcggcagagactgcagcagatgcgccaccggctactggggcttccccaactgcagaccctgcgactgcggcgccagactgtgcgacgagctgaccggccagtgcatctgcccccccagaaccatcccccccgactgcctgctgtgccagccccagaccttcggctgccaccccctggtgggctgcgaggagtgcaactgcagcggccccggcatccaggagctgaccgaccccacctgcgacaccgacagcggccagtgcaagtgcagacccaacgtgaccggcagaagatgcgacacctgcagccccggcttccacggctaccccagatgcagaccctgcgactgccacgaggccggcaccgcccccggcgtgtgcgaccccctgaccggccagtgctactgcaaggagaacgtgcagggccccaagtgcgaccagtgcagcctgggcaccttcagcctggacgccgccaaccccaagggctgcaccagatgcttctgcttcggcgccaccgagagatgcagaagcagcagctacaccagacaggagttcgtggacatggagggctgggtgctgctgagcaccgacagacaggtggtgccccacgagagacagcccggcaccgagatgctgagagccgacctgagacacgtgcccgaggccgtgcccgaggccttccccgagctgtactggcaggccccccccagctacctgggcgacagagtgagcagctacggcggcaccctgagatacgagctgcacagcgagacccagagaggcgacgtgttcgtgcccatggagagcagacccgacgtggtgctgcagggcaaccagatgagcatcaccttcctggagcccgcctaccccacccccggccacgtgcacagaggccagctgcagctggtggagggcaacttcagacacaccgagaccagaaacaccgtgagcagagaggagctgatgatggtgctggccagcctggagcagctgcagatcagagccctgttcagccagatcagcagcgccgtgttcctgagaagagtggccctggaggtggccagccccgccggccagggcgccctggccagcaacgtggagctgtgcctgtgccccgccagctacagaggcgacagctgccaggagtgcgcccccggcttctacagagacgtgaagggcctgttcctgggcagatgcgtgccctgccagtgccacggccacagcgacagatgcctgcccggcagcggcgtgtgcgtggactgccagcacaacaccgagggcgcccactgcgagagatgccaggccggcttcgtgagcagcagagacgaccccagcgccccctgcgtgagctgcccctgccccctgagcgtgcccagcaacaacttcgccgagggctgcgtgctgagaggcggcagaacccagtgcctgtgcaagcccggctacgccggcgccagctgcgagagatgcgcccccggcttcttcggcaaccccctggtgctgggcagcagctgccagccctgcgactgcagcggcaacggcgaccccaacctgctgttcagcgactgcgaccccctgaccggcgcctgcagaggctgcctgagacacaccaccggccccagatgcgagatctgcgcccccggcttctacggcaacgccctgctgcccggcaactgcaccagatgcgactgcaccccctgcggcaccgaggcctgcgacccccacagcggccactgcctgtgcaaggccggcgtgaccggcagaagatgcgacagatgccaggagggccacttcggcttcgacggctgcggcggctgcagaccctgcgcctgcggccccgccgccgagggcagcgagtgccacccccagagcggccagtgccactgcagacccggcaccatgggcccccagtgcagagagtgcgcccccggctactggggcctgcccgagcagggctgcagaagatgccagtgccccggcggcagatgcgacccccacaccggcagatgcaactgcccccccggcctgagcggcgagagatgcgacacctgcagccagcagcaccaggtgcccgtgcccggcggccccgtgggccacagcatccactgcgaggtgtgcgaccactgcgtggtgctgctgctggacgacctggagagagccggcgccctgctgcccgccatccacgagcagctgagaggcatcaacgccagcagcatggcctgggccagactgcacagactgaacgccagcatcgccgacctgcagagccagctgagaagccccctgggccccagacacgagaccgcccagcagctggaggtgctggagcagcagagcaccagcctgggccaggacgccagaagactgggcggccaggccgtgggcaccagagaccaggccagccagctgctggccggcaccgaggccaccctgggccacgccaagaccctgctggccgccatcagagccgtggacagaaccctgagcgagctgatgagccagaccggccacctgggcctggccaacgccagcgcccccagcggcgagcagctgctgagaaccctggccgaggtggagagactgctgtgggagatgagagccagagacctgggcgccccccaggccgccgccgaggccgagctggccgccgcccagagactgctggccagagtgcaggagcagctgagcagcctgtgggaggagaaccaggccctggccacccagaccagagacagactggcccagcacgaggccggcctgatggacctgagagaggccctgaacagagccgtggacgccaccagagaggcccaggagctgaacagcagaaaccaggagagactggaggaggccctgcagagaaagcaggagctgagcagagacaacgccaccctgcaggccaccctgcacgccgccagagacaccctggccagcgtgttcagactgctgcacagcctggaccaggccaaggaggagctggagagactggccgccagcctggacggcgccagaacccccctgctgcagagaatgcagaccttcagccccgccggcagcaagctgagactggtggaggccgccgaggcccacgcccagcagctgggccagctggccctgaacctgagcagcatcatcctggacgtgaaccaggacagactgacccagagagccatcgaggccagcaacgcctacagcagaatcctgcaggccgtgcaggccgccgaggacgccgccggccaggccctgcagcaggccgaccacacctgggccaccgtggtgagacagggcctggtggacagagcccagcagctgctggccaacagcaccgccctggaggaggccatgctgcaggagcagcagagactgggcctggtgtgggccgccctgcagggcgccagaacccagctgagagacgtgagagccaagaaggaccagctggaggcccacatccaggccgcccaggccatgctggccatggacaccgacgagaccagcaagaagatcgcccacgccaaggccgtggccgccgaggcccaggacaccgccaccagagtgcagagccagctgcaggccatgcaggagaacgtggagagatggcagggccagtacgagggcctgagaggccaggacctgggccaggccgtgctggacgccggccacagcgtgagcaccctggagaagaccctgccccagctgctggccaagctgagcatcctggagaacagaggcgtgcacaacgccagcctggccctgagcgccagcatcggcagagtgagagagctgatcgcccaggccagaggcgccgccagcaaggtgaaggtgcccatgaagttcaacggcagaagcggcgtgcagctgagaacccccagagacctggccgacctggccgcctacaccgccctgaagttctacctgcagggccccgagcccgagcccggccagggcaccgaggacagattcgtgatgtacatgggcagcagacaggccaccggcgactacatgggcgtgagcctgagagacaagaaggtgcactgggtgtaccagctgggcgaggccggccccgccgtgctgagcatcgacgaggacatcggcgagcagttcgccgccgtgagcctggacagaaccctgcagttcggccacatgagcgtgaccgtggagagacagatgatccaggagaccaagggcgacaccgtggcccccggcgccgagggcctgctgaacctgagacccgacgacttcgtgttctacgtgggcggctaccccagcaccttcacccccccccccctgctgagattccccggctacagaggctgcatcgagatggacaccctgaacgaggaggtggtgagcctgtacaacttcgagagaaccttccagctggacaccgccgtggacagaccctgcgccagaagcaagagcaccggcgacccctggctgaccgacggcagctacctggacggcaccggcttcgccagaatcagcttcgacagccagatcagcaccaccaagagattcgagcaggagctgagactggtgagctacagcggcgtgctgttcttcctgaagcagcagagccagttcctgtgcctggccgtgcaggagggcagcctggtgctgctgtacgacttcggcgccggcctgaagaaggccgtgcccctgcagccccccccccccctgaccagcgccagcaaggccatccaggtgttcctgctgggcggcagcagaaagagagtgctggtgagagtggagagagccaccgtgtacagcgtggagcaggacaacgacctggagctggccgacgcctactacctgggcggcgtgccccccgaccagctgccccccagcctgagaagactgttccccaccggcggcagcgtgagaggctgcgtgaagggcatcaaggccctgggcaagtacgtggacctgaagagactgaacaccaccggcgtgagcgccggctgcaccgccgacctgctggtgggcagagccatgaccttccacggccacggcttcctgagactggccctgagcaacgtggcccccctgaccggcaacgtgtacagcggcttcggcttccacagcgcccaggacagcgccctgctgtactacagagccagccccgacggcctgtgccaggtgagcctgcagcagggcagagtgagcctgcagctgctgagaaccgaggtgaagacccaggccggcttcgccgacggcgccccccactacgtggccttctacagcaacgccaccggcgtgtggctgtacgtggacgaccagctgcagcagatgaagccccacagaggccccccccccgagctgcagccccagcccgagggcccccccagactgctgctgggcggcctgcccgagagcggcaccatctacaacttcagcggctgcatcagcaacgtgttcgtgcagagactgctgggcccccagagagtgttcgacctgcagcagaacctgggcagcgtgaacgtgagcaccggctgcgcccccgccctgcaggcccagacccccggcctgggccccagaggcctgcaggccaccgccagaaaggccagcagaagaagcagacagcccgccagacaccccgcctgcatgctgcccccccacctgagaaccaccagagacagctaccagttcggcggcagcctgagcagccacctggagttcgtgggcatcctggccagacacagaaactggcccagcctgagcatgcacgtgctgcccagaagcagcagaggcctgctgctgttcaccgccagactgagacccggcagccccagcctggccctgttcctgagcaacggccacttcgtggcccagatggagggcctgggcaccagactgagagcccagagcagacagagaagcagacccggcagatggcacaaggtgagcgtgagatgggagaagaacagaatcctgctggtgaccgacggcgccagagcctggagccaggagggcccccacagacagcaccagggcgccgagcacccccagccccacaccctgttcgtgggcggcctgcccgccagcagccacagcagcaagctgcccgtgaccgtgggcttcagcggctgcgtgaagagactgagactgcacggcagacccctgggcgcccccaccagaatggccggcgtgaccccctgcatcctgggccccctggaggccggcctgttcttccccggcagcggcggcgtgatcaccctggacctgcccggcgccaccctgcccgacgtgggcctggagctggaggtgagacccctggccgtgaccggcctgatcttccacctgggccaggccagaacccccccctacctgcagctgcaggtgaccgagaagcaggtgctgctgagagccgacgacggcgccggcgagttcagcaccagcgtgaccagacccagcgtgctgtgcgacggccagtggcacagactggccgtgatgaagagcggcaacgtgctgagactggaggtggacgcccagagcaaccacaccgtgggccccctgctggccgccgccgccggcgcccccgcccccctgtacctgggcggcctgcccgagcccatggccgtgcagccctggccccccgcctactgcggctgcatgagaagactggccgtgaacagaagccccgtggccatgaccagaagcgtggaggtgcacggcgccgtgggcgccagcggctgccccgccgcctag

SEQ ID NO: 86507 - DNA, 1503 bp, synthetic construct
  misc_feature 1..1503: note = Description of Artificial Sequence: Synthetic coding sequence
  source 1..1503: mol_type = other DNA
atggccaagagactgtgcgccggcagcgccctgtgcgtgagaggccccagaggccccgcccccctgctgctggtgggcctggccctgctgggcgccgccagagccagagaggaggccggcggcggcttcagcctgcaccccccctacttcaacctggccgagggcgccagaatcgccgccagcgccacctgcggcgaggaggcccccgccagaggcagccccagacccaccgaggacctgtactgcaagctggtgggcggccccgtggccggcggcgaccccaaccagaccatcagaggccagtactgcgacatctgcaccgccgccaacagcaacaaggcccaccccgccagcaacgccatcgacggcaccgagagatggtggcagagcccccccctgagcagaggcctggagtacaacgaggtgaacgtgaccctggacctgggccaggtgttccacgtggcctacgtgctgatcaagttcgccaacagccccagacccgacctgtgggtgctggagagaagcatggacttcggcagaacctaccagccctggcagttcttcgccagcagcaagagagactgcctggagagattcggcccccagaccctggagagaatcaccagagacgacgccgccatctgcaccaccgagtacagcagaatcgtgcccctggagaacggcgagatcgtggtgagcctggtgaacggcagacccggcgccatgaacttcagctacagccccctgctgagagagttcaccaaggccaccaacgtgagactgagattcctgagaaccaacaccctgctgggccacctgatgggcaaggccctgagagaccccaccgtgaccagaagatactactacagcatcaaggacatcagcatcggcggcagatgcgtgtgccacggccacgccgacgcctgcgacgccaaggaccccaccgaccccttcagactgcagtgcacctgccagcacaacacctgcggcggcacctgcgacagatgctgccccggcttcaaccagcagccctggaagcccgccaccgccaacagcgccaacgagtgccagagctgcaactgctacggccacgccaccgactgctactacgaccccgaggtggacagaagaagagccagccagagcctggacggcacctaccagggcggcggcgtgtgcatcgactgccagcaccacaccaccggcgtgaactgcgagagatgcctgcccggcttctacagaagccccaaccaccccctggacagcccccacgtgtgcagaagatgcaactgcgagagcgacttcaccgacggcacctgcgaggacctgaccggcagatgctactgcagacccaacttcagcggcgagagatgcgacgtgtgcgccgagggcttcaccggcttccccagctgctaccccacccccagcagcagcaacgacaccagagagcaggtgctgcccgccggccagatcgtgaccaacaccaagatcagctgggtgtag

SEQ ID NO: 86508 - DNA, 1587 bp, synthetic construct
  misc_feature 1..1587: note = Description of Artificial Sequence: Synthetic coding sequence
  source 1..1587: mol_type = other DNA
atggccaagagactgtgcgccggcagcgccctgtgcgtgagaggccccagaggccccgcccccctgctgctggtgggcctggccctgctgggcgccgccagagccagagaggaggccggcggcggcttcagcctgcaccccccctacttcaacctggccgagggcgccagaatcgccgccagcgccacctgcggcgaggaggcccccgccagaggcagccccagacccaccgaggacctgtactgcaagctggtgggcggccccgtggccggcggcgaccccaaccagaccatcagaggccagtactgcgacatctgcaccgccgccaacagcaacaaggcccaccccgccagcaacgccatcgacggcaccgagagatggtggcagagcccccccctgagcagaggcctggagtacaacgaggtgaacgtgaccctggacctgggccaggtgttccacgtggcctacgtgctgatcaagttcgccaacagccccagacccgacctgtgggtgctggagagaagcatggacttcggcagaacctaccagccctggcagttcttcgccagcagcaagagagactgcctggagagattcggcccccagaccctggagagaatcaccagagacgacgccgccatctgcaccaccgagtacagcagaatcgtgcccctggagaacggcgagatcgtggtgagcctggtgaacggcagacccggcgccatgaacttcagctacagccccctgctgagagagttcaccaaggccaccaacgtgagactgagattcctgagaaccaacaccctgctgggccacctgatgggcaaggccctgagagaccccaccgtgaccagaagatactactacagcatcaaggacatcagcatcggcggcagatgcgtgtgccacggccacgccgacgcctgcgacgccaaggaccccaccgaccccttcagactgcagtgcacctgccagcacaacacctgcggcggcacctgcgacagatgctgccccggcttcaaccagcagccctggaagcccgccaccgccaacagcgccaacgagtgccagagctgcaactgctacggccacgccaccgactgctactacgaccccgaggtggacagaagaagagccagccagagcctggacggcacctaccagggcggcggcgtgtgcatcgactgccagcaccacaccaccggcgtgaactgcgagagatgcctgcccggcttctacagaagccccaaccaccccctggacagcccccacgtgtgcagaagatgcaactgcgagagcgacttcaccgacggcacctgcgaggacctgaccggcagatgctactgcagacccaacttcagcggcgagagatgcgacgtgtgcgccgagggcttcaccggcttccccagctgctaccccacccccagcagcagcaacgacaccagagagcaggtgctgcccgccggccagatcgtgaacggcgtgagcctgtgcagacccggctggagcgccgtggccagaagcagactgaccagcaccagcgccagctgggtgcaggccatcctgctgccccagagccccgagtag

SEQ ID NO: 86509 - DNA, 2187 bp, synthetic construct
  misc_feature 1..2187: note = Description of Artificial Sequence: Synthetic coding sequence
  source 1..2187: mol_type = other DNA
atgtgggtgaccaagctgctgcccgccctgctgctgcagcacgtgctgctgcacctgctgctgctgcccatcgccatcccctacgccgagggccagagaaagagaagaaacaccatccacgagttcaagaagagcgccaagaccaccctgatcaagatcgaccccgccctgaagatcaagaccaagaaggtgaacaccgccgaccagtgcgccaacagatgcaccagaaacaagggcctgcccttcacctgcaaggccttcgtgttcgacaaggccagaaagcagtgcctgtggttccccttcaacagcatgagcagcggcgtgaagaaggagttcggccacgagttcgacctgtacgagaacaaggactacatcagaaactgcatcatcggcaagggcagaagctacaagggcaccgtgagcatcaccaagagcggcatcaagtgccagccctggagcagcatgatcccccacgagcacagcttcctgcccagcagctacagaggcaaggacctgcaggagaactactgcagaaaccccagaggcgaggagggcggcccctggtgcttcaccagcaaccccgaggtgagatacgaggtgtgcgacatcccccagtgcagcgaggtggagtgcatgacctgcaacggcgagagctacagaggcctgatggaccacaccgagagcggcaagatctgccagagatgggaccaccagaccccccacagacacaagttcctgcccgagagataccccgacaagggcttcgacgacaactactgcagaaaccccgacggccagcccagaccctggtgctacaccctggacccccacaccagatgggagtactgcgccatcaagacctgcgccgacaacaccatgaacgacaccgacgtgcccctggagaccaccgagtgcatccagggccagggcgagggctacagaggcaccgtgaacaccatctggaacggcatcccctgccagagatgggacagccagtacccccacgagcacgacatgacccccgagaacttcaagtgcaaggacctgagagagaactactgcagaaaccccgacggcagcgagagcccctggtgcttcaccaccgaccccaacatcagagtgggctactgcagccagatccccaactgcgacatgagccacggccaggactgctacagaggcaacggcaagaactacatgggcaacctgagccagaccagaagcggcctgacctgcagcatgtgggacaagaacatggaggacctgcacagacacatcttctgggagcccgacgccagcaagctgaacgagaactactgcagaaaccccgacgacgacgcccacggcccctggtgctacaccggcaaccccctgatcccctgggactactgccccatcagcagatgcgagggcgacaccacccccaccatcgtgaacctggaccaccccgtgatcagctgcgccaagaccaagcagctgagagtggtgaacggcatccccaccagaaccaacatcggctggatggtgagcctgagatacagaaacaagcacatctgcggcggcagcctgatcaaggagagctgggtgctgaccgccagacagtgcttccccagcagagacctgaaggactacgaggcctggctgggcatccacgacgtgcacggcagaggcgacgagaagtgcaagcaggtgctgaacgtgagccagctggtgtacggccccgagggcagcgacctggtgctgatgaagctggccagacccgccgtgctggacgacttcgtgagcaccatcgacctgcccaactacggctgcaccatccccgagaagaccagctgcagcgtgtacggctggggctacaccggcctgatcaactacgacggcctgctgagagtggcccacctgtacatcatgggcaacgagaagtgcagccagcaccacagaggcaaggtgaccctgaacgagagcgagatctgcgccggcgccgagaagatcggcagcggcccctgcgagggcgactacggcggccccctggtgtgcgagcagcacaagatgagaatggtgctgggcgtgatcgtgcccggcagaggctgcgccatccccaacagacccggcatcttcgtgagagtggcctactacgccaagtggatccacaagatcatcctgacctacaaggtgccccagagctag

SEQ ID NO: 86510 - DNA, 276 bp, synthetic construct
  misc_feature 1..276: note = Description of Artificial Sequence: Synthetic coding sequence
  source 1..276: mol_type = other DNA
atgggcctgctgcagctgctggccttcagcttcctggccctgtgcagagccagagtgagagcccaggagcccgagttcagctacggctgcgccgagggcagctgctaccccgccaccggcgacctgctgatcggcagagcccagaagctgagcgtgaccagcacctgcggcctgcacaagcccgagccctactgcatcgtgagccacctgcaggaggacaagaagtgcttcatctgcaacagccaggacccctaccacgagaccctgaacccctag

SEQ ID NO: 86511 - DNA, 2553 bp, synthetic construct
  misc_feature 1..2553: note = Description of Artificial Sequence: Synthetic coding sequence
  source 1..2553: mol_type = other DNA
atgggcctgctgcagctgctggccttcagcttcctggccctgtgcagagccagagtgagagcccaggagcccgagttcagctacggctgcgccgagggcagctgctaccccgccaccggcgacctgctgatcggcagagcccagaagctgagcgtgaccagcacctgcggcctgcacaagcccgagccctactgcatcgtgagccacctgcaggaggacaagaagtgcttcatctgcaacagccaggacccctaccacgagaccctgaaccccgacagccacctgatcgagaacgtggtgaccaccttcgcccccaacagactgaagatctggtggcagagcgagaacggcgtggagaacgtgaccatccagctggacctggaggccgagttccacttcacccacctgatcatgaccttcaagaccttcagacccgccgccatgctgatcgagagaagcagcgacttcggcaagacctggggcgtgtacagatacttcgcctacgactgcgaggccagcttccccggcatcagcaccggccccatgaagaaggtggacgacatcatctgcgacagcagatacagcgacatcgagcccagcaccgagggcgaggtgatcttcagagccctggaccccgccttcaagatcgaggacccctacagccccagaatccagaacctgctgaagatcaccaacctgagaatcaagttcgtgaagctgcacaccctgggcgacaacctgctggacagcagaatggagatcagagagaagtactactacgccgtgtacgacatggtggtgagaggcaactgcttctgctacggccacgccagcgagtgcgcccccgtggacggcttcaacgaggaggtggagggcatggtgcacggccactgcatgtgcagacacaacaccaagggcctgaactgcgagctgtgcatggacttctaccacgacctgccctggagacccgccgagggcagaaacagcaacgcctgcaagaagtgcaactgcaacgagcacagcatcagctgccacttcgacatggccgtgtacctggccaccggcaacgtgagcggcggcgtgtgcgacgactgccagcacaacaccatgggcagaaactgcgagcagtgcaagcccttctactaccagcaccccgagagagacatcagagaccccaacttctgcgagagatgcacctgcgaccccgccggcagccagaacgagggcatctgcgacagctacaccgacttcagcaccggcctgatcgccggccagtgcagatgcaagctgaacgtggagggcgagcactgcgacgtgtgcaaggagggcttctacgacctgagcagcgaggaccccttcggctgcaagagctgcgcctgcaaccccctgggcaccatccccggcggcaacccctgcgacagcgagaccggccactgctactgcaagagactggtgaccggccagcactgcgaccagtgcctgcccgagcactggggcctgagcaacgacctggacggctgcagaccctgcgactgcgacctgggcggcgccctgaacaacagctgcttcgccgagagcggccagtgcagctgcagaccccacatgatcggcagacagtgcaacgaggtggagcccggctactacttcgccaccctggaccactacctgtacgaggccgaggaggccaacctgggccccggcgtgagcatcgtggagagacagtacatccaggacagaatccccagctggaccggcgccggcttcgtgagagtgcccgagggcgcctacctggagttcttcatcgacaacatcccctacagcatggagtacgacatcctgatcagatacgagccccagctgcccgaccactgggagaaggccgtgatcaccgtgcagagacccggcagaatccccaccagcagcagatgcggcaacaccatccccgacgacgacaaccaggtggtgagcctgagccccggcagcagatacgtggtgctgcccagacccgtgtgcttcgagaagggcaccaactacaccgtgagactggagctgccccagtacaccagcagcgacagcgacgtggagagcccctacaccctgatcgacagcctggtgctgatgccctactgcaagagcctggacatcttcaccgtgggcggcagcggcgacggcgtggtgaccaacagcgcctgggagaccttccagagatacagatgcctggagaacagcagaagcgtggtgaagacccccatgaccgacgtgtgcagaaacatcatcttcagcatcagcgccctgctgcaccagaccggcctggcctgcgagtgcgacccccagggcagcctgagcagcgtgtgcgaccccaacggcggccagtgccagtgcagacccaacgtggtgggcagaacctgcaacagatgcgcccccggcaccttcggcttcggccccagcggctgcaagagaagattcctgaagagcatcgtgatgcacagcttcagactgacccagcccctgtggcagggcagcatcgccgccgagcccatgctgcccagctag

SEQ ID NO: 86512 - DNA, 5397 bp, synthetic construct
  misc_feature 1..5397: note = Description of Artificial Sequence: Synthetic coding sequence
  source 1..5397: mol_type = other DNA
atggagctgaccagcagagagagaggcagaggccagcccctgccctgggagctgagactgggcctgctgctgagcgtgctggccgccaccctggcccaggcccccgcccccgacgtgcccggctgcagcagaggcagctgctaccccgccaccggcgacctgctggtgggcagagccgacagactgaccgccagcagcacctgcggcctgaacggcccccagccctactgcatcgtgagccacctgcaggacgagaagaagtgcttcctgtgcgacagcagaagacccttcagcgccagagacaacccccacagccacagaatccagaacgtggtgaccagcttcgccccccagagaagagccgcctggtggcagagcgagaacggcatccccgccgtgaccatccagctggacctggaggccgagttccacttcacccacctgatcatgaccttcaagaccttcagacccgccgccatgctggtggagagaagcgccgacttcggcagaacctggcacgtgtacagatacttcagctacgactgcggcgccgacttccccggcgtgcccctggccccccccagacactgggacgacgtggtgtgcgagagcagatacagcgagatcgagcccagcaccgagggcgaggtgatctacagagtgctggaccccgccatccccatccccgacccctacagcagcagaatccagaacctgctgaagatcaccaacctgagagtgaacctgaccagactgcacaccctgggcgacaacctgctggaccccagaagagagatcagagagaagtactactacgccctgtacgagctggtggtgagaggcaactgcttctgctacggccacgccagcgagtgcgcccccgcccccggcgcccccgcccacgccgagggcatggtgcacggcgcctgcatctgcaagcacaacaccagaggcctgaactgcgagcagtgccaggacttctacagagacctgccctggagacccgccgaggacggccacagccacgcctgcagaaagtgcgagtgccacggccacacccacagctgccacttcgacatggccgtgtacctggccagcggcaacgtgagcggcggcgtgtgcgacggctgccagcacaacaccgccggcagacactgcgagctgtgcagacccttcttctacagagaccccaccaaggacctgagagaccccgccgtgtgcagaagctgcgactgcgaccccatgggcagccaggacggcggcagatgcgacagccacgacgaccccgccctgggcctggtgagcggccagtgcagatgcaaggagcacgtggtgggcaccagatgccagcagtgcagagacggcttcttcggcctgagcatcagcgacagactgggctgcagaagatgccagtgcaacgccagaggcaccgtgcccggcagcaccccctgcgaccccaacagcggcagctgctactgcaagagactggtgaccggcagaggctgcgacagatgcctgcccggccactggggcctgagccacgacctgctgggctgcagaccctgcgactgcgacgtgggcggcgccctggacccccagtgcgacgagggcaccggccagtgccactgcagacagcacatggtgggcagaagatgcgagcaggtgcagcccggctacttcagacccttcctggaccacctgatctgggaggccgaggacaccagaggccaggtgctggacgtggtggagagactggtgacccccggcgagacccccagctggaccggcagcggcttcgtgagactgcaggagggccagaccctggagttcctggtggccagcgtgcccaaggccatggactacgacctgctgctgagactggagccccaggtgcccgagcagtgggccgagctggagctgatcgtgcagagacccggccccgtgcccgcccacagcctgtgcggccacctggtgcccaaggacgacagaatccagggcaccctgcagccccacgccagatacctgatcttccccaaccccgtgtgcctggagcccggcatcagctacaagctgcacctgaagctggtgagaaccggcggcagcgcccagcccgagaccccctacagcggccccggcctgctgatcgacagcctggtgctgctgcccagagtgctggtgctggagatgttcagcggcggcgacgccgccgccctggagagacaggccaccttcgagagataccagtgccacgaggagggcctggtgcccagcaagaccagccccagcgaggcctgcgcccccctgctgatcagcctgagcaccctgatctacaacggcgccctgccctgccagtgcaacccccagggcagcctgagcagcgagtgcaacccccacggcggccagtgcctgtgcaagcccggcgtggtgggcagaagatgcgacctgtgcgcccccggctactacggcttcggccccaccggctgccaggcctgccagtgcagccacgagggcgccctgagcagcctgtgcgagaagaccagcggccagtgcctgtgcagaaccggcgccttcggcctgagatgcgacagatgccagagaggccagtggggcttccccagctgcagaccctgcgtgtgcaacggccacgccgacgagtgcaacacccacaccggcgcctgcctgggctgcagagaccacaccggcggcgagcactgcgagagatgcatcgccggcttccacggcgaccccagactgccctacggcggccagtgcagaccctgcccctgccccgagggccccggcagccagagacacttcgccaccagctgccaccaggacgagtacagccagcagatcgtgtgccactgcagagccggctacaccggcctgagatgcgaggcctgcgcccccggccacttcggcgaccccagcagacccggcggcagatgccagctgtgcgagtgcagcggcaacatcgaccccatggaccccgacgcctgcgacccccacaccggccagtgcctgagatgcctgcaccacaccgagggcccccactgcgcccactgcaagcccggcttccacggccaggccgccagacagagctgccacagatgcacctgcaacctgctgggcaccaacccccagcagtgccccagccccgaccagtgccactgcgaccccagcagcggccagtgcccctgcctgcccaacgtgcagggccccagctgcgacagatgcgcccccaacttctggaacctgaccagcggccacggctgccagccctgcgcctgccaccccagcagagccagaggccccacctgcaacgagttcaccggccagtgccactgcagagccggcttcggcggcagaacctgcagcgagtgccaggagctgcactggggcgaccccggcctgcagtgccacgcctgcgactgcgacagcagaggcatcgacaccccccagtgccacagattcaccggccactgcagctgcagacccggcgtgagcggcgtgagatgcgaccagtgcgccagaggcttcagcggcatcttccccgcctgccacccctgccacgcctgcttcggcgactgggacagagtggtgcaggacctggccgccagaacccagagactggagcagagagcccaggagctgcagcagaccggcgtgctgggcgccttcgagagcagcttctggcacatgcaggagaagctgggcatcgtgcagggcatcgtgggcgccagaaacaccagcgccgccagcaccgcccagctggtggaggccaccgaggagctgagaagagagatcggcgaggccaccgagcacctgacccagctggaggccgacctgaccgacgtgcaggacgagaacttcaacgccaaccacgccctgagcggcctggagagagacagactggccctgaacctgaccctgagacagctggaccagcacctggacctgctgaagcacagcaacttcctgggcgcctacgacagcatcagacacgcccacagccagagcgccgaggccgagagaagagccaacaccagcgccctggccgtgcccagccccgtgagcaacagcgccagcgccagacacagaaccgaggccctgatggacgcccagaaggaggacttcaacagcaagcacatggccaaccagagagccctgggcaagctgagcgcccacacccacaccctgagcctgaccgacatcaacgagctggtgtgcggcgcccccggcgacgccccctgcgccaccagcccctgcggcggcgccggctgcagagacgaggacggccagcccagatgcggcggcctgagctgcaacggcgccgccgccaccgccgacctggccctgggcagagccagacacacccaggccgagctgcagagagccctggccgagggcggcagcatcctgagcagagtggccgagaccagaagacaggccagcgaggcccagcagagagcccaggccgccctggacaaggccaacgccagcagaggccaggtggagcaggccaaccaggagctgcaggagctgatccagagcgtgaaggacttcctgaaccaggagggcgccgaccccgacagcatcgagatggtggccaccagagtgctggagctgagcatccccgccagcgccgagcagatccagcacctggccggcgccatcgccgagagagtgagaagcctggccgacgtggacgccatcctggccagaaccgtgggcgacgtgagaagagccgagcagctgctgcaggacgccagaagagccagaagctgggccgaggacgagaagcagaaggccgagaccgtgcaggccgccctggaggaggcccagagagcccagggcatcgcccagggcgccatcagaggcgccgtggccgacaccagagacaccgagcagaccctgtaccaggtgcaggagagaatggccggcgccgagagagccctgagcagcgccggcgagagagccagacagctggacgccctgctggaggccctgaagctgaagagagccggcaacagcctggccgccagcaccgccgaggagaccgccggcagcgcccagggcagagcccaggaggccgagcagctgctgagaggccccctgggcgaccagtaccagaccgtgaaggccctggccgagagaaaggcccagggcgtgctggccgcccaggccagagccgagcagctgagagacgaggccagagacctgctgcaggccgcccaggacaagctgcagagactgcaggagctggagggcacctacgaggagaacgagagagccctggagagcaaggccgcccagctggacggcctggaggccagaatgagaagcgtgctgcaggccatcaacctgcaggtgcagatctacaacacctgccagtag

SEQ ID NO: 86513 - DNA, 1143 bp, synthetic construct
  misc_feature 1..1143: note = Description of Artificial Sequence: Synthetic coding sequence
  source 1..1143: mol_type = other DNA
atgcaggagaagctgggcatcgtgcagggcatcgtgggcgccagaaacaccagcgccgccagcaccgcccagctggtggaggccaccgaggagctgagaagagagatcggcgaggccaccgagcacctgacccagctggaggccgacctgaccgacgtgcaggacgagaacttcaacgccaaccacgccctgagcggcctggagagagacagactggccctgaacctgaccctgagacagctggaccagcacctggacctgctgaagcacagcaacttcctgggcgcctacgacagcatcagacacgcccacagccagagcgccgaggccgagagaagagccaacaccagcgccctggccgtgcccagccccgtgagcaacagcgccagcgccagacacagaaccgaggccctgatggacgcccagaaggaggacttcaacagcaagcacatggccaaccagagagccctgggcaagctgagcgcccacacccacaccctgagcctgaccgacatcaacgagctggtgtgcggcgcccccggcgacgccccctgcgccaccagcccctgcggcggcgccggctgcagagacgaggacggccagcccagatgcggcggcctgagctgcaacggcgccgccgccaccgccgacctggccctgggcagagccagacacacccaggccgagctgcagagagccctggccgagggcggcagcatcctgagcagagtggccgagaccagaagacaggccagcgaggcccagcagagagcccaggccgccctggacaaggccaacgccagcagaggccaggtggagcaggccaaccaggagctgcaggagctgatccagagcgtgaaggacttcctgaaccaggagggcgccgaccccgacagcatcgagatggtggccaccagagtgctggagctgagcatccccgccagcgccgagcagatccagcacctggccggcgccatcgccgagagagtgagaagcctggccgacgtggacgccatcctggcccagggcatcgcccagggcgccatcagaggcgccgtggccgacaccagagacaccgagcagcccgtgcccggcaccggcgaggacggcagatgcagagccggcaccgagctgtgcagatag

SEQ ID NO: 86514 - DNA, 5397 bp, synthetic construct; identical to SEQ ID NO: 86512
  misc_feature 1..5397: note = Description of Artificial Sequence: Synthetic coding sequence
  source 1..5397: mol_type = other DNA

SEQ ID NO: 86515 - DNA, 3519 bp, synthetic construct
  misc_feature 1..3519: note = Description of Artificial Sequence: Synthetic coding sequence
  source 1..3519: mol_type = other DNA
atgagacccttcttcctgctgtgcttcgccctgcccggcctgctgcacgcccagcaggcctgcagcagaggcgcctgctacccccccgtgggcgacctgctggtgggcagaaccagattcctgagagccagcagcacctgcggcctgaccaagcccgagacctactgcacccagtacggcgagtggcagatgaagtgctgcaagtgcgacagcagacagccccacaactactacagccacagagtggagaacgtggccagcagcagcggccccatgagatggtggcagagccagaacgacgtgaaccccgtgagcctgcagctggacctggacagaagattccagctgcaggaggtgatgatggagttccagggccccatgcccgccggcatgctgatcgagagaagcagcgacttcggcaagacctggagagtgtaccagtacctggccgccgactgcaccagcaccttccccagagtgagacagggcagaccccagagctggcaggacgtgagatgccagagcctgccccagagacccaacgccagactgaacggcggcaaggtgcagctgaacctgatggacctggtgagcggcatccccgccacccagagccagaagatccaggaggtgggcgagatcaccaacctgagagtgaacttcaccagactggcccccgtgccccagagaggctaccacccccccagcgcctactacgccgtgagccagctgagactgcagggcagctgcttctgccacggccacgccgacagatgcgcccccaagcccggcgccagcgccggccccagcaccgccgtgcaggtgcacgacgtgtgcgtgtgccagcacaacaccgccggccccaactgcgagagatgcgcccccttctacaacaacagaccctggagacccgccgagggccaggacgcccacgagtgccagagatgcgactgcaacggccacagcgagacctgccacttcgaccccgccgtgttcgccgccagccagggcgcctacggcggcgtgtgcgacaactgcagagaccacaccgagggcaagaactgcgagagatgccagctgcactacttcagaaacagaagacccggcgccagcatccaggagacctgcatcagctgcgagtgcgaccccgacggcgccgtgcccggcgccccctgcgaccccgtgaccggccagtgcgtgtgcaaggagcacgtgcagggcgagagatgcgacctgtgcaagcccggcttcaccggcctgacctacgccaacccccagggctgccacagatgcgactgcaacatcctgggcagcagaagagacatgccctgcgacgaggagagcggcagatgcctgtgcctgcccaacgtggtgggccccaagtgcgaccagtgcgccccctaccactggaagctggccagcggccagggctgcgagccctgcgcctgcgacccccacaacagcctgagcccccagtgcaaccagttcaccggccagtgcccctgcagagagggcttcggcggcctgatgtgcagcgccgccgccatcagacagtgccccgacagaacctacggcgacgtggccaccggctgcagagcctgcgactgcgacttcagaggcaccgagggccccggctgcgacaaggccagcggcagatgcctgtgcagacccggcctgaccggccccagatgcgaccagtgccagagaggctactgcaacagataccccgtgtgcgtggcctgccacccctgcttccagacctacgacgccgacctgagagagcaggccctgagattcggcagactgagaaacgccaccgccagcctgtggagcggccccggcctggaggacagaggcctggccagcagaatcctggacgccaagagcaagatcgagcagatcagagccgtgctgagcagccccgccgtgaccgagcaggaggtggcccaggtggccagcgccatcctgagcctgagaagaaccctgcagggcctgcagctggacctgcccctggaggaggagaccctgagcctgcccagagacctggagagcctggacagaagcttcaacggcctgctgaccatgtaccagagaaagagagagcagttcgagaagatcagcagcgccgaccccagcggcgccttcagaatgctgagcaccgcctacgagcagagcgcccaggccgcccagcaggtgagcgacagcagcagactgctggaccagctgagagacagcagaagagaggccgagagactggtgagacaggccggcggcggcggcggcaccggcagccccaagctggtggccctgagactggagatgagcagcctgcccgacctgacccccaccttcaacaagctgtgcggcaacagcagacagatggcctgcacccccatcagctgccccggcgagctgtgcccccaggacaacggcaccgcctgcggcagcagatgcagaggcgtgctgcccagagccggcggcgccttcctgatggccggccaggtggccgagcagctgagaggcttcaacgcccagctgcagagaaccagacagatgatcagagccgccgaggagagcgccagccagatccagagcagcgcccagagactggagacccaggtgagcgccagcagaagccagatggaggaggacgtgagaagaaccagactgctgatccagcaggtgagagacttcctgaccgaccccgacaccgacgccgccaccatccaggaggtgagcgaggccgtgctggccctgtggctgcccaccgacagcgccaccgtgctgcagaagatgaacgagatccaggccatcgccgccagactgcccaacgtggacctggtgctgagccagaccaagcaggacatcgccagagccagaagactgcaggccgaggccgaggaggccagaagcagagcccacgccgtggagggccaggtggaggacgtggtgggcaacctgagacagggcaccgtggccctgcaggaggcccaggacaccatgcagggcaccagcagaagcctgagactgatccaggacagagtggccgaggtgcagcaggtgctgagacccgccgagaagctggtgaccagcatgaccaagcagctgggcgacttctggaccagaatggaggagctgagacaccaggccagacagcagggcgccgaggccgtgcaggcccagcagctggccgagggcgccagcgagcaggccctgagcgcccaggagggcttcgagagaatcaagcagaagtacgccgagctgaaggacagactgggccagagcagcatgctgggcgagcagggcgccagaatccagagcgtgaagaccgaggccgaggagctgttcggcgagaccatggagatgatggacagaatgaaggacatggagctggagctgctgagaggcagccaggccatcatgctgagaagcgccgacctgaccggcctggagaagagagtggagcagatcagagaccacatcaacggcagagtgctgtactacgccacctgcaagtag

SEQ ID NO: 86516 - DNA, 3519 bp, synthetic construct; identical to SEQ ID NO: 86515
  misc_feature 1..3519: note = Description of Artificial Sequence: Synthetic coding sequence
  source 1..3519: mol_type = other DNA

SEQ ID NO: 86517 - DNA, 3519 bp, synthetic construct; identical to SEQ ID NO: 86515
  misc_feature 1..3519: note = Description of Artificial Sequence: Synthetic coding sequence
  source 1..3519: mol_type = other DNA

SEQ ID NO: 86518 - DNA, 567 bp, synthetic construct
  misc_feature 1..567: note = Description of Artificial Sequence: Synthetic coding sequence
  source 1..567: mol_type = other DNA
atgagacccttcttcctgctgtgcttcgccctgcccggcctgctgcacgcccagcaggcctgcagcagaggcgcctgctacccccccgtgggcgacctgctggtgggcagaaccagattcctgagagccagcagcacctgcggcctgaccaagcccgagacctactgcacccagtacggcgagtggcagatgaagtgctgcaagtgcgacagcagacagccccacaactactacagccacagagtggagaacgtggccagcagcagcggccccatgagatggtggcagagccagaacgacgtgaaccccgtgagcctgcagctggacctggacagaagattccagctgcaggaggtgatgatggagttccagggccccatgcccgccggcatgctgatcgagagaagcagcgacttcggcaagacctggagagtgtaccagtacctggccgccgactgcaccagcaccttccccagagtgagacagggcagaccccagagctggcaggacgtgagatgccagagcctgccccagagacccaacgccagactgaacggcggcaagtag

SEQ ID NO: 86519 - DNA, 483 bp, synthetic construct
  misc_feature 1..483: note = Description of Artificial Sequence: Synthetic coding sequence
  source 1..483: mol_type = other DNA
atgaacgagatccaggccatcgccgccagactgcccaacgtggacctggtgctgagccagaccaagcaggacatcgccagagccagaagactgcaggccgaggccgaggaggccagaagcagagcccacgccgtggagggccaggtggaggacgtggtgggcaacctgagacagggcaccgtggccctgcaggaggcccaggacaccatgcagggcaccagcagaagcctgagactgatccaggacagagtggccgaggtgcagcaggtgctgagacccgccgagaagctggtgaccagcatgaccaagcagctgggcgacttctggaccagaatggaggagctgagacaccaggccagacagcagggcgccgaggccgtgcaggcccagcagctggccgagggcgccagcgagcaggccctgagcgcccaggagggcttcgagagaatcaagcagaagtacgccgagctgaaggacagatag

SEQ ID NO: 86520 - DNA, 4830 bp, synthetic construct
  misc_feature 1..4830: note = Description of Artificial Sequence: Synthetic coding sequence
  source 1..4830: mol_type = other DNA
atgagaggcagccacagagccgcccccgccctgagacccagaggcagactgtggcccgtgctggccgtgctggccgccgccgccgccgccggctgcgcccaggccgccatggacgagtgcaccgacgagggcggcagaccccagagatgcatgcccgagttcgtgaacgccgccttcaacgtgaccgtggtggccaccaacacctgcggcaccccccccgaggagtactgcgtgcagaccggcgtgaccggcgtgaccaagagctgccacctgtgcgacgccggccagccccacctgcagcacggcgccgccttcctgaccgactacaacaaccaggccgacaccacctggtggcagagccagaccatgctggccggcgtgcagtaccccagcagcatcaacctgaccctgcacctgggcaaggccttcgacatcacctacgtgagactgaagttccacaccagcagacccgagagcttcgccatctacaagagaaccagagaggacggcccctggatcccctaccagtactacagcggcagctgcgagaacacctacagcaaggccaacagaggcttcatcagaaccggcggcgacgagcagcaggccctgtgcaccgacgagttcagcgacatcagccccctgaccggcggcaacgtggccttcagcaccctggagggcagacccagcgcctacaacttcgacaacagccccgtgctgcaggagtgggtgaccgccaccgacatcagagtgaccctgaacagactgaacaccttcggcgacgaggtgttcaacgaccccaaggtgctgaagagctactactacgccatcagcgacttcgccgtgggcggcagatgcaagtgcaacggccacgccagcgagtgcatgaagaacgagttcgacaagctggtgtgcaactgcaagcacaacacctacggcgtggactgcgagaagtgcctgcccttcttcaacgacagaccctggagaagagccaccgccgagagcgccagcgagtgcctgccctgcgactgcaacggcagaagccaggagtgctacttcgaccccgagctgtacagaagcaccggccacggcggccactgcaccaactgccaggacaacaccgacggcgcccactgcgagagatgcagagagaacttcttcagactgggcaacaacgaggcctgcagcagctgccactgcagccccgtgggcagcctgagcacccagtgcgacagctacggcagatgcagctgcaagcccggcgtgatgggcgacaagtgcgacagatgccagcccggcttccacagcctgaccgaggccggctgcagaccctgcagctgcgaccccagcggcagcatcgacgagtgcaacatcgagaccggcagatgcgtgtgcaaggacaacgtggagggcttcaactgcgagagatgcaagcccggcttcttcaacctggagagcagcaaccccagaggctgcaccccctgcttctgcttcggccacagcagcgtgtgcaccaacgccgtgggctacagcgtgtacagcatcagcagcaccttccagatcgacgaggacggctggagagccgagcagagagacggcagcgaggccagcctggagtggagcagcgagagacaggacatcgccgtgatcagcgacagctacttccccagatacttcatcgcccccgccaagttcctgggcaagcaggtgctgagctacggccagaacctgagcttcagcttcagagtggacagaagagacaccagactgagcgccgaggacctggtgctggagggcgccggcctgagagtgagcgtgcccctgatcgcccagggcaacagctaccccagcgagaccaccgtgaagtacgtgttcagactgcacgaggccaccgactacccctggagacccgccctgacccccttcgagttccagaagctgctgaacaacctgaccagcatcaagatcagaggcacctacagcgagagaagcgccggctacctggacgacgtgaccctggccagcgccagacccggccccggcgtgcccgccacctgggtggagagctgcacctgccccgtgggctacggcggccagttctgcgagatgtgcctgagcggctacagaagagagacccccaacctgggcccctacagcccctgcgtgctgtgcgcctgcaacggccacagcgagacctgcgaccccgagaccggcgtgtgcaactgcagagacaacaccgccggcccccactgcgagaagtgcagcgacggctactacggcgacagcaccgccggcaccagcagcgactgccagccctgcccctgccccggcggcagcagctgcgccgtggtgcccaagaccaaggaggtggtgtgcaccaactgccccaccggcaccaccggcaagagatgcgagctgtgcgacgacggctacttcggcgaccccctgggcagaaacggccccgtgagactgtgcagactgtgccagtgcagcgacaacatcgaccccaacgccgtgggcaactgcaacagactgaccggcgagtgcctgaagtgcatctacaacaccgccggcttctactgcgacagatgcaaggacggcttcttcggcaaccccctggcccccaaccccgccgacaagtgcaaggcctgcaactgcaacctgtacggcaccatgaagcagcagagcagctgcaaccccgtgaccggccagtgcgagtgcctgccccacgtgaccggccaggactgcggcgcctgcgaccccggcttctacaacctgcagagcggccagggctgcgagagatgcgactgccacgccctgggcagcaccaacggccagtgcgacatcagaaccggccagtgcgagtgccagcccggcatcaccggccagcactgcgagagatgcgaggtgaaccacttcggcttcggccccgagggctgcaagccctgcgactgccaccccgagggcagcctgagcctgcagtgcaaggacgacggcagatgcgagtgcagagagggcttcgtgggcaacagatgcgaccagtgcgaggagaactacttctacaacagaagctggcccggctgccaggagtgccccgcctgctacagactggtgaaggacaaggtggccgaccacagagtgaagctgcaggagctggagagcctgatcgccaacctgggcaccggcgacgagatggtgaccgaccaggccttcgaggacagactgaaggaggccgagagagaggtgatggacctgctgagagaggcccaggacgtgaaggacgtggaccagaacctgatggacagactgcagagagtgaacaacaccctgagcagccagatcagcagactgcagaacatcagaaacaccatcgaggagaccggcaacctggccgagcaggccagagcccacgtggagaacaccgagagactgatcgagatcgccagcagagagctggagaaggccaaggtggccgccgccaacgtgagcgtgacccagcccgagagcaccggcgaccccaacaacatgaccctgctggccgaggaggccagaaagctggccgagagacacaagcaggaggccgacgacatcgtgagagtggccaagaccgccaacgacaccagcaccgaggcctacaacctgctgctgagaaccctggccggcgagaaccagaccgccttcgagatcgaggagctgaacagaaagtacgagcaggccaagaacatcagccaggacctggagaagcaggccgccagagtgcacgaggaggccaagagagccggcgacaaggccgtggagatctacgccagcgtggcccagctgagccccctggacagcgagaccctggagaacgaggccaacaacatcaagatggaggccgagaacctggagcagctgatcgaccagaagctgaaggactacgaggacctgagagaggacatgagaggcaaggagctggaggtgaagaacctgctggagaagggcaagaccgagcagcagaccgccgaccagctgctggccagagccgacgccgccaaggccctggccgaggaggccgccaagaagggcagagacaccctgcaggaggccaacgacatcctgaacaacctgaaggacttcgacagaagagtgaacgacaacaagaccgccgccgaggaggccctgagaaagatccccgccatcaaccagaccatcaccgaggccaacgagaagaccagagaggcccagcaggccctgggcagcgccgccgccgacgccaccgaggccaagaacaaggcccacgaggccgagagaatcgccagcgccgtgcagaagaacgccaccagcaccaaggccgaggccgagagaaccttcgccgaggtgaccgacctggacaacgaggtgaacaacatgctgaagcagctgcaggaggccgagaaggagctgaagagaaagcaggacgacgccgaccaggacatgatgatggccggcatggccagccaggccgcccaggaggccgagatcaacgccagaaaggccaagaacagcgtgaccagcctgctgagcatcatcaacgacctgctggagcagctgggccagctggacaccgtggacctgaacaagctgaacgagatcgagggcaccctgaacaaggccaaggacgagatgaaggtgagcgacctggacagaaaggtgagcgacctggagaacgaggccaagaagcaggaggccgccatcatggactacaacagagacatcgaggagatcatgaaggacatcagaaacctggaggacatcagaaagaccctgcccagcggctgcttcaacacccccagcatcgagaagccctag

SEQ ID NO: 86521 - DNA, 3582 bp, synthetic construct
  misc_feature 1..3582: note = Description of Artificial Sequence: Synthetic coding sequence
  source 1..3582: mol_type = other DNA
atgcccgccctgtggctgggctgctgcctgtgcttcagcctgctgctgcccgccgccagagccaccagcagaagagaggtgtgcgactgcaacggcaagagcagacagtgcatcttcgacagagagctgcacagacagaccggcaacggcttcagatgcctgaactgcaacgacaacaccgacggcatccactgcgagaagtgcaagaacggcttctacagacacagagagagagacagatgcctgccctgcaactgcaacagcaagggcagcctgagcgccagatgcgacaacagcggcagatgcagctgcaagcccggcgtgaccggcgccagatgcgacagatgcctgcccggcttccacatgctgaccgacgccggctgcacccaggaccagagactgctggacagcaagtgcgactgcgaccccgccggcatcgccggcccctgcgacgccggcagatgcgtgtgcaagcccgccgtgaccggcgagagatgcgacagatgcagaagcggctactacaacctggacggcggcaaccccgagggctgcacccagtgcttctgctacggccacagcgccagctgcagaagcagcgccgagtacagcgtgcacaagatcaccagcaccttccaccaggacgtggacggctggaaggccgtgcagagaaacggcagccccgccaagctgcagtggagccagagacaccaggacgtgttcagcagcgcccagagactggaccccgtgtacttcgtggcccccgccaagttcctgggcaaccagcaggtgagctacggccagagcctgagcttcgactacagagtggacagaggcggcagacaccccagcgcccacgacgtgatcctggagggcgccggcctgagaatcaccgcccccctgatgcccctgggcaagaccctgccctgcggcctgaccaagacctacaccttcagactgaacgagcaccccagcaacaactggagcccccagctgagctacttcgagtacagaagactgctgagaaacctgaccgccctgagaatcagagccacctacggcgagtacagcaccggctacatcgacaacgtgaccctgatcagcgccagacccgtgagcggcgcccccgccccctgggtggagcagtgcatctgccccgtgggctacaagggccagttctgccaggactgcgccagcggctacaagagagacagcgccagactgggccccttcggcacctgcatcccctgcaactgccagggcggcggcgcctgcgaccccgacaccggcgactgctacagcggcgacgagaaccccgacatcgagtgcgccgactgccccatcggcttctacaacgacccccacgaccccagaagctgcaagccctgcccctgccacaacggcttcagctgcagcgtgatgcccgagaccgaggaggtggtgtgcaacaactgcccccccggcgtgaccggcgccagatgcgagctgtgcgccgacggctacttcggcgaccccttcggcgagcacggccccgtgagaccctgccagccctgccagtgcaacaacaacgtggaccccagcgccagcggcaactgcgacagactgaccggcagatgcctgaagtgcatccacaacaccgccggcatctactgcgaccagtgcaaggccggctacttcggcgaccccctggcccccaaccccgccgacaagtgcagagcctgcaactgcaaccccatgggcagcgagcccgtgggctgcagaagcgacggcacctgcgtgtgcaagcccggcttcggcggccccaactgcgagcacggcgccttcagctgccccgcctgctacaaccaggtgaagatccagatggaccagttcatgcagcagctgcagagaatggaggccctgatcagcaaggcccagggcggcgacggcgtggtgcccgacaccgagctggagggcagaatgcagcaggccgagcaggccctgcaggacatcctgagagacgcccagatcagcgagggcgccagcagaagcctgggcctgcagctggccaaggtgagaagccaggagaacagctaccagagcagactggacgacctgaagatgaccgtggagagagtgagagccctgggcagccagtaccagaacagagtgagagacacccacagactgatcacccagatgcagctgagcctggccgagagcgaggccagcctgggcaacaccaacatccccgccagcgaccactacgtgggccccaacggcttcaagagcctggcccaggaggccaccagactggccgagagccacgtggagagcgccagcaacatggagcagctgaccagagagaccgaggactacagcaagcaggccctgagcctggtgagaaaggccctgcacgagggcgtgggcagcggcagcggcagccccgacggcgccgtggtgcagggcctggtggagaagctggagaagaccaagagcctggcccagcagctgaccagagaggccacccaggccgagatcgaggccgacagaagctaccagcacagcctgagactgctggacagcgtgagcagactgcagggcgtgagcgaccagagcttccaggtggaggaggccaagagaatcaagcagaaggccgacagcctgagcagcctggtgaccagacacatggacgagttcaagagaacccagaagaacctgggcaactggaaggaggaggcccagcagctgctgcagaacggcaagagcggcagagagaagagcgaccagctgctgagcagagccaacctggccaagagcagagcccaggaggccctgagcatgggcaacgccaccttctacgaggtggagagcatcctgaagaacctgagagagttcgacctgcaggtggacaacagaaaggccgaggccgaggaggccatgaagagactgagctacatcagccagaaggtgagcgacgccagcgacaagacccagcaggccgagagagccctgggcagcgccgccgccgacgcccagagagccaagaacggcgccggcgaggccctggagatcagcagcgagatcgagcaggagatcggcagcctgaacctggaggccaacgtgaccgccgacggcgccctggccatggagaagggcctggccagcctgaagagcgagatgagagaggtggagggcgagctggagagaaaggagctggagttcgacaccaacatggacgccgtgcagatggtgatcaccgaggcccagaaggtggacaccagagccaagaacgccggcgtgaccatccaggacaccctgaacaccctggacggcctgctgcacctgatggaccagcccctgagcgtggacgaggagggcctggtgctgctggagcagaagctgagcagagccaagacccagatcaacagccagctgagacccatgatgagcgagctggaggagagagccagacagcagagaggccacctgcacctgctggagaccagcatcgacggcatcctggccgacgtgaagaacctggagaacatcagagacaacctgccccccggctgctacaacacccaggccctggagcagcagtag

SEQ ID NO: 86522 - DNA, 3336 bp, synthetic construct
  misc_feature 1..3336: note = Description of Artificial Sequence: Synthetic coding sequence
  source 1..3336: mol_type = other DNA
atgcccgccctgtggctgggctgctgcctgtgcttcagcctgctgctgcccgccgccagagccaccagcagaagagaggtgtgcgactgcaacggcaagagcagacagtgcatcttcgacagagagctgcacagacagaccggcaacggcttcagatgcctgaactgcaacgacaacaccgacggcatccactgcgagaagtgcaagaacggcttctacagacacagagagagagacagatgcctgccctgcaactgcaacagcaagggcagcctgagcgccagatgcgacaacagcggcagatgcagctgcaagcccggcgtgaccggcgccagatgcgacagatgcctgcccggcttccacatgctgaccgacgccggctgcacccaggaccagagactgctggacagcaagtgcgactgcgaccccgccggcatcgccggcccctgcgacgccggcagatgcgtgtgcaagcccgccgtgaccggcgagagatgcgacagatgcagaagcggctactacaacctggacggcggcaaccccgagggctgcacccagtgcttctgctacggccacagcgccagctgcagaagcagcgccgagtacagcgtgcacaagatcaccagcaccttccaccaggacgtggacggctggaaggccgtgcagagaaacggcagccccgccaagctgcagtggagccagagacaccaggacgtgttcagcagcgcccagagactggaccccgtgtacttcgtggcccccgccaagttcctgggcaaccagcaggtgagctacggccagagcctgagcttcgactacagagtggacagaggcggcagacaccccagcgcccacgacgtgatcctggagggcgccggcctgagaatcaccgcccccctgatgcccctgggcaagaccctgccctgcggcctgaccaagacctacaccttcagactgaacgagcaccccagcaacaactggagcccccagctgagctacttcgagtacagaagactgctgagaaacctgaccgccctgagaatcagagccacctacggcgagtacagcaccggctacatcgacaacgtgaccctgatcagcgccagacccgtgagcggcgcccccgccccctgggtggagcagtgcatctgccccgtgggctacaagggccagttctgccaggactgcgccagcggctacaagagagacagcgccagactgggccccttcggcacctgcatcccctgcaactgccagggcggcggcgcctgcgaccccgacaccggcgactgctacagcggcgacgagaaccccgacatcgagtgcgccgactgccccatcggcttctacaacgacccccacgaccccagaagctgcaagccctgcccctgccacaacggcttcagctgcagcgtgatgcccgagaccgaggaggtggtgtgcaacaactgcccccccggcgtgaccggcgccagatgcgagctgtgcgccgacggctacttcggcgaccccttcggcgagcacggccccgtgagaccctgccagccctgccagtgcaacaacaacgtggaccccagcgccagcggcaactgcgacagactgaccggcagatgcctgaagtgcatccacaacaccgccggcatctactgcgaccagtgcaaggccggctacttcggcgaccccctggcccccaaccccgccgacaagtgcagagcctgcaactgcaaccccatgggcagcgagcccgtgggctgcagaagcgacggcacctgcgtgtgcaagcccggcttcggcggccccaactgcgagcacggcgccttcagctgccccgcctgctacaaccaggtgaagatccagatggaccagttcatgcagcagctgcagagaatggaggccctgatcagcaaggcccagggcggcgacggcgtggtgcccgacaccgagctggagggcagaatgcagcaggccgagcaggccctgcaggacatcctgagagacgcccagatcagcgagggcgccagcagaagcctgggcctgcagctggccaaggtgagaagccaggagaacagctaccagagcagactggacgacctgaagatgaccgtggagagagtgagagccctgggcagccagtaccagaacagagtgagagacacccacagactgatcacccagatgcagctgagcctggccgagagcgaggccagcctgggcaacaccaacatccccgccagcgaccactacgtgggccccaacggcttcaagagcctggcccaggaggccaccagactggccgagagccacgtggagagcgccagcaacatggagcagctgaccagagagaccgaggactacagcaagcaggccctgagcctggtgagaaaggccctgcacgagggcgtgggcagcggcagcggcagccccgacggcgccgtggtgcagggcctggtggagaagctggagaagaccaagagcctggcccagcagctgaccagagaggccacccaggccgagatcgaggccgacagaagctaccagcacagcctgagactgctggacagcgtgagcagactgcagggcgtgagcgaccagagcttccaggtggaggaggccaagagaatcaagcagaaggccgacagcctgagcagcctggtgaccagacacatggacgagttcaagagaacccagaagaacctgggcaactggaaggaggaggcccagcagctgctgcagaacggcaagagcggcagagagaagagcgaccagctgctgagcagagccaacctggccaagagcagagcccaggaggccctgagcatgggcaacgccaccttctacgaggtggagagcatcctgaagaacctgagagagttcgacctgcaggtggacaacagaaaggccgaggccgaggaggccatgaagagactgagctacatcagccagaaggtgagcgacgccagcgacaagacccagcaggccgagagagccctgggcagcgccgccgccgacgcccagagagccaagaacggcgccggcgaggccctggagatcagcagcgagatcgagcaggagatcggcagcctgaacctggaggccaacgtgaccgccgacggcgccctggccatggagaagggcctggccagcctgaagagcgagatgagagaggtggagggcgagctggagagaaaggagctggagttcgacaccaacatggacgccgtgcagatggtgatcaccgaggcccagaaggtggacaccagagccaagaacgccggcgtgaccatccaggacaccctgaacaccctggacggcctgctgcacctgatgggcatgtag

SEQ ID NO: 86523 - DNA, 3033 bp, synthetic construct
  misc_feature 1..3033: note = Description of Artificial Sequence: Synthetic coding sequence
  source 1..3033: mol_type = other DNA
atgcccgccctgtggctgggctgctgcctgtgcttcagcctgctgctgcccgccgccagagccaccagcagaagagaggtgtgcgactgcaacggcaagagcagacagtgcatcttcgacagagagctgcacagacagaccggcaacggcttcagatgcctgaactgcaacgacaacaccgacggcatccactgcgagaagtgcaagaacggcttctacagacacagagagagagacagatgcctgccctgcaactgcaacagcaagggcagcctgagcgccagatgcgacaacagcggcagatgcagctgcaagcccggcgtgaccggcgccagatgcgacagatgcctgcccggcttccacatgctgaccgacgccggctgcacccaggaccagagactgctggacagcaagtgcgactgcgaccccgccggcatcgccggcccctgcgacgccggcagatgcgtgtgcaagcccgccgtgaccggcgagagatgcgacagatgcagaagcggctactacaacctggacggcggcaaccccgagggctgcacccagtgcttctgctacggccacagcgccagctgcagaagcagcgccgagtacagcgtgcacaagatcaccagcaccttccaccaggacgtggacggctggaaggccgtgcagagaaacggcagccccgccaagctgcagtggagccagagacaccaggacgtgttcagcagcgcccagagactggaccccgtgtacttcgtggcccccgccaagttcctgggcaaccagcaggtgagctacggccagagcctgagcttcgactacagagtggacagaggcggcagacaccccagcgcccacgacgtgatcctggagggcgccggcctgagaatcaccgcccccctgatgcccctgggcaagaccctgccctgcggcctgaccaagacctacaccttcagactgaacgagcaccccagcaacaactggagcccccagctgagctacttcgagtacagaagactgctgagaaacctgaccgccctgagaatcagagccacctacggcgagtacagcaccggctacatcgacaacgtgaccctgatcagcgccagacccgtgagcggcgcccccgccccctgggtggagcagtgcatctgccccgtgggctacaagggccagttctgccaggactgcgccagcggctacaagagagacagcgccagactgggccccttcggcacctgcatcccctgcaactgccagggcggcggcgcctgcgaccccgacaccggcgactgctacagcggcgacgagaaccccgacatcgagtgcgccgactgccccatcggcttctacaacgacccccacgaccccagaagctgcaagccctgcccctgccacaacggcttcagctgcagcgtgatgcccgagaccgaggaggtggtgtgcaacaactgcccccccggcgtgaccggcgccagatgcgagctgtgcgccgacggctacttcggcgaccccttcggcgagcacggccccgtgagaccctgccagccctgccagtgcaacaacaacgtggaccccagcgccagcggcaactgcgacagactgaccggcagatgcctgaagtgcatccacaacaccgccggcatctactgcgaccagtgcaaggccggctacttcggcgaccccctggcccccaaccccgccgacaagtgcagagcctgcaactgcaaccccatgggcagcgagcccgtgggctgcagaagcgacggcacctgcgtgtgcaagcccggcttcggcggccccaactgcgagcacggcgccttcagctgccccgcctgctacaaccaggtgaagatccagatggaccagttcatgcagcagctgcagagaatggaggccctgatcagcaaggcccagggcggcgacggcgtggtgcccgacaccgagctggagggcagaatgcagcaggccgagcaggccctgcaggacatcctgagagacgcccagatcagcgagggcgccagcagaagcctgggcctgcagctggccaaggtgagaagccaggagaacagctaccagagcagactggacgacctgaagatgaccgtggagagagtgagagccctgggcagccagtaccagaacagagtgagagacacccacagactgatcacccagatgcagctgagcctggccgagagcgaggccagcctgggcaacaccaacatccccgccagcgaccactacgtgggccccaacggcttcaagagcctggcccaggaggccaccagactggccgagagccacgtggagagcgccagcaacatggagcagctgaccagagagaccgaggactacagcaagcaggccctgagcctggtgagaaaggccctgcacgagggcgtgggcagcggcagcggcagccccgacggcgccgtggtgcagggcctggtggagaagctggagaagaccaagagcctggcccagcagctgaccagagaggccacccaggccgagatcgaggccgacagaagctaccagcacagcctgagactgctggacagcgtgagcagactgcagggcgtgagcgaccagagcttccaggtggaggaggccaagagaatcaagcagaaggccgacagcctgagcagcctggtgaccagacacatggacgagttcaagagaacccagaagaacctgggcaactggaaggaggaggcccagcagctgctgcagaacggcaagagcggcagagagaagagcgaccagctgctgagcagagccaacctggccaagagcagagcccaggaggccctgagcatgggcaacgccaccttctacgaggtggagagcatcctgaagaacctgagagagttcgacctgcaggtggacaacagaaaggccgaggccttccccagccaggaccccgaccagcagcccaccgccgcccacgacgtgagagccggcagagagggcaccagcgccgagggccccccccccttcgccggcgacaagcacagatgggacagcggctag

SEQ ID NO: 86524 - DNA, 1590 bp, synthetic construct
  misc_feature 1..1590: note = Description of Artificial Sequence: Synthetic coding sequence
  source 1..1590: mol_type = other DNA
atggccgccgccgccctgctgctgggcctggccctgctggcccccagagccgccggcgccggcatgggcgcctgctacgacggcgccggcagaccccagagatgcctgcccgtgttcgagaacgccgccttcggcagactggcccaggccagccacacctgcggcagcccccccgaggacttctgcccccacgtgggcgccgccggcgccggcgcccactgccagagatgcgacgccgccgacccccagagacaccacaacgccagctacctgaccgacttccacagccaggacgagagcacctggtggcagagccccagcatggccttcggcgtgcagtaccccaccagcgtgaacatcaccctgagactgggcaaggcctacgagatcacctacgtgagactgaagttccacaccagcagacccgagagcttcgccatctacaagagaagcagagccgacggcccctgggagccctaccagttctacagcgccagctgccagaagacctacggcagacccgagggccagtacctgagacccggcgaggacgagagagtggccttctgcaccagcgagttcagcgacatcagccccctgagcggcggcaacgtggccttcagcaccctggagggcagacccagcgcctacaacttcgaggagagccccggcctgcaggagtgggtgaccagcaccgagctgctgatcagcctggacagactgaacaccttcggcgacgacatcttcaaggaccccaaggtgctgcagagctactactacgccgtgagcgacttcagcgtgggcggcagatgcaagtgcaacggccacgccagcgagtgcggccccgacgtggccggccagctggcctgcagatgccagcacaacaccaccggcaccgactgcgagagatgcctgcccttcttccaggacagaccctgggccagaggcaccgccgaggccgcccacgagtgcctgccctgcaactgcagcggcagaagcgaggagtgcaccttcgacagagagctgttcagaagcaccggccacggcggcagatgccaccactgcagagaccacaccgccggcccccactgcgagagatgccaggagaacttctaccactgggaccccagaatgccctgccagccctgcgactgccagagcgccggcagcctgcacctgcagtgcgacgacaccggcacctgcgcctgcaagcccaccgtgaccggctggaagtgcgacagatgcctgcccggcttccacagcctgagcgagggcggctgcagaccctgcacctgcaaccccgccggcagcctggacacctgcgaccccagaagcggcagatgcccctgcaaggagaacgtggagggcaacctgtgcgacagatgcagacccggcaccttcaacctgcagccccacaaccccgccggcagaagctgcagaagcagagccagcagagtgaccagccccagaagcgcccccaccaacagaacctggagacccttctgcaccgcctgccccagaaccgtgcccgccggcagcgagggctgccccgaccccagacacaccctgccccacctgctgttcacctag

SEQ ID NO: 86525 - DNA, 4728 bp, synthetic construct
  misc_feature 1..4728: note = Description of Artificial Sequence: Synthetic coding sequence
  source 1..4728: mol_type = other DNA
atggccgccgccgccctgctgctgggcctggccctgctggcccccagagccgccggcgccggcatgggcgcctgctacgacggcgccggcagaccccagagatgcctgcccgtgttcgagaacgccgccttcggcagactggcccaggccagccacacctgcggcagcccccccgaggacttctgcccccacgtgggcgccgccggcgccggcgcccactgccagagatgcgacgccgccgacccccagagacaccacaacgccagctacctgaccgacttccacagccaggacgagagcacctggtggcagagccccagcatggccttcggcgtgcagtaccccaccagcgtgaacatcaccctgagactgggcaaggcctacgagatcacctacgtgagactgaagttccacaccagcagacccgagagcttcgccatctacaagagaagcagagccgacggcccctgggagccctaccagttctacagcgccagctgccagaagacctacggcagacccgagggccagtacctgagacccggcgaggacgagagagtggccttctgcaccagcgagttcagcgacatcagccccctgagcggcggcaacgtggccttcagcaccctggagggcagacccagcgcctacaacttcgaggagagccccggcctgcaggagtgggtgaccagcaccgagctgctgatcagcctggacagactgaacaccttcggcgacgacatcttcaaggaccccaaggtgctgcagagctactactacgccgtgagcgacttcagcgtgggcggcagatgcaagtgcaacggccacgccagcgagtgcggccccgacgtggccggccagctggcctgcagatgccagcacaacaccaccggcaccgactgcgagagatgcctgcccttcttccaggacagaccctgggccagaggcaccgccgaggccgcccacgagtgcctgccctgcaactgcagcggcagaagcgaggagtgcaccttcgacagagagctgttcagaagcaccggccacggcggcagatgccaccactgcagagaccacaccgccggcccccactgcgagagatgccaggagaacttctaccactgggaccccagaatgccctgccagccctgcgactgccagagcgccggcagcctgcacctgcagtgcgacgacaccggcacctgcgcctgcaagcccaccgtgaccggctggaagtgcgacagatgcctgcccggcttccacagcctgagcgagggcggctgcagaccctgcacctgcaaccccgccggcagcctggacacctgcgaccccagaagcggcagatgcccctgcaaggagaacgtggagggcaacctgtgcgacagatgcagacccggcaccttcaacctgcagccccacaaccccgccggctgcagcagctgcttctgctacggccacagcaaggtgtgcgccagcaccgcccagttccaggtgcaccacatcctgagcgacttccaccagggcgccgagggctggtgggccagaagcgtgggcggcagcgagcaccccccccagtggagccccaacggcgtgctgctgagccccgaggacgaggaggagctgaccgcccccgagaagttcctgggcgaccagagattcagctacggccagcccctgatcctgaccttcagagtgccccccggcgacagccccctgcccgtgcagctgagactggagggcaccggcctggccctgagcctgagacacagcagcctgagcggcccccaggacgccggccaccccagagaggtggagctgagattccacctgcaggagaccagcgaggacgtggccccccccctgccccccttccacttccagagactgctggccaacctgaccagcctgagactgagagtgagccccggccccagccccgccggccccgtgttcctgaccgaggtgagactgaccagcgccagacccggcctgagcccccccgccagctgggtggagatctgcagctgccccaccggctacaccggccagttctgcgagagctgcgcccccggctacaagagagagatgccccagggcggcccctacgccagctgcgtgccctgcacctgcaaccagcacggcacctgcgaccccaacaccggcatctgcgtgtgcagccaccacaccgagggccccagctgcgagagatgcctgcccggcttctacggcaaccccttcgccggccaggccgacgactgccagccctgcccctgccccggccagagcgcctgcaccaccatccccgagagcagagaggtggtgtgcacccactgcccccccggccagagaggcagaagatgcgaggtgtgcgacgacggcttcttcggcgaccccctgggcctgttcggccacccccagccctgccaccagtgccagtgcagcggcaacgtggaccccaacgccgtgggcaactgcgaccccctgagcggccactgcctgagatgcctgcacaacaccaccggcgaccactgcgagcactgccaggagggcttctacggcagcgccctggcccccagacccgccgacaagtgcatgccctgcagctgccacccccagggcagcgtgagcgagcagatgccctgcgaccccgtgaccggccagtgcagctgcctgccccacgtgaccgccagagactgcagcagatgctaccccggcttcttcgacctgcagcccggcagaggctgcagaagctgcaagtgccaccccctgggcagccaggaggaccagtgccaccccaagaccggccagtgcacctgcagacccggcgtgaccggccaggcctgcgacagatgccagctgggcttcttcggcttcagcatcaagggctgcagagcctgcagatgcagccccctgggcgccgccagcgcccagtgccacgagaacggcacctgcgtgtgcagacccggcttcgagggctacaagtgcgacagatgccacgacaacttcttcctgaccgccgacggcacccactgccagcagtgccccagctgctacgccctggtgaaggaggaggccgccaagctgaaggccagactgaccctgaccgagggctggctgcagggcagcgactgcggcagcccctggggccccctggacatcctgctgggcgaggcccccagaggcgacgtgtaccagggccaccacctgctgcccggcgccagagaggccttcctggagcagatgatgagcctggagggcgccgtgaaggccgccagagagcagctgcagagactgaacaagggcgccagatgcgcccaggccggcagccagaagacctgcacccagctggccgacctggaggccgtgctggagagcagcgaggaggagatcctgcacgccgccgccatcctggccagcctggagatcccccaggagggccccagccagcccaccaagtggagccacctggccaccgaggccagagccctggccagaagccacagagacaccgccaccaagatcgccgccaccgcctggagagccctgctggccagcaacaccagctacgccctgctgtggaacctgctggagggcagagtggccctggagacccagagagacctggaggacagataccaggaggtgcaggccgcccagaaggccctgagaaccgccgtggccgaggtgctgcccgaggccgagagcgtgctggccaccgtgcagcaggtgggcgccgacaccgccccctacctggccctgctggccagccccggcgccctgccccagaagagcagagccgaggacctgggcctgaaggccaaggccctggagaagaccgtggccagctggcagcacatggccaccgaggccgccagaaccctgcagaccgccgcccaggccaccctgagacagaccgagcccctgaccaagctgcaccaggaggccagagccgccctgacccaggccagcagcagcgtgcaggccgccaccgtgaccgtgatgggcgccagaaccctgctggccgacctggagggcatgaagctgcagttccccagacccaaggaccaggccgccctgcagagaaaggccgacagcgtgagcgacagactgctggccgacaccagaaagaagaccaagcaggccgagagaatgctgggcaacgccgcccccctgagcagcagcgccaagaagaagggcagagaggccgaggtgctggccaaggacagcgccaagctggccaaggccctgctgagagagagaaagcaggcccacagaagagccagcagactgaccagccagacccaggccaccctgcagcaggccagccagcaggtgctggccagcgaggccagaagacaggagctggaggaggccgagagagtgggcgccggcctgagcgagatggagcagcagatcagagagagcagaatcagcctggagaaggacatcgagaccctgagcgagctgctggccagactgggcagcctggacacccaccaggcccccgcccaggccctgaacgagacccagtgggccctggagagactgagactgcagctgggcagccccggcagcctgcagagaaagctgagcctgctggagcaggagagccagcagcaggagctgcagatccagggcttcgagagcgacctggccgagatcagagccgacaagcagaacctggaggccatcctgcacagcctgcccgagaactgcgccagctggcagtag

SEQ ID NO: 86526 - DNA, 459 bp, synthetic construct
  misc_feature 1..459: note = Description of Artificial Sequence: Synthetic coding sequence
  source 1..459: mol_type = other DNA
atgagactgcccctgagccacagccccgagcacgtggagatggccctgctgagcaacatcctggccgcctacagcttcgtgagcgagaaccccgagagagccgccctgtacttcgtgagcggcgtgtgcatcggcctggtgctgaccctggccgccctggtgatcagaatcagctgccacaccgactgcagaagaagacccggcaagaagttcctgcaggacagagagagcagcagcgacagcagcgacagcgaggacggcagcgaggacaccgtgagcgacctgagcgtgagaagacacagaagattcgagagaaccctgaacaagaacgtgttcaccagcgccgaggagctggagagagcccagagactggaggagagagagagaatcatcagagagatctggatgaacggccagcccgaggtgcccggcaccagaagcctgaacagatactactag

SEQ ID NO: 86527 - DNA, 1200 bp, synthetic construct
  misc_feature 1..1200: note = Description of Artificial Sequence: Synthetic coding sequence
  source 1..1200: mol_type = other DNA
atggcccagagagccttccccaacccctacgccgactacaacaagagcctggccgagggctacttcgacgccgccggcagactgacccccgagttcagccagagactgaccaacaagatcagagagctgctgcagcagatggagagaggcctgaagagcgccgaccccagagacggcaccggctacaccggctgggccggcatcgccgtgctgtacctgcacctgtacgacgtgttcggcgaccccgcctacctgcagctggcccacggctacgtgaagcagagcctgaactgcctgaccaagagaagcatcaccttcctgtgcggcgacgccggccccctggccgtggccgccgtgctgtaccacaagatgaacaacgagaagcaggccgaggactgcatcaccagactgatccacctgaacaagatcgacccccacgcccccaacgagatgctgtacggcagaatcggctacatctacgccctgctgttcgtgaacaagaacttcggcgtggagaagatcccccagagccacatccagcagatctgcgagaccatcctgaccagcggcgagaacctggccagaaagagaaacttcaccgccaagagccccctgatgtacgagtggtaccaggagtactacgtgggcgccgcccacggcctggccggcatctactactacctgatgcagcccagcctgcaggtgagccagggcaagctgcacagcctggtgaagcccagcgtggactacgtgtgccagctgaagttccccagcggcaactaccccccctgcatcggcgacaacagagacctgctggtgcactggtgccacggcgcccccggcgtgatctacatgctgatccaggcctacaaggtgttcagagaggagaagtacctgtgcgacgcctaccagtgcgccgacgtgatctggcagtacggcctgctgaagaagggctacggcctgtgccacggcagcgccggcaacgcctacgccttcctgaccctgtacaacctgacccaggacatgaagtacctgtacagagcctgcaagttcgccgagtggtgcctggagtacggcgagcacggctgcagaacccccgacacccccttcagcctgttcgagggcatggccggcaccatctacttcctggccgacctgctggtgcccaccaaggccagattccccgccttcgagctgtag

SEQ ID NO: 86528 - DNA, 1200 bp, synthetic construct; identical to SEQ ID NO: 86527
  misc_feature 1..1200: note = Description of Artificial Sequence: Synthetic coding sequence
  source 1..1200: mol_type = other DNA

SEQ ID NO: 86529 - DNA, 1200 bp, synthetic construct; identical to SEQ ID NO: 86527
  misc_feature 1..1200: note = Description of Artificial Sequence: Synthetic coding sequence
  source 1..1200: mol_type = other DNA

SEQ ID NO: 86530 - DNA, 591 bp, synthetic construct
  misc_feature 1..591: note = Description of Artificial Sequence: Synthetic coding sequence
  source 1..591: mol_type = other DNA
atggcccagagagccttccccaacccctacgccgactacaacaagagcctggccgagggctacttcgacgccgccggcagactgacccccgagttcagccagagactgaccaacaagatcagagagctgctgcagcagatggagagaggcctgaagagcgccgaccccagagacggcaccggctacaccggctgggccggcatcgccgtgctgtacctgcacctgtacgacgtgttcggcgaccccgcctacctgcagctggcccacggctacgtgaagcagagcctgaactgcctgaccaagagaagcatcaccttcctgtgcggcgacgccggccccctggccgtggccgccgtgctgtaccacaagatgaacaacgagaagcaggccgaggactgcatcaccagactgatccacctgaacaagatcgacccccacgcccccaacgagatgctgtacggcagaatcggctacatctacgccctgctgttcgtgaacaagaacttcggcgtggagaagatcccccagagccacatccagcagatctgcgagaccatcctgaccagcggcgagaacctggccagaaagtag

SEQ ID NO: 86531 - DNA, 1200 bp, synthetic construct; identical to SEQ ID NO: 86527
  misc_feature 1..1200: note = Description of Artificial Sequence: Synthetic coding sequence
  source 1..1200: mol_type = other DNA

SEQ ID NO: 86532 - DNA, 1353 bp, synthetic construct
  misc_feature 1..1353: note = Description of Artificial Sequence: Synthetic coding sequence
  source 1..1353: mol_type = other DNA
atgggcgagaccatgagcaagagactgaagctgcacctgggcggcgaggccgagatggaggagagagccttcgtgaaccccttccccgactacgaggccgccgccggcgccctgctggccagcggcgccgccgaggagaccggctgcgtgagaccccccgccaccaccgacgagcccggcctgcccttccaccaggacggcaagatcatccacaacttcatcagaagaatccagaccaagatcaaggacctgctgcagcagatggaggagggcctgaagaccgccgacccccacgactgcagcgcctacaccggctggaccggcatcgccctgctgtacctgcagctgtacagagtgacctgcgaccagacctacctgctgagaagcctggactacgtgaagagaaccctgagaaacctgaacggcagaagagtgaccttcctgtgcggcgacgccggccccctggccgtgggcgccgtgatctaccacaagctgagaagcgactgcgagagccaggagtgcgtgaccaagctgctgcagctgcagagaagcgtggtgtgccaggagagcgacctgcccgacgagctgctgtacggcagagccggctacctgtacgccctgctgtacctgaacaccgagatcggccccggcaccgtgtgcgagagcgccatcaaggaggtggtgaacgccatcatcgagagcggcaagaccctgagcagagaggagagaaagaccgagagatgccccctgctgtaccagtggcacagaaagcagtacgtgggcgccgcccacggcatggccggcatctactacatgctgatgcagcccgccgccaaggtggaccaggagaccctgaccgagatggtgaagcccagcatcgactacgtgagacacaagaagttcagaagcggcaactaccccagcagcctgagcaacgagaccgacagactggtgcactggtgccacggcgcccccggcgtgatccacatgctgatgcaggcctacaaggtgttcaaggaggagaagtacctgaaggaggccatggagtgcagcgacgtgatctggcagagaggcctgctgagaaagggctacggcatctgccacggcaccgccggcaacggctacagcttcctgagcctgtacagactgacccaggacaagaagtacctgtacagagcctgcaagttcgccgagtggtgcctggactacggcgcccacggctgcagaatccccgacagaccctacagcctgttcgagggcatggccggcgccatccacttcctgagcgacgtgctgggccccgagaccagcagattccccgccttcgagctggacagcagcaagagagactag

SEQ ID NO: 86533 - DNA, 2199 bp, synthetic construct
  misc_feature 1..2199: note = Description of Artificial Sequence: Synthetic coding sequence
  source 1..2199: mol_type = other DNA
atgaccgagggcacctgcctgagaagaagaggcggcccctacaagaccgagcccgccaccgacctgggcagatggagactgaactgcgagagaggcagacagacctggacctacctgcaggacgagagagccggcagagagcagaccggcctggaggcctacgccctgggcctggacaccaagaactacttcaaggacctgcccaaggcccacaccgccttcgagggcgccctgaacggcatgaccttctacgtgggcctgcaggccgaggacggccactggaccggcgactacggcggccccctgttcctgctgcccggcctgctgatcacctgccacgtggccagaatccccctgcccgccggctacagagaggagatcgtgagatacctgagaagcgtgcagctgcccgacggcggctggggcctgcacatcgaggacaagagcaccgtgttcggcaccgccctgaactacgtgagcctgagaatcctgggcgtgggccccgacgaccccgacctggtgagagccagaaacatcctgcacaagaagggcggcgccgtggccatccccagctggggcaagttctggctggccgtgctgaacgtgtacagctgggagggcctgaacaccctgttccccgagatgtggctgttccccgactgggcccccgcccaccccagcaccctgtggtgccactgcagacaggtgtacctgcccatgagctactgctacgccgtgagactgagcgccgccgaggaccccctggtgcagagcctgagacaggagctgtacgtggaggacttcgccagcatcgactggctggcccagagaaacaacgtggcccccgacgagctgtacaccccccacagctggctgctgagagtggtgtacgccctgctgaacctgtacgagcaccaccacagcgcccacctgagacagagagccgtgcagaagctgtacgagcacatcgtggccgacgacagattcaccaagagcatcagcatcggccccatcagcaagaccatcaacatgctggtgagatggtacgtggacggccccgccagcaccgccttccaggagcacgtgagcagaatccccgactacctgtggatgggcctggacggcatgaagatgcagggcaccaacggcagccagatctgggacaccgccttcgccatccaggccctgctggaggccggcggccaccacagacccgagttcagcagctgcctgcagaaggcccacgagttcctgagactgagccaggtgcccgacaacccccccgactaccagaagtactacagacagatgagaaagggcggcttcagcttcagcaccctggactgcggctggatcgtgagcgactgcaccgccgaggccctgaaggccgtgctgctgctgcaggagaagtgcccccacgtgaccgagcacatccccagagagagactgtgcgacgccgtggccgtgctgctgaacatgagaaaccccgacggcggcttcgccacctacgagaccaagagaggcggccacctgctggagctgctgaaccccagcgaggtgttcggcgacatcatgatcgactacacctacgtggagtgcaccagcgccgtgatgcaggccctgaagtacttccacaagagattccccgagcacagagccgccgagatcagagagaccctgacccagggcctggagttctgcagaagacagcagagagccgacggcagctgggagggcagctggggcgtgtgcttcacctacggcacctggttcggcctggaggccttcgcctgcatgggccagacctacagagacggcaccgcctgcgccgaggtgagcagagcctgcgacttcctgctgagcagacagatggccgacggcggctggggcgaggacttcgagagctgcgaggagagaagatacctgcagagcgcccagagccagatccacaacacctgctgggccatgatgggcctgatggccgtgagacaccccgacatcgaggcccaggagagaggcgtgagatgcctgctggagaagcagctgcccaacggcgactggccccaggagaacatcgccggcgtgttcaacaagagctgcgccatcagctacaccagctacagaaacatcttccccatctgggccctgggcagattcagccagctgtaccccgagagagccctggccggccacccctag

SEQ ID NO: 86534 - DNA, 2199 bp, synthetic construct; identical to SEQ ID NO: 86533
  misc_feature 1..2199: note = Description of Artificial Sequence: Synthetic coding sequence
  source 1..2199: mol_type = other DNA

SEQ ID NO: 86535 - DNA, 1959 bp, synthetic construct
  misc_feature 1..1959: note = Description of Artificial Sequence: Synthetic coding sequence
  source 1..1959: mol_type = other DNA
atgaccttctacgtgggcctgcaggccgaggacggccactggaccggcgactacggcggccccctgttcctgctgcccggcctgctgatcacctgccacgtggccagaatccccctgcccgccggctacagagaggagatcgtgagatacctgagaagcgtgcagctgcccgacggcggctggggcctgcacatcgaggacaagagcaccgtgttcggcaccgccctgaactacgtgagcctgagaatcctgggcgtgggccccgacgaccccgacctggtgagagccagaaacatcctgcacaagaagggcggcgccgtggccatccccagctggggcaagttctggctggccgtgctgaacgtgtacagctgggagggcctgaacaccctgttccccgagatgtggctgttccccgactgggcccccgcccaccccagcaccctgtggtgccactgcagacaggtgtacctgcccatgagctactgctacgccgtgagactgagcgccgccgaggaccccctggtgcagagcctgagacaggagctgtacgtggaggacttcgccagcatcgactggctggcccagagaaacaacgtggcccccgacgagctgtacaccccccacagctggctgctgagagtggtgtacgccctgctgaacctgtacgagcaccaccacagcgcccacctgagacagagagccgtgcagaagctgtacgagcacatcgtggccgacgacagattcaccaagagcatcagcatcggccccatcagcaagaccatcaacatgctggtgagatggtacgtggacggccccgccagcaccgccttccaggagcacgtgagcagaatccccgactacctgtggatgggcctggacggcatgaagatgcagggcaccaacggcagccagatctgggacaccgccttcgccatccaggccctgctggaggccggcggccaccacagacccgagttcagcagctgcctgcagaaggcccacgagttcctgagactgagccaggtgcccgacaacccccccgactaccagaagtactacagacagatgagaaagggcggcttcagcttcagcaccctggactgcggctggatcgtgagcgactgcaccgccgaggccctgaaggccgtgctgctgctgcaggagaagtgcccccacgtgaccgagcacatccccagagagagactgtgcgacgccgtggccgtgctgctgaacatgagaaaccccgacggcggcttcgccacctacgagaccaagagaggcggccacctgctggagctgctgaaccccagcgaggtgttcggcgacatcatgatcgactacacctacgtggagtgcaccagcgccgtgatgcaggccctgaagtacttccacaagagattccccgagcacagagccgccgagatcagagagaccctgacccagggcctggagttctgcagaagacagcagagagccgacggcagctgggagggcagctggggcgtgtgcttcacctacggcacctggttcggcctggaggccttcgcctgcatgggccagacctacagagacggcaccgcctgcgccgaggtgagcagagcctgcgacttcctgctgagcagacagatggccgacggcggctggggcgaggacttcgagagctgcgaggagagaagatacctgcagagcgcccagagccagatccacaacacctgctgggccatgatgggcctgatggccgtgagacaccccgacatcgaggcccaggagagaggcgtgagatgcctgctggagaagcagctgcccaacggcgactggccccaggagaacatcgccggcgtgttcaacaagagctgcgccatcagctacaccagctacagaaacatcttccccatctgggccctgggcagattcagccagctgtaccccgagagagccctggccggccacccctag

SEQ ID NO: 86536 - DNA, 2166 bp, synthetic construct
  misc_feature 1..2166: note = Description of Artificial Sequence: Synthetic coding sequence
  source 1..2166: mol_type = other DNA
atgaccgagggcacctgcctgagaagaagaggcggcccctacaagaccgagcccgccaccgacctgggcagatggagactgaactgcgagagaggcagacagacctggacctacctgcaggacgagagagccggcagagagcagaccggcctggaggcctacgccctgggcctggacaccaagaactacttcaaggacctgcccaaggcccacaccgccttcgagggcgccctgaacggcatgaccttctacgtgggcctgcaggccgaggacggccactggaccggcgactacggcggccccctgttcctgctgcccggcctgctgatcacctgccacgtggccagaatccccctgcccgccggctacagagaggagatcgtgagatacctgagacacatcgaggacaagagcaccgtgttcggcaccgccctgaactacgtgagcctgagaatcctgggcgtgggccccgacgaccccgacctggtgagagccagaaacatcctgcacaagaagggcggcgccgtggccatccccagctggggcaagttctggctggccgtgctgaacgtgtacagctgggagggcctgaacaccctgttccccgagatgtggctgttccccgactgggcccccgcccaccccagcaccctgtggtgccactgcagacaggtgtacctgcccatgagctactgctacgccgtgagactgagcgccgccgaggaccccctggtgcagagcctgagacaggagctgtacgtggaggacttcgccagcatcgactggctggcccagagaaacaacgtggcccccgacgagctgtacaccccccacagctggctgctgagagtggtgtacgccctgctgaacctgtacgagcaccaccacagcgcccacctgagacagagagccgtgcagaagctgtacgagcacatcgtggccgacgacagattcaccaagagcatcagcatcggccccatcagcaagaccatcaacatgctggtgagatggtacgtggacggccccgccagcaccgccttccaggagcacgtgagcagaatccccgactacctgtggatgggcctggacggcatgaagatgcagggcaccaacggcagccagatctgggacaccgccttcgccatccaggccctgctggaggccggcggccaccacagacccgagttcagcagctgcctgcagaaggcccacgagttcctgagactgagccaggtgcccgacaacccccccgactaccagaagtactacagacagatgagaaagggcggcttcagcttcagcaccctggactgcggctggatcgtgagcgactgcaccgccgaggccctgaaggccgtgctgctgctgcaggagaagtgcccccacgtgaccgagcacatccccagagagagactgtgcgacgccgtggccgtgctgctgaacatgagaaaccccgacggcggcttcgccacctacgagaccaagagaggcggccacctgctggagctgctgaaccccagcgaggtgttcggcgacatcatgatcgactacacctacgtggagtgcaccagcgccgtgatgcaggccctgaagtacttccacaagagattccccgagcacagagccgccgagatcagagagaccctgacccagggcctggagttctgcagaagacagcagagagccgacggcagctgggagggcagctggggcgtgtgcttcacctacggcacctggttcggcctggaggccttcgcctgcatgggccagacctacagagacggcaccgcctgcgccgaggtgagcagagcctgcgacttcctgctgagcagacagatggccgacggcggctggggcgaggacttcgagagctgcgaggagagaagatacctgcagagcgcccagagccagatccacaacacctgctgggccatgatgggcctgatggccgtgagacaccccgacatcgaggcccaggagagaggcgtgagatgcctgctggagaagcagctgcccaacggcgactggccccaggagaacatcgccggcgtgttcaacaagagctgcgccatcagctacaccagctacagaaacatcttccccatctgggccctgggcagattcagccagctgtaccccgagagagccctggccggccacccctag

SEQ ID NO: 86537 - DNA, 1977 bp, synthetic construct
  misc_feature 1..1977: note = Description of Artificial Sequence: Synthetic coding sequence
  source 1..1977: mol_type = other DNA
atgggcagaagaagagcccccgccggcggcagcctgggcagagccctgatgagacaccagacccagagaagcagaagccacagacacaccgacagctggctgcacaccagcgagctgaacgacggctacgactggggcagactgaacctgcagagcgtgaccgagcagagcagcctggacgacttcctggccaccgccgagctggccggcaccgagttcgtggccgagaagctgaacatcaagttcgtgcccgccgaggccagaaccggcctgctgagcttcgaggagagccagagaatcaagaagctgcacgaggagaacaagcagttcctgtgcatccccagaagacccaactggaaccagaacaccacccccgaggagctgaagcaggccgagaaggacaacttcctggagtggagaagacagctggtgagactggaggaggagcagaagctgatcctgacccccttcgagagaaacctggacttctggagacagctgtggagagtgatcgagagaagcgacatcgtggtgcagatcgtggacgccagaaaccccctgctgttcagatgcgaggacctggagtgctacgtgaaggagatggacgccaacaaggagaacgtgatcctgatcaacaaggccgacctgctgaccgccgagcagagaagcgcctgggccatgtacttcgagaaggaggacgtgaaggtgatcttctggagcgccctggccggcgccatccccctgaacggcgacagcgaggaggaggccaacagagacgacagacagagcaacaccaccaagttcggccacagcagcttcgaccaggccgagatcagccacagcgagagcgagcacctgcccgccagagacagccccagcctgagcgagaaccccaccaccgacgaggacgacagcgagtacgaggactgccccgaggaggaggaggacgactggcagacctgcagcgaggaggacggccccaaggaggaggactgcagccaggactggaaggagagcagcaccgccgacagcgaggccagaagcagaaagaccccccagaagagacagatccacaacttcagccacctggtgagcaagcaggagctgctggagctgttcaaggagctgcacaccggcagaaaggtgaaggacggccagctgaccgtgggcctggtgggctaccccaacgtgggcaagagcagcaccatcaacaccatcatgggcaacaagaaggtgagcgtgagcgccacccccggccacaccaagcacttccagaccctgtacgtggagcccggcctgtgcctgtgcgactgccccggcctggtgatgcccagcttcgtgagcaccaaggccgagatgacctgcagcggcatcctgcccatcgaccagatgagagaccacgtgccccccgtgagcctggtgtgccagaacatccccagacacgtgctggaggccacctacggcatcaacatcatcacccccagagaggacgaggacccccacagaccccccaccagcgaggagctgctgaccgcctacggctacatgagaggcttcatgaccgcccacggccagcccgaccagcccagaagcgccagatacatcctgaaggactacgtgagcggcaagctgctgtactgccaccccccccccggcagagaccccgtgaccttccagcaccagcaccagagactgctggagaacaagatgaacagcgacgagatcaagatgcagctgggcagaaacaagaaggccaagcagatcgagaacatcgtggacaagaccttcttccaccaggagaacgtgagagccctgaccaagggcgtgcaggccgtgatgggctacaagcccggcagcggcgtggtgaccgccagcaccgccagcagcgagaacggcgccggcaagccctggaagaagcacggcaacagaaacaagaaggagaagagcagaagactgtacaagcacctggacatgtag

SEQ ID NO: 86538 - DNA, 333 bp, synthetic construct
  misc_feature 1..333: note = Description of Artificial Sequence: Synthetic coding sequence
  source 1..333: mol_type = other DNA
atgagctgccagcagagccagcagcagtgccagcccccccccaagtgcacccccaagtgcccccccaagtgccccacccccaagtgcccccccaagtgcccccccaagtgcccccccgtgagcagctgctgcagcgtgagcagcggcggctgctgcggcagcagcagcggcggcggctgcagcagcggcggcggcggctgctgcctgagccaccacagaagacacagaagccacagacacagactgcagagcagcggctgctgcagccagcccagcggcggcagcagctgctgcggcggcgacagcggccagcacagcggcggctgctgctag

SEQ ID NO: 86539 - DNA, 333 bp, synthetic construct; identical to SEQ ID NO: 86538
  misc_feature 1..333: note = Description of Artificial Sequence: Synthetic coding sequence
  source 1..333: mol_type = other DNA

SEQ ID NO: 86540 - DNA, 357 bp, synthetic construct
  misc_feature 1..357: note = Description of Artificial Sequence: Synthetic coding sequence
  source 1..357: mol_type = other DNA
atgagctgccagcagaaccagcagcagtgccagcccccccccaagtgcatccccaagtgcccccccaagtgcctgacccccagatgcccccccaagtgcccccccaagtgcccccccgtgagcagctgctgcagcgtgagcagcggcggctgctgcggcagcagcagcggcggcagctgcggcagcagcagcggcggctgctgcagcagcggcggcggcggctgctgcctgagccaccacagaagaagaagaagccactgccacagaccccagagcagcggctgctgcagccagcccagcggcggcagcagctgctgcggcggcggcagcggccagcacagcggcggctgctgctag

SEQ ID NO: 86541 - DNA, 333 bp, synthetic construct
  misc_feature 1..333: note = Description of Artificial Sequence: Synthetic coding sequence
  source 1..333: mol_type = other DNA
atgagctgccagcagaaccagcagcagtgccagcccccccccaagtgcatccccaagtgcccccccaagtgcctgacccccagatgcccccccaagtgcccccccaagtgcccccccgtgagcagctgctgcagcgtgagcagcggcggctgctgcggcagcagcagcggcggctgctgcagcagcggcggcggcggctgctgcctgagccaccacagaagaagaagaagccactgccacagaccccagagcagcggctgctgcagccagcccagcggcggcagcagctgctgcggcggcggcagcggccagcacagcggcggctgctgctag

SEQ ID NO: 86542 - DNA, 357 bp, synthetic construct
  misc_feature 1..357: note = Description of Artificial Sequence: Synthetic coding sequence
  source 1..357: mol_type = other DNA
atgagctgccagcagagccagcagcagtgccagcccccccccaagtgcacccccaagtgcccccccaagtgccccacccccaagtgcccccccaagtgcccccccaagtgcccccccgtgagcagctgctgcagcgtgagcagcggcggctgctgcggcagcagcagcggcggcagctgcggcagcagcagcggcggctgctgcagcagcggcggcggcggctgctgcctgagccaccacagaagaagaagaagccactgccacagaccccagagcagcggctgctgcagccagcccagcggcggcagcagctgctgcggcggcggcagcggccagcacagcggcggctgctgctag

SEQ ID NO: 86543 - DNA, 345 bp, synthetic construct
  misc_feature 1..345: note = Description of Artificial Sequence: Synthetic coding sequence
  source 1..345: mol_type = other DNA
atgagctgccagcagagccagcagcagtgccagcccccccccaagtgcacccccaagtgcacccccaagtgccccgcccccaagtgcccccccaagtgcccccccgtgagcagctgctgcagcgtgagcagcggcggctgctgcggcagcagcagcggcggcggctgcggcagcaacagcggcggctgctgcagcagcggcggcggcggctgctgcctgagccaccacagaagacacagaagccacagaagaagaccccagagcagcgactgctgcagccagcccagcggcggcagcagctgctgcggcggcggcagcagccagcacagcggcggctgctgctag

SEQ ID NO: 86544 - DNA, 357 bp, synthetic construct
  misc_feature 1..357: note = Description of Artificial Sequence: Synthetic coding sequence
  source 1..357: mol_type = other DNA
atgagctgccagcagagccagcagcagtgccagcccccccccaagtgcacccccaagtgcccccccaagtgccccacccccaagtgcccccccaagtgcccccccaagtgcccccccgtgagcagctgctgcagcgtgagcagcggcggctgctgcggcagcagcagcggcggcagctgcggcagcagcagcggcggctgctgcagcagcggcggcggcggctgctgcctgagccaccacagacaccacagaagccacagacacagaccccagagcagcgactgctgcagccagcccagcggcggcagcagctgctgcggcggcggcagcggccagcacagcggcggctgctgctag

SEQ ID NO: 86545 - DNA, 357 bp, synthetic construct; identical to SEQ ID NO: 86544
  misc_feature 1..357: note = Description of Artificial Sequence: Synthetic coding sequence
  source 1..357: mol_type = other DNA

SEQ ID NO: 86546 - DNA, 357 bp, synthetic construct
  misc_feature 1..357: note = Description of Artificial Sequence: Synthetic coding sequence
  source 1..357: mol_type = other DNA
atgagctgccagcagagccagcagcagtgccagcccccccccaagtgcacccccaagtgcccccccaagtgccccacccccaagtgcccccccaagtgcccccccaagtgcccccccgtgagcagctgctgcagcgtgagcagcggcggctgctgcggcagcagcagcggcggctgctgcagcagcggcggcggcggctgctgcagcagcggcggcggcggctgctgcctgagccaccacagaagaagaagaagccacagacacagaccccagagcagcgactgctgcagccagcccagcgccggcagcagctgctgcggcggcggcagcggccagcacagcggcggctgctgctag

SEQ ID NO: 86547 - DNA, 321 bp, synthetic construct
  misc_feature 1..321: note = Description of Artificial Sequence: Synthetic coding sequence
  source 1..321: mol_type = other DNA
atgagctgccagcagaaccagcagcagtgccagcccccccccaagtgcccccccaagtgcccccccaagtgcccccccaagtgcagaccccagtgccccgccccctgccccccccccgtgagcagctgctgcggccccagcagcggcggctgctgcggcagcagcagcggcggctgctgcagcagcggcggcggcggctgctgcctgagccaccacagacccagactgttccacagacacagacaccagagccccgactgctgcgagtgcgagcccagcggcggcagcggctgctgccacagcagcggcgactgctgctag

SEQ ID NO: 86548 - DNA, 333 bp, synthetic construct
  misc_feature 1..333: note = Description of Artificial Sequence: Synthetic coding sequence
  source 1..333: mol_type = other DNA
atgagctgccagcagaaccagcagcagtgccagcccccccccaagtgcccccccaagtgcacccccaagtgcccccccaagtgcccccccaagtgcctgccccagtgccccgccccctgcagccccgccgtgagcagctgctgcggccccatcagcggcggctgctgcggccccagcagcggcggctgctgcaacagcggcgccggcggctgctgcctgagccaccacagacccagactgttccacagaagaagacaccagagccccgactgctgcgagagcgagcccagcggcggcagcggctgctgccacagcagcggcggctgctgctag

SEQ ID NO: 86549 - DNA, 333 bp, synthetic construct; identical to SEQ ID NO: 86548
  misc_feature 1..333: note = Description of Artificial Sequence: Synthetic coding sequence
  source 1..333: mol_type = other DNA

SEQ ID NO: 86550 - DNA, 333 bp, synthetic construct
  misc_feature 1..333: note = Description of Artificial Sequence: Synthetic coding sequence
  source 1..333: mol_type = other DNA
atgagctgccagcagaaccagcagcagtgccagcccccccccaagtgcccccccaagtgcacccccaagtgcccccccaagtgcccccccaagtgccccccccagtgccccgccccctgcttccccgccgtgagcagctgctgcggccccagcagcggcagctgctgcggccccagcagcggcggctgctgcagcagcggcgccggcggctgcagcctgagccaccacagacccagactgttccacagaagaagacaccagagccccgactgctgcgagagcgagcccagcggcggcagcggctgctgccacagcagcggcggctgctgctag

SEQ ID NO: 86551 - DNA, 333 bp, synthetic construct
  misc_feature 1..333: note = Description of Artificial Sequence: Synthetic coding sequence
  source 1..333: mol_type = other DNA
atgagctgccagcagaaccagcagcagtgccagcccccccccaagtgcccccccaagtgcacccccaagtgcccccccaagtgcccccccaagtgccccccccagtgccccgccccctgcagccccgccgtgagcagctgctgcggccccagcagcggcagctgctgcggccccagcagcggcggctgctgcagcagcggcggcggcggctgctgcctgagccaccacagacccagactgttccacagaagaagacaccagagccccgactgctgcgagagcgagcccagcggcgccagcggctgctgccacagcagcggcggctgctgctag

SEQ ID NO: 86552 - DNA, 270 bp, synthetic construct
  misc_feature 1..270: note = Description of Artificial Sequence: Synthetic coding sequence
  source 1..270: mol_type = other DNA
atgagctgccagcagaaccagcagcagtgccagcccccccccaagtgccccgccaagagccccgcccagtgcctgccccccgccagcagcagctgcgcccccagcagcggcggctgcggccccagcagcgagagaagctgctgcctgagccaccacagatgcagaagaagccacagatgcagatgccagagcagcaacagctgcgacagaggcagcggccagcagggcggcagcagcagctgcggccacagcagcgccggctgctgctag

SEQ ID NO: 86553 - DNA, 288 bp, synthetic construct
  misc_feature 1..288: note = Description of Artificial Sequence: Synthetic coding sequence
  source 1..288: mol_type = other DNA
atgagctgccagcagaaccagcagcagtgccagcccctgcccaagtgccccagccccaagtgcccccccaagagcagcgcccagtgcctgccccccgccagcagctgctgcgcccccagacccggctgctgcggcggccccagcagcgagggcggctgctgcctgagccaccacagatgctgcagaagccacagatgcagaagacagagcagcaacagctgcgacagaggcagcggccagcaggacggcgccagcgactgcggctacggcagcggcggctgctgctag

SEQ ID NO: 86554 - DNA, 285 bp, synthetic construct
  misc_feature 1..285: note = Description of Artificial Sequence: Synthetic coding sequence
  source 1..285: mol_type = other DNA
atgagctgccagcagaaccagcagcagtgccagcccccccccagctgccccagccccaagtgcccccccaagagccccgcccagtgcctgcccccccccagcagcgactgcgccctgagcagcggcggctgcggccccagcagcgagagcggctgctgcctgagccaccacagacacttcagaagccaccagtgcagaagacagagaagcaacagctgcgacagaggcagcggccagcagggcggcggcagctgcagaggccacggcagcggcggctgctgctag

SEQ ID NO: 86555 - DNA, 279 bp, synthetic construct
  misc_feature 1..279: note = Description of Artificial Sequence: Synthetic coding sequence
  source 1..279: mol_type = other DNA
atgagctgccagcagaaccagcagcagtgccagcccccccccaagtgccccagccccaagtgcccccccaagagccccgtgcagtgcctgccccccgccagcagcggctgcgcccccagcagcggcggctgcggccccagcagcgagggcggctgcttcctgaaccaccacagaagacaccacagatgcagaagacagagacccaacagctgcgacagaggcagcggccagcagggcggcggcagcggctgcggccacggcagcggcggctgctgctag

SEQ ID NO: 86556 - DNA, 279 bp, synthetic construct
  misc_feature 1..279: note = Description of Artificial Sequence: Synthetic coding sequence
  source 1..279: mol_type = other DNA
atgagctgccagcagaaccagaagcagtgccagcccccccccaagtgccccagccccaagtgcccccccaagaaccccgtgcagtgcctgccccccgccagcagcggctgcgcccccagcagcggcggctgcggccccagcagcgagggcggctgcttcctgaaccaccacagaagacaccacagatgcagaagacagagaagcaacagctgcgacagaggcagcggccagcagggcggcggcagcggctgctgccacggcagcggcggctgctgctag

SEQ ID NO: 86557 - DNA, 300 bp, synthetic construct
  misc_feature 1..300: note = Description of Artificial Sequence: Synthetic coding sequence
  source 1..300: mol_type = other DNA
atgagctgccagcagaaccagcagcagtgccagcccccccccaagtgccccatccccaagtacccccccaagtgccccagcaagtgcgccagcagctgccccccccccatcagcagctgctgcggcagcagcagcggcggctgcggctgctgcagcagcgagggcggcggctgctgcctgagccaccacagacaccacagaagccactgccacagacccaagagcagcaactgctacggcagcggcagcggccagcagagcggcggcagcggctgctgcagcggcggcggctgctgctag

SEQ ID NO: 86558 - DNA, 300 bp, synthetic construct; identical to SEQ ID NO: 86557
  misc_feature 1..300: note = Description of Artificial Sequence: Synthetic coding sequence
  source 1..300: mol_type = other DNA

SEQ ID NO: 86559 - DNA, 357 bp, synthetic construct
  misc_feature 1..357: note = Description of Artificial Sequence: Synthetic coding sequence
  source 1..357: mol_type = other DNA
atgagctgccagcagagccagcagcagtgccagcccccccccaagtgcacccccaagtgcccccccaagtgcacccccaagtgcccccccaagtgcccccccaagtgccccccccagtgcagcgccccctgccccccccccgtgagcagctgctgcggcagcagcagcggcggctgctgcagcagcgagggcggcggctgctgcctgagccaccacagacccagacagagcctgagaagaagaccccagagcagcagctgctgcggcagcggcagcggccagcagagcggcggcagcagctgctgccacagcagcggcggcagcggctgctgccacagcagcggcggctgctgctag

SEQ ID NO: 86560 - DNA, 297 bp, synthetic construct
  misc_feature 1..297: note = Description of Artificial Sequence: Synthetic coding sequence
  source 1..297: mol_type = other DNA
atgagcagcgacgacaagagcaagagcaacgaccccaagaccgagcccaagaactgcgaccccaagtgcgagcagaagtgcgagagcaagtgccagcccagctgcctgaagaagctgctgcagagatgcttcgagaagtgcccctgggagaagtgccccgccccccccaagtgcctgccctgccccagccagagccccagcagctgccccccccagccctgcaccaagccctgcccccccaagtgccccagcagctgcccccacgcctgcccccccccctgccccccccccgagtag

SEQ ID NO: 86561 - DNA, 1860 bp, synthetic construct
  misc_feature 1..1860: note = Description of Artificial Sequence: Synthetic coding sequence
  source 1..1860: mol_type = other DNA
atgtgcagctgccacaagggctacaccagaacccccgaccacaagcactgcagagacatcgacgagtgccagcagggcaacctgtgcgtgaacggccagtgcaagaacaccgagggcagcttcagatgcacctgcggccagggctaccagctgagcgccgccaaggaccagtgcgaggacatcgacgagtgccagcacagacacctgtgcgcccacggccagtgcagaaacaccgagggcagcttccagtgcgtgtgcgaccagggctacagagccagcggcctgggcgaccactgcgaggacatcaacgagtgcctggaggacaagagcgtgtgccagagaggcgactgcatcaacaccgccggcagctacgactgcacctgccccgacggcttccagctggacgacaacaagacctgccaggacatcaacgagtgcgagcaccccggcctgtgcggcccccagggcgagtgcctgaacaccgagggcagcttccactgcgtgtgccagcagggcttcagcatcagcgccgacggcagaacctgcgaggacgtgaacgagtgcgagctgctgagcggcgtgtgcggcgaggccttctgcgagaacgtggagggcagcttcctgtgcgtgtgcgccgacgagaaccaggagtacagccccatgaccggccagtgcagaagcagaaccagcaccgacctggacgtggacgtggaccagcccaaggaggagaagaaggagtgctactacaacctgaacgacgccagcctgtgcgacaacgtgctggcccccaacgtgaccaagcaggagtgctgctgcaccagcggcgtgggctggggcgacaactgcgagatcttcccctgccccgtgctgggcaccgccgagttcaccgagatgtgccccaagggcaagggcttcgtgcccgccggcgagagcagcagcgaggccggcggcgagaactacaaggacgccgacgagtgcctgctgttcggccaggagatctgcaagaacggcttctgcctgaacaccagacccggctacgagtgctactgcaagcagggcacctactacgaccccgtgaagctgcagtgcttcgacatggacgagtgccaggaccccagcagctgcatcgacggccagtgcgtgaacaccgagggcagctacaactgcttctgcacccaccccatggtgctggacgccagcgagaagagatgcatcagacccgccgagagcaacgagcagatcgaggagaccgacgtgtaccaggacctgtgctgggagcacctgagcgacgagtacgtgtgcagcagacccctggtgggcaagcagaccacctacaccgagtgctgctgcctgtacggcgaggcctggggcatgcagtgcgccctgtgccccctgaaggacagcgacgactacgcccagctgtgcaacatccccgtgaccggcagaagacagccctacggcagagacgccctggtggacttcagcgagcagtacacccccgaggccgacccctacttcatccaggacagattcctgaacagcttcgaggagctgcaggccgaggagtgcggcatcctgaacggctgcgagaacggcagatgcgtgagagtgcaggagggctacacctgcgactgcttcgacggctaccacctggacaccgccaagatgacctgcgtggacgtgaacgagtgcgacgagctgaacaacagaatgagcctgtgcaagaacgccaagtgcatcaacaccgacggcagctacaagtgcctgtgcctgcccggctacgtgcccagcgacaagcccaactactgcacccccctgaacaccgccctgaacctggagaaggacagcgacctggagtag

SEQ ID NO: 86562 - DNA, 5169 bp, synthetic construct
  misc_feature 1..5169: note = Description of Artificial Sequence: Synthetic coding sequence
  source 1..5169: mol_type = other DNA
atggccggcgcctggctgagatggggcctgctgctgtgggccggcctgctggccagcagcgcccacggcagactgagaagaatcacctacgtggtgcaccccggccccggcctggccgccggcgccctgcccctgagcggcccccccagaagcagaaccttcaacgtggccctgaacgccagatacagcagaagcagcgccgccgccggcgcccccagcagagccagccccggcgtgcccagcgagagaaccagaagaaccagcaagcccggcggcgccgccctgcagggcctgagacccccccccccccccccccccgagcccgccagacccgccgtgcccggcggccagctgcaccccaaccccggcggccaccccgccgccgcccccttcaccaagcagggcagacaggtggtgagaagcaaggtgccccaggagacccagagcggcggcggcagcagactgcaggtgcaccagaagcagcagctgcagggcgtgaacgtgtgcggcggcagatgctgccacggctggagcaaggcccccggcagccagagatgcaccaagcccagctgcgtgcccccctgccagaacggcggcatgtgcctgagaccccagctgtgcgtgtgcaagcccggcaccaagggcaaggcctgcgagaccatcgccgcccaggacaccagcagccccgtgttcggcggccagagccccggcgccgccagcagctggggcccccccgagcaggccgccaagcacaccagcagcaagaaggccgacaccctgcccagagtgagccccgtggcccagatgaccctgaccctgaagcccaagcccagcgtgggcctgccccagcagatccacagccaggtgacccccctgagcagccagagcgtggtgatccaccacggccagacccaggagtacgtgctgaagcccaagtacttccccgcccagaagggcatcagcggcgagcagagcaccgagggcagcttccccctgagatacgtgcaggaccaggtggccgcccccttccagctgagcaaccacaccggcagaatcaaggtggtgttcacccccagcatctgcaaggtgacctgcaccaagggcagctgccagaacagctgcgagaagggcaacaccaccaccctgatcagcgagaacggccacgccgccgacaccctgaccgccaccaacttcagagtggtgatctgccacctgccctgcatgaacggcggccagtgcagcagcagagacaagtgccagtgcccccccaacttcaccggcaagctgtgccagatccccgtgcacggcgccagcgtgcccaagctgtaccagcacagccagcagcccggcaaggccctgggcacccacgtgatccacagcacccacaccctgcccctgaccgtgaccagccagcagggcgtgaaggtgaagttcccccccaacatcgtgaacatccacgtgaagcacccccccgaggccagcgtgcagatccaccaggtgagcagaatcgacggccccaccggccagaagaccaaggaggcccagcccggccagagccaggtgagctaccagggcctgcccgtgcagaagacccagaccatccacagcacctacagccaccagcaggtgatcccccacgtgtaccccgtggccgccaagacccagctgggcagatgcttccaggagaccatcggcagccagtgcggcaaggccctgcccggcctgagcaagcaggaggactgctgcggcaccgtgggcaccagctggggcttcaacaagtgccagaagtgccccaagaagcccagctaccacggctacaaccagatgatggagtgcctgcccggctacaagagagtgaacaacaccttctgccaggacatcaacgagtgccagctgcagggcgtgtgccccaacggcgagtgcctgaacaccatgggcagctacagatgcacctgcaagatcggcttcggccccgaccccaccttcagcagctgcgtgcccgacccccccgtgatcagcgaggagaagggcccctgctacagactggtgagcagcggcagacagtgcatgcaccccctgagcgtgcacctgaccaagcagctgtgctgctgcagcgtgggcaaggcctggggcccccactgcgagaagtgccccctgcccggcaccgccgccttcaaggagatctgccccggcggcatgggctacaccgtgagcggcgtgcacagaagaagacccatccaccaccacgtgggcaagggccccgtgttcgtgaagcccaagaacacccagcccgtggccaagagcacccaccccccccccctgcccgccaaggaggagcccgtggaggccctgaccttcagcagagagcacggccccggcgtggccgagcccgaggtggccaccgccccccccgagaaggagatccccagcctggaccaggagaagaccaagctggagcccggccagccccagctgagccccggcatcagcaccatccacctgcacccccagttccccggcatcgtgatcgagaagaccagcccccccgtgcccgtggaggtggcccccgaggccagcaccagcagcgccagccaggtgatcgcccccacccaggtgaccgagatcaacgagtgcaccgtgaaccccgacatctgcggcgccggccactgcatcaacctgcccgtgagatacacctgcatctgctacgagggctacagattcagcgagcagcagagaaagtgcgtggacatcgacgagtgcacccaggtgcagcacctgtgcagccagggcagatgcgagaacaccgagggcagcttcctgtgcatctgccccgccggcttcatggccagcgaggagggcaccaactgcatcgacgtggacgagtgcctgagacccgacgtgtgcggcgagggccactgcgtgaacaccgtgggcgccttcagatgcgagtactgcgacagcggctacagaatgacccagagaggcagatgcgaggacatcgacgagtgcctgaaccccagcacctgccccgacgagcagtgcgtgaacagccccggcagctaccagtgcgtgccctgcaccgagggcttcagaggctggaacggccagtgcctggacgtggacgagtgcctggagcccaacgtgtgcgccaacggcgactgcagcaacctggagggcagctacatgtgcagctgccacaagggctacaccagaacccccgaccacaagcactgcagagacatcgacgagtgccagcagggcaacctgtgcgtgaacggccagtgcaagaacaccgagggcagcttcagatgcacctgcggccagggctaccagctgagcgccgccaaggaccagtgcgaggacatcgacgagtgccagcacagacacctgtgcgcccacggccagtgcagaaacaccgagggcagcttccagtgcgtgtgcgaccagggctacagagccagcggcctgggcgaccactgcgaggacatcaacgagtgcctggaggacaagagcgtgtgccagagaggcgactgcatcaacaccgccggcagctacgactgcacctgccccgacggcttccagctggacgacaacaagacctgccaggacatcaacgagtgcgagcaccccggcctgtgcggcccccagggcgagtgcctgaacaccgagggcagcttccactgcgtgtgccagcagggcttcagcatcagcgccgacggcagaacctgcgaggacatcgacgagtgcgtgaacaacaccgtgtgcgacagccacggcttctgcgacaacaccgccggcagcttcagatgcctgtgctaccagggcttccaggccccccaggacggccagggctgcgtggacgtgaacgagtgcgagctgctgagcggcgtgtgcggcgaggccttctgcgagaacgtggagggcagcttcctgtgcgtgtgcgccgacgagaaccaggagtacagccccatgaccggccagtgcagaagcagaaccagcaccgacctggacgtggacgtggaccagcccaaggaggagaagaaggagtgctactacaacctgaacgacgccagcctgtgcgacaacgtgctggcccccaacgtgaccaagcaggagtgctgctgcaccagcggcgtgggctggggcgacaactgcgagatcttcccctgccccgtgctgggcaccgccgagttcaccgagatgtgccccaagggcaagggcttcgtgcccgccggcgagagcagcagcgaggccggcggcgagaactacaaggacgccgacgagtgcctgctgttcggccaggagatctgcaagaacggcttctgcctgaacaccagacccggctacgagtgctactgcaagcagggcacctactacgaccccgtgaagctgcagtgcttcgacatggacgagtgccaggaccccagcagctgcatcgacggccagtgcgtgaacaccgagggcagctacaactgcttctgcacccaccccatggtgctggacgccagcgagaagagatgcatcagacccgccgagagcaacgagcagatcgaggagaccgacgtgtaccaggacctgtgctgggagcacctgagcgacgagtacgtgtgcagcagacccctggtgggcaagcagaccacctacaccgagtgctgctgcctgtacggcgaggcctggggcatgcagtgcgccctgtgccccctgaaggacagcgacgactacgcccagctgtgcaacatccccgtgaccggcagaagacagccctacggcagagacgccctggtggacttcagcgagcagtacacccccgaggccgacccctacttcatccaggacagattcctgaacagcttcgaggagctgcaggccgaggagtgcggcatcctgaacggctgcgagaacggcagatgcgtgagagtgcaggagggctacacctgcgactgcttcgacggctaccacctggacaccgccaagatgacctgcgtggacgtgaacgagtgcgacgagctgaacaacagaatgagcctgtgcaagaacgccaagtgcatcaacaccgacggcagctacaagtgcctgtgcctgcccggctacgtgcccagcgacaagcccaactactgcacccccctgaacaccgccctgaacctggagaaggacagcgacctggagtag

SEQ ID NO: 86563 - DNA, 4191 bp, synthetic construct
  misc_feature 1..4191: note = Description of Artificial Sequence: Synthetic coding sequence
  source 1..4191: mol_type = other DNA
atggacaccaagctgatgtgcctgctgttcttcttcagcctgccccccctgctggtgagcaaccacaccggcagaatcaaggtggtgttcacccccagcatctgcaaggtgacctgcaccaagggcagctgccagaacagctgcgagaagggcaacaccaccaccctgatcagcgagaacggccacgccgccgacaccctgaccgccaccaacttcagagtggtgatctgccacctgccctgcatgaacggcggccagtgcagcagcagagacaagtgccagtgcccccccaacttcaccggcaagctgtgccagatccccgtgcacggcgccagcgtgcccaagctgtaccagcacagccagcagcccggcaaggccctgggcacccacgtgatccacagcacccacaccctgcccctgaccgtgaccagccagcagggcgtgaaggtgaagttcccccccaacatcgtgaacatccacgtgaagcacccccccgaggccagcgtgcagatccaccaggtgagcagaatcgacggccccaccggccagaagaccaaggaggcccagcccggccagagccaggtgagctaccagggcctgcccgtgcagaagacccagaccatccacagcacctacagccaccagcaggtgatcccccacgtgtaccccgtggccgccaagacccagctgggcagatgcttccaggagaccatcggcagccagtgcggcaaggccctgcccggcctgagcaagcaggaggactgctgcggcaccgtgggcaccagctggggcttcaacaagtgccagaagtgccccaagaagcccagctaccacggctacaaccagatgatggagtgcctgcccggctacaagagagtgaacaacaccttctgccaggacatcaacgagtgccagctgcagggcgtgtgccccaacggcgagtgcctgaacaccatgggcagctacagatgcacctgcaagatcggcttcggccccgaccccaccttcagcagctgcgtgcccgacccccccgtgatcagcgaggagaagggcccctgctacagactggtgagcagcggcagacagtgcatgcaccccctgagcgtgcacctgaccaagcagctgtgctgctgcagcgtgggcaaggcctggggcccccactgcgagaagtgccccctgcccggcaccgccgccttcaaggagatctgccccggcggcatgggctacaccgtgagcggcgtgcacagaagaagacccatccaccaccacgtgggcaagggccccgtgttcgtgaagcccaagaacacccagcccgtggccaagagcacccaccccccccccctgcccgccaaggaggagcccgtggaggccctgaccttcagcagagagcacggccccggcgtggccgagcccgaggtggccaccgccccccccgagaaggagatccccagcctggaccaggagaagaccaagctggagcccggccagccccagctgagccccggcatcagcaccatccacctgcacccccagttccccggcatcgtgatcgagaagaccagcccccccgtgcccgtggaggtggcccccgaggccagcaccagcagcgccagccaggtgatcgcccccacccaggtgaccgagatcaacgagtgcaccgtgaaccccgacatctgcggcgccggccactgcatcaacctgcccgtgagatacacctgcatctgctacgagggctacagattcagcgagcagcagagaaagtgcgtggacatcgacgagtgcacccaggtgcagcacctgtgcagccagggcagatgcgagaacaccgagggcagcttcctgtgcatctgccccgccggcttcatggccagcgaggagggcaccaactgcatcgacgtggacgagtgcctgagacccgacgtgtgcggcgagggccactgcgtgaacaccgtgggcgccttcagatgcgagtactgcgacagcggctacagaatgacccagagaggcagatgcgaggacatcgacgagtgcctgaaccccagcacctgccccgacgagcagtgcgtgaacagccccggcagctaccagtgcgtgccctgcaccgagggcttcagaggctggaacggccagtgcctggacgtggacgagtgcctggagcccaacgtgtgcgccaacggcgactgcagcaacctggagggcagctacatgtgcagctgccacaagggctacaccagaacccccgaccacaagcactgcagagacatcgacgagtgccagcagggcaacctgtgcgtgaacggccagtgcaagaacaccgagggcagcttcagatgcacctgcggccagggctaccagctgagcgccgccaaggaccagtgcgaggacatcgacgagtgccagcacagacacctgtgcgcccacggccagtgcagaaacaccgagggcagcttccagtgcgtgtgcgaccagggctacagagccagcggcctgggcgaccactgcgaggacatcaacgagtgcctggaggacaagagcgtgtgccagagaggcgactgcatcaacaccgccggcagctacgactgcacctgccccgacggcttccagctggacgacaacaagacctgccaggacatcaacgagtgcgagcaccccggcctgtgcggcccccagggcgagtgcctgaacaccgagggcagcttccactgcgtgtgccagcagggcttcagcatcagcgccgacggcagaacctgcgaggacatcgacgagtgcgtgaacaacaccgtgtgcgacagccacggcttctgcgacaacaccgccggcagcttcagatgcctgtgctaccagggcttccaggccccccaggacggccagggctgcgtggacgtgaacgagtgcgagctgctgagcggcgtgtgcggcgaggccttctgcgagaacgtggagggcagcttcctgtgcgtgtgcgccgacgagaaccaggagtacagccccatgaccggccagtgcagaagcagaaccagcaccgacctggacgtggacgtggaccagcccaaggaggagaagaaggagtgctactacaacctgaacgacgccagcctgtgcgacaacgtgctggcccccaacgtgaccaagcaggagtgctgctgcaccagcggcgtgggctggggcgacaactgcgagatcttcccctgccccgtgctgggcaccgccgagttcaccgagatgtgccccaagggcaagggcttcgtgcccgccggcgagagcagcagcgaggccggcggcgagaactacaaggacgccgacgagtgcctgctgttcggccaggagatctgcaagaacggcttctgcctgaacaccagacccggctacgagtgctactgcaagcagggcacctactacgaccccgtgaagctgcagtgcttcgacatggacgagtgccaggaccccagcagctgcatcgacggccagtgcgtgaacaccgagggcagctacaactgcttctgcacccaccccatggtgctggacgccagcgagaagagatgcatcagacccgccgagagcaacgagcagatcgaggagaccgacgtgtaccaggacctgtgctgggagcacctgagcgacgagtacgtgtgcagcagacccctggtgggcaagcagaccacctacaccgagtgctgctgcctgtacggcgaggcctggggcatgcagtgcgccctgtgccccctgaaggacagcgacgactacgcccagctgtgcaacatccccgtgaccggcagaagacagccctacggcagagacgccctggtggacttcagcgagcagtacacccccgaggccgacccctacttcatccaggacagattcctgaacagcttcgaggagctgcaggccgaggagtgcggcatcctgaacggctgcgagaacggcagatgcgtgagagtgcaggagggctacacctgcgactgcttcgacggctaccacctggacaccgccaagatgacctgcgtggacgtgaacgagtgcgacgagctgaacaacagaatgagcctgtgcaagaacgccaagtgcatcaacaccgacggcagctacaagtgcctgtgcctgcccggctacgtgcccagcgacaagcccaactactgcacccccctgaacaccgccctgaacctggagaaggacagcgacctggagtag

SEQ ID NO: 86564 - DNA, 5166 bp, synthetic construct
  misc_feature 1..5166: note = Description of Artificial Sequence: Synthetic coding sequence
  source 1..5166: mol_type = other DNA
atggccggcgcctggctgagatggggcctgctgctgtgggccggcctgctggccagcagcgcccacggcagactgagaagaatcacctacgtggtgcaccccggccccggcctggccgccggcgccctgcccctgagcggcccccccagaagcagaaccttcaacgtggccctgaacgccagatacagcagaagcagcgccgccgccggcgcccccagcagagccagccccggcgtgcccagcgagagaaccagaagaaccagcaagcccggcggcgccgccctgcagggcctgagacccccccccccccccccccccgagcccgccagacccgccgtgcccggcggccagctgcaccccaaccccggcggccaccccgccgccgcccccttcaccaagcagggcagacaggtggtgagaagcaaggtgccccaggagacccagagcggcggcggcagcagactgcaggtgcaccagaagcagcagctgcagggcgtgaacgtgtgcggcggcagatgctgccacggctggagcaaggcccccggcagccagagatgcaccaagcccagctgcgtgcccccctgccagaacggcggcatgtgcctgagaccccagctgtgcgtgtgcaagcccggcaccaagggcaaggcctgcgagaccatcgccgcccaggacaccagcagccccgtgttcggcggccagagccccggcgccgccagcagctggggcccccccgagcaggccgccaagcacaccagcagcaagaaggccgacaccctgcccagagtgagccccgtggcccagatgaccctgaccctgaagcccaagcccagcgtgggcctgccccagcagatccacagccaggtgacccccctgagcagccagagcgtggtgatccaccacggccagacccaggagtacgtgctgaagcccaagtacttccccgcccagaagggcatcagcggcgagcagagcaccgagggcagcttccccctgagatacgtgcaggaccaggtggccgcccccttccagctgagcaaccacaccggcagaatcaaggtggtgttcacccccagcatctgcaaggtgacctgcaccaagggcagctgccagaacagctgcgagaagggcaacaccaccaccctgatcagcgagaacggccacgccgccgacaccctgaccgccaccaacttcagagtggtgatctgccacctgccctgcatgaacggcggccagtgcagcagcagagacaagtgccagtgcccccccaacttcaccggcaagctgtgccagatccccgtgcacggcgccagcgtgcccaagctgtaccagcacagccagcagcccggcaaggccctgggcacccacgtgatccacagcacccacaccctgcccctgaccgtgaccagccagcagggcgtgaaggtgaagttcccccccaacatcgtgaacatccacgtgaagcacccccccgaggccagcgtgcagatccaccaggtgagcagaatcgacggccccaccggccagaagaccaaggaggcccagcccggccagagccaggtgagctaccagggcctgcccgtgcagaagacccagaccatccacagcacctacagccaccagcaggtgatcccccacgtgtaccccgtggccgccaagacccagctgggcagatgcttccaggagaccatcggcagccagtgcggcaaggccctgcccggcctgagcaagcaggaggactgctgcggcaccgtgggcaccagctggggcttcaacaagtgccagaagtgccccaagaagcccagctaccacggctacaaccagatgatggagtgcctgcccggctacaagagagtgaacaacaccttctgccaggacatcaacgagtgccagctgcagggcgtgtgccccaacggcgagtgcctgaacaccatgggcagctacagatgcacctgcaagatcggcttcggccccgaccccaccttcagcagctgcgtgcccgacccccccgtgatcagcgaggagaagggcccctgctacagactggtgagcagcggcagacagtgcatgcaccccctgagcgtgcacctgaccaagcagctgtgctgctgcagcgtgggcaaggcctggggcccccactgcgagaagtgccccctgcccggcaccgccgccttcaaggagatctgccccggcggcatgggctacaccgtgagcggcgtgcacagaagaagacccatccaccaccacgtgggcaagggccccgtgttcgtgaagcccaagaacacccagcccgtggccaagagcacccaccccccccccctgcccgccaaggaggagcccgtggaggccctgaccttcagcagagagcacggccccggcgtggccgagcccgaggtggccaccgccccccccgagaaggagatccccagcctggaccaggagaagaccaagctggagcccggccagccccagctgagccccggcatcagcaccatccacctgcacccccagttccccgtggtgatcgagaagaccagcccccccgtgcccgtggaggtggcccccgaggccagcaccagcagcgccagccaggtgatcgcccccacccaggtgaccgagatcaacgagtgcaccgtgaaccccgacatctgcggcgccggccactgcatcaacctgcccgtgagatacacctgcatctgctacgagggctacagattcagcgagcagcagagaaagtgcgtggacatcgacgagtgcacccaggtgcagcacctgtgcagccagggcagatgcgagaacaccgagggcagcttcctgtgcatctgccccgccggcttcatggccagcgaggagggcaccaactgcatcgacgtggacgagtgcctgagacccgacgtgtgcggcgagggccactgcgtgaacaccgtgggcgccttcagatgcgagtactgcgacagcggctacagaatgacccagagaggcagatgcgaggacatcgacgagtgcctgaaccccagcacctgccccgacgagcagtgcgtgaacagccccggcagctaccagtgcgtgccctgcaccgagggcttcagaggctggaacggccagtgcctggacgtggacgagtgcctggagcccaacgtgtgcgccaacggcgactgcagcaacctggagggcagctacatgtgcagctgccacaagggctacaccagaacccccgaccacaagcactgcagagacatcgacgagtgccagcagggcaacctgtgcgtgaacggccagtgcaagaacaccgagggcagcttcagatgcacctgcggccagggctaccagctgagcgccgccaaggaccagtgcgaggacatcgacgagtgccagcacagacacctgtgcgcccacggccagtgcagaaacaccgagggcagcttccagtgcgtgtgcgaccagggctacagagccagcggcctgggcgaccactgcgaggacatcaacgagtgcctggaggacaagagcgtgtgccagagaggcgactgcatcaacaccgccggcagctacgactgcacctgccccgacggcttccagctggacgacaacaagacctgccaggacatcaacgagtgcgagcaccccggcctgtgcggcccccagggcgagtgcctgaacaccgagggcagcttccactgcgtgtgccagcagggcttcagcatcagcgccgacggcagaacctgcgaggacatcgacgagtgcgtgaacaacaccgtgtgcgacagccacggcttctgcgacaacaccgccggcagcttcagatgcctgtgctaccagggcttccaggccccccaggacggccagggctgcgtggacgtgaacgagtgcgagctgctgagcggcgtgtgcggcgaggccttctgcgagaacgtggagggcagcttcctgtgcgtgtgcgccgacgagaaccaggagtacagccccatgaccggccagtgcagaagcagaaccagcaccgacctggacgtggacgtggaccagcccaaggaggagaagaaggagtgctactacaacctgaacgacgccagcctgtgcgacaacgtgctggcccccaacgtgaccaagcaggagtgctgctgcaccagcggcgtgggctggggcgacaactgcgagatcttcccctgccccgtgctgggcaccgccgagttcaccgagatgtgccccaagggcaagggcttcgtgcccgccggcgagagcagcagcgaggccggcggcgagaactacaaggacgccgacgagtgcctgctgttcggccaggagatctgcaagaacggcttctgcctgaacaccagacccggctacgagtgctactgcaagcagggcacctactacgaccccgtgaagctgcagtgcttcgacatggacgagtgccaggaccccagcagctgcatcgacggccagtgcgtgaacaccgagggcagctacaactgcttctgcacccaccccatggtgctggacgccagcgagaagagatgcatcagacccgccgagagcaacgagcagatcgaggagaccgacgtgtaccaggacctgtgctgggagcacctgagcgacgagtacgtgtgcagcagacccctggtgggcaagcagaccacctacaccgagtgctgctgcctgtacggcgaggcctggggcatgcagtgcgccctgtgccccctgaaggacagcgacgactacgcccagctgtgcaacatccccgtgaccggcagaagacagccctacggcagagacgccctggtggacttcagcgagcagtacacccccgaggccgacccctacttcatccaggacagattcctgaacagcttcgaggagctgcaggccgaggagtgcggcatcctgaacggctgcgagaacggcagatgcgtgagagtgcaggagggctacacctgcgactgcttcgacggctaccacctggacaccgccaagatgacctgcgtggacgtgaacgagtgcgacgagctgaacaacagaatgagcctgtgcaagaacgccaagtgcatcaacaccgacggcagctacaagtgcctgtgcctgcccggctacgtgcccagcgacaagcccaactactgcacccccctgaacaccgccctgaacctggagaaggacagcgacctggagtag

SEQ ID NO: 86565 - DNA, 4188 bp, synthetic construct
  misc_feature 1..4188: note = Description of Artificial Sequence: Synthetic coding sequence
  source 1..4188: mol_type = other DNA
atggacaccaagctgatgtgcctgctgttcttcttcagcctgccccccctgctggtgagcaaccacaccggcagaatcaaggtggtgttcacccccagcatctgcaaggtgacctgcaccaagggcagctgccagaacagctgcgagaagggcaacaccaccaccctgatcagcgagaacggccacgccgccgacaccctgaccgccaccaacttcagagtggtgatctgccacctgccctgcatgaacggcggccagtgcagcagcagagacaagtgccagtgcccccccaacttcaccggcaagctgtgccagatccccgtgcacggcgccagcgtgcccaagctgtaccagcacagccagcagcccggcaaggccctgggcacccacgtgatccacagcacccacaccctgcccctgaccgtgaccagccagcagggcgtgaaggtgaagttcccccccaacatcgtgaacatccacgtgaagcacccccccgaggccagcgtgcagatccaccaggtgagcagaatcgacggccccaccggccagaagaccaaggaggcccagcccggccagagccaggtgagctaccagggcctgcccgtgcagaagacccagaccatccacagcacctacagccaccagcaggtgatcccccacgtgtaccccgtggccgccaagacccagctgggcagatgcttccaggagaccatcggcagccagtgcggcaaggccctgcccggcctgagcaagcaggaggactgctgcggcaccgtgggcaccagctggggcttcaacaagtgccagaagtgccccaagaagcccagctaccacggctacaaccagatgatggagtgcctgcccggctacaagagagtgaacaacaccttctgccaggacatcaacgagtgccagctgcagggcgtgtgccccaacggcgagtgcctgaacaccatgggcagctacagatgcacctgcaagatcggcttcggccccgaccccaccttcagcagctgcgtgcccgacccccccgtgatcagcgaggagaagggcccctgctacagactggtgagcagcggcagacagtgcatgcaccccctgagcgtgcacctgaccaagcagctgtgctgctgcagcgtgggcaaggcctggggcccccactgcgagaagtgccccctgcccggcaccgccgccttcaaggagatctgccccggcggcatgggctacaccgtgagcggcgtgcacagaagaagacccatccaccaccacgtgggcaagggccccgtgttcgtgaagcccaagaacacccagcccgtggccaagagcacccaccccccccccctgcccgccaaggaggagcccgtggaggccctgaccttcagcagagagcacggccccggcgtggccgagcccgaggtggccaccgccccccccgagaaggagatccccagcctggaccaggagaagaccaagctggagcccggccagccccagctgagccccggcatcagcaccatccacctgcacccccagttccccgtggtgatcgagaagaccagcccccccgtgcccgtggaggtggcccccgaggccagcaccagcagcgccagccaggtgatcgcccccacccaggtgaccgagatcaacgagtgcaccgtgaaccccgacatctgcggcgccggccactgcatcaacctgcccgtgagatacacctgcatctgctacgagggctacagattcagcgagcagcagagaaagtgcgtggacatcgacgagtgcacccaggtgcagcacctgtgcagccagggcagatgcgagaacaccgagggcagcttcctgtgcatctgccccgccggcttcatggccagcgaggagggcaccaactgcatcgacgtggacgagtgcctgagacccgacgtgtgcggcgagggccactgcgtgaacaccgtgggcgccttcagatgcgagtactgcgacagcggctacagaatgacccagagaggcagatgcgaggacatcgacgagtgcctgaaccccagcacctgccccgacgagcagtgcgtgaacagccccggcagctaccagtgcgtgccctgcaccgagggcttcagaggctggaacggccagtgcctggacgtggacgagtgcctggagcccaacgtgtgcgccaacggcgactgcagcaacctggagggcagctacatgtgcagctgccacaagggctacaccagaacccccgaccacaagcactgcagagacatcgacgagtgccagcagggcaacctgtgcgtgaacggccagtgcaagaacaccgagggcagcttcagatgcacctgcggccagggctaccagctgagcgccgccaaggaccagtgcgaggacatcgacgagtgccagcacagacacctgtgcgcccacggccagtgcagaaacaccgagggcagcttccagtgcgtgtgcgaccagggctacagagccagcggcctgggcgaccactgcgaggacatcaacgagtgcctggaggacaagagcgtgtgccagagaggcgactgcatcaacaccgccggcagctacgactgcacctgccccgacggcttccagctggacgacaacaagacctgccaggacatcaacgagtgcgagcaccccggcctgtgcggcccccagggcgagtgcctgaacaccgagggcagcttccactgcgtgtgccagcagggcttcagcatcagcgccgacggcagaacctgcgaggacatcgacgagtgcgtgaacaacaccgtgtgcgacagccacggcttctgcgacaacaccgccggcagcttcagatgcctgtgctaccagggcttccaggccccccaggacggccagggctgcgtggacgtgaacgagtgcgagctgctgagcggcgtgtgcggcgaggccttctgcgagaacgtggagggcagcttcctgtgcgtgtgcgccgacgagaaccaggagtacagccccatgaccggccagtgcagaagcagaaccagcaccgacctggacgtggacgtggaccagcccaaggaggagaagaaggagtgctactacaacctgaacgacgccagcctgtgcgacaacgtgctggcccccaacgtgaccaagcaggagtgctgctgcaccagcggcgtgggctggggcgacaactgcgagatcttcccctgccccgtgctgggcaccgccgagttcaccgagatgtgccccaagggcaagggcttcgtgcccgccggcgagagcagcagcgaggccggcggcgagaactacaaggacgccgacgagtgcctgctgttcggccaggagatctgcaagaacggcttctgcctgaacaccagacccggctacgagtgctactgcaagcagggcacctactacgaccccgtgaagctgcagtgcttcgacatggacgagtgccaggaccccagcagctgcatcgacggccagtgcgtgaacaccgagggcagctacaactgcttctgcacccaccccatggtgctggacgccagcgagaagagatgcatcagacccgccgagagcaacgagcagatcgaggagaccgacgtgtaccaggacctgtgctgggagcacctgagcgacgagtacgtgtgcagcagacccctggtgggcaagcagaccacctacaccgagtgctgctgcctgtacggcgaggcctggggcatgcagtgcgccctgtgccccctgaaggacagcgacgactacgcccagctgtgcaacatccccgtgaccggcagaagacagccctacggcagagacgccctggtggacttcagcgagcagtacacccccgaggccgacccctacttcatccaggacagattcctgaacagcttcgaggagctgcaggccgaggagtgcggcatcctgaacggctgcgagaacggcagatgcgtgagagtgcaggagggctacacctgcgactgcttcgacggctaccacctggacaccgccaagatgacctgcgtggacgtgaacgagtgcgacgagctgaacaacagaatgagcctgtgcaagaacgccaagtgcatcaacaccgacggcagctacaagtgcctgtgcctgcccggctacgtgcccagcgacaagcccaactactgcacccccctgaacaccgccctgaacctggagaaggacagcgacctggagtag

SEQ ID NO: 86566 - DNA, 4062 bp, synthetic construct
  misc_feature 1..4062: note = Description of Artificial Sequence: Synthetic coding sequence
  source 1..4062: mol_type = other DNA
atggacaccaagctgatgtgcctgctgttcttcttcagcctgccccccctgctggtgagcaaccacaccggcagaatcaaggtggtgttcacccccagcatctgcaaggtgacctgcaccaagggcagctgccagaacagctgcgagaagggcaacaccaccaccctgatcagcgagaacggccacgccgccgacaccctgaccgccaccaacttcagagtggtgatctgccacctgccctgcatgaacggcggccagtgcagcagcagagacaagtgccagtgcccccccaacttcaccggcaagctgtgccagatccccgtgcacggcgccagcgtgcccaagctgtaccagcacagccagcagcccggcaaggccctgggcacccacgtgatccacagcacccacaccctgcccctgaccgtgaccagccagcagggcgtgaaggtgaagttcccccccaacatcgtgaacatccacgtgaagcacccccccgaggccagcgtgcagatccaccaggtgagcagaatcgacggccccaccggccagaagaccaaggaggcccagcccggccagagccaggtgagctaccagggcctgcccgtgcagaagacccagaccatccacagcacctacagccaccagcaggtgatcccccacgtgtaccccgtggccgccaagacccagctgggcagatgcttccaggagaccatcggcagccagtgcggcaaggccctgcccggcctgagcaagcaggaggactgctgcggcaccgtgggcaccagctggggcttcaacaagtgccagaagtgccccaagaagcccagctaccacggctacaaccagatgatggagtgcctgcccggctacaagagagtgaacaacaccttctgccaggacatcaacgagtgccagctgcagggcgtgtgccccaacggcgagtgcctgaacaccatgggcagctacagatgcacctgcaagatcggcttcggccccgaccccaccttcagcagctgcgtgcccgacccccccgtgatcagcgaggagaagggcccctgctacagactggtgagcagcggcagacagtgcatgcaccccctgagcgtgcacctgaccaagcagctgtgctgctgcagcgtgggcaaggcctggggcccccactgcgagaagtgccccctgcccggcaccgccgccttcaaggagatctgccccggcggcatgggctacaccgtgagcggcgtgcacagaagaagacccatccaccaccacgtgggcaagggccccgtgttcgtgaagcccaagaacacccagcccgtggccaagagcacccaccccccccccctgcccgccaaggaggagcccgtggaggccctgaccttcagcagagagcacggccccggcgtggccgagcccgaggtggccaccgccccccccgagaaggagatccccagcctggaccaggagaagaccaagctggagcccggccagccccagctgagccccggcatcagcaccatccacctgcacccccagttccccgtggtgatcgagaagaccagcccccccgtgcccgtggaggtggcccccgaggccagcaccagcagcgccagccaggtgatcgcccccacccaggtgaccgagatcaacgagtgcaccgtgaaccccgacatctgcggcgccggccactgcatcaacctgcccgtgagatacacctgcatctgctacgagggctacagattcagcgagcagcagagaaagtgcgtggacatcgacgagtgcacccaggtgcagcacctgtgcagccagggcagatgcgagaacaccgagggcagcttcctgtgcatctgccccgccggcttcatggccagcgaggagggcaccaactgcatcgacgtggacgagtgcctgagacccgacgtgtgcggcgagggccactgcgtgaacaccgtgggcgccttcagatgcgagtactgcgacagcggctacagaatgacccagagaggcagatgcgaggacatcgacgagtgcctgaaccccagcacctgccccgacgagcagtgcgtgaacagccccggcagctaccagtgcgtgccctgcaccgagggcttcagaggctggaacggccagtgcctggacgtggacgagtgcctggagcccaacgtgtgcgccaacggcgactgcagcaacctggagggcagctacatgtgcagctgccacaagggctacaccagaacccccgaccacaagcactgcagagacatcgacgagtgccagcagggcaacctgtgcgtgaacggccagtgcaagaacaccgagggcagcttcagatgcacctgcggccagggctaccagctgagcgccgccaaggaccagtgcgaggacatcgacgagtgccagcacagacacctgtgcgcccacggccagtgcagaaacaccgagggcagcttccagtgcgtgtgcgaccagggctacagagccagcggcctgggcgaccactgcgaggacatcaacgagtgcctggaggacaagagcgtgtgccagagaggcgactgcatcaacaccgccggcagctacgactgcacctgccccgacggcttccagctggacgacaacaagacctgccaggacatcaacgagtgcgagcaccccggcctgtgcggcccccagggcgagtgcctgaacaccgagggcagcttccactgcgtgtgccagcagggcttcagcatcagcgccgacggcagaacctgcgaggacgtgaacgagtgcgagctgctgagcggcgtgtgcggcgaggccttctgcgagaacgtggagggcagcttcctgtgcgtgtgcgccgacgagaaccaggagtacagccccatgaccggccagtgcagaagcagaaccagcaccgacctggacgtggacgtggaccagcccaaggaggagaagaaggagtgctactacaacctgaacgacgccagcctgtgcgacaacgtgctggcccccaacgtgaccaagcaggagtgctgctgcaccagcggcgtgggctggggcgacaactgcgagatcttcccctgccccgtgctgggcaccgccgagttcaccgagatgtgccccaagggcaagggcttcgtgcccgccggcgagagcagcagcgaggccggcggcgagaactacaaggacgccgacgagtgcctgctgttcggccaggagatctgcaagaacggcttctgcctgaacaccagacccggctacgagtgctactgcaagcagggcacctactacgaccccgtgaagctgcagtgcttcgacatggacgagtgccaggaccccagcagctgcatcgacggccagtgcgtgaacaccgagggcagctacaactgcttctgcacccaccccatggtgctggacgccagcgagaagagatgcatcagacccgccgagagcaacgagcagatcgaggagaccgacgtgtaccaggacctgtgctgggagcacctgagcgacgagtacgtgtgcagcagacccctggtgggcaagcagaccacctacaccgagtgctgctgcctgtacggcgaggcctggggcatgcagtgcgccctgtgccccctgaaggacagcgacgactacgcccagctgtgcaacatccccgtgaccggcagaagacagccctacggcagagacgccctggtggacttcagcgagcagtacacccccgaggccgacccctacttcatccaggacagattcctgaacagcttcgaggagctgcaggccgaggagtgcggcatcctgaacggctgcgagaacggcagatgcgtgagagtgcaggagggctacacctgcgactgcttcgacggctaccacctggacaccgccaagatgacctgcgtggacgtgaacgagtgcgacgagctgaacaacagaatgagcctgtgcaagaacgccaagtgcatcaacaccgacggcagctacaagtgcctgtgcctgcccggctacgtgcccagcgacaagcccaactactgcacccccctgaacaccgccctgaacctggagaaggacagcgacctggagtag

SEQ ID NO: 86567 - DNA, 4029 bp, synthetic construct
  misc_feature 1..4029: note = Description of Artificial Sequence: Synthetic coding sequence
  source 1..4029: mol_type = other DNA
atggacaccaagctgatgtgcctgctgttcttcttcagcctgccccccctgctggtgagcaaccacaccggcagaatcaaggtggtgttcacccccagcatctgcaaggtgacctgcaccaagggcagctgccagaacagctgcgagaagggcaacaccaccaccctgatcagcgagaacggccacgccgccgacaccctgaccgccaccaacttcagagtggtgatctgccacctgccctgcatgaacggcggccagtgcagcagcagagacaagtgccagtgcccccccaacttcaccggcaagctgtgccagatccccgtgcacggcgccagcgtgcccaagctgtaccagcacagccagcagcccggcaaggccctgggcacccacgtgatccacagcacccacaccctgcccctgaccgtgaccagccagcagggcgtgaaggtgaagttcccccccaacatcgtgaacatccacgtgaagcacccccccgaggccagcgtgcagatccaccaggtgagcagaatcgacggccccaccggccagaagaccaaggaggcccagcccggccagagccaggtgagctaccagggcctgcccgtgcagaagacccagaccatccacagcacctacagccaccagcaggtgatcccccacgtgtaccccgtggccgccaagacccagctgggcagatgcttccaggagaccatcggcagccagtgcggcaaggccctgcccggcctgagcaagcaggaggactgctgcggcaccgtgggcaccagctggggcttcaacaagtgccagaagtgccccaagaagcccagctaccacggctacaaccagatgatggagtgcctgcccggctacaagagagtgaacaacaccttctgccaggacatcaacgagtgccagctgcagggcgtgtgccccaacggcgagtgcctgaacaccatgggcagctacagatgcacctgcaagatcggcttcggccccgaccccaccttcagcagctgcgtgcccgacccccccgtgatcagcgaggagaagggcccctgctacagactggtgagcagcggcagacagtgcatgcaccccctgagcgtgcacctgaccaagcagctgtgctgctgcagcgtgggcaaggcctggggcccccactgcgagaagtgccccctgcccggcaccgccaaggaggagcccgtggaggccctgaccttcagcagagagcacggccccggcgtggccgagcccgaggtggccaccgccccccccgagaaggagatccccagcctggaccaggagaagaccaagctggagcccggccagccccagctgagccccggcatcagcaccatccacctgcacccccagttccccgtggtgatcgagaagaccagcccccccgtgcccgtggaggtggcccccgaggccagcaccagcagcgccagccaggtgatcgcccccacccaggtgaccgagatcaacgagtgcaccgtgaaccccgacatctgcggcgccggccactgcatcaacctgcccgtgagatacacctgcatctgctacgagggctacagattcagcgagcagcagagaaagtgcgtggacatcgacgagtgcacccaggtgcagcacctgtgcagccagggcagatgcgagaacaccgagggcagcttcctgtgcatctgccccgccggcttcatggccagcgaggagggcaccaactgcatcgacgtggacgagtgcctgagacccgacgtgtgcggcgagggccactgcgtgaacaccgtgggcgccttcagatgcgagtactgcgacagcggctacagaatgacccagagaggcagatgcgaggacatcgacgagtgcctgaaccccagcacctgccccgacgagcagtgcgtgaacagccccggcagctaccagtgcgtgccctgcaccgagggcttcagaggctggaacggccagtgcctggacgtggacgagtgcctggagcccaacgtgtgcgccaacggcgactgcagcaacctggagggcagctacatgtgcagctgccacaagggctacaccagaacccccgaccacaagcactgcagagacatcgacgagtgccagcagggcaacctgtgcgtgaacggccagtgcaagaacaccgagggcagcttcagatgcacctgcggccagggctaccagctgagcgccgccaaggaccagtgcgaggacatcgacgagtgccagcacagacacctgtgcgcccacggccagtgcagaaacaccgagggcagcttccagtgcgtgtgcgaccagggctacagagccagcggcctgggcgaccactgcgaggacatcaacgagtgcctggaggacaagagcgtgtgccagagaggcgactgcatcaacaccgccggcagctacgactgcacctgccccgacggcttccagctggacgacaacaagacctgccaggacatcaacgagtgcgagcaccccggcctgtgcggcccccagggcgagtgcctgaacaccgagggcagcttccactgcgtgtgccagcagggcttcagcatcagcgccgacggcagaacctgcgaggacatcgacgagtgcgtgaacaacaccgtgtgcgacagccacggcttctgcgacaacaccgccggcagcttcagatgcctgtgctaccagggcttccaggccccccaggacggccagggctgcgtggacgtgaacgagtgcgagctgctgagcggcgtgtgcggcgaggccttctgcgagaacgtggagggcagcttcctgtgcgtgtgcgccgacgagaaccaggagtacagccccatgaccggccagtgcagaagcagaaccagcaccgacctggacgtggacgtggaccagcccaaggaggagaagaaggagtgctactacaacctgaacgacgccagcctgtgcgacaacgtgctggcccccaacgtgaccaagcaggagtgctgctgcaccagcggcgtgggctggggcgacaactgcgagatcttcccctgccccgtgctgggcaccgccgagttcaccgagatgtgccccaagggcaagggcttcgtgcccgccggcgagagcagcagcgaggccggcggcgagaactacaaggacgccgacgagtgcctgctgttcggccaggagatctgcaagaacggcttctgcctgaacaccagacccggctacgagtgctactgcaagcagggcacctactacgaccccgtgaagctgcagtgcttcgacatggacgagtgccaggaccccagcagctgcatcgacggccagtgcgtgaacaccgagggcagctacaactgcttctgcacccaccccatggtgctggacgccagcgagaagagatgcatcagacccgccgagagcaacgagcagatcgaggagaccgacgtgtaccaggacctgtgctgggagcacctgagcgacgagtacgtgtgcagcagacccctggtgggcaagcagaccacctacaccgagtgctgctgcctgtacggcgaggcctggggcatgcagtgcgccctgtgccccctgaaggacagcgacgactacgcccagctgtgcaacatccccgtgaccggcagaagacagccctacggcagagacgccctggtggacttcagcgagcagtacacccccgaggccgacccctacttcatccaggacagattcctgaacagcttcgaggagctgcaggccgaggagtgcggcatcctgaacggctgcgagaacggcagatgcgtgagagtgcaggagggctacacctgcgactgcttcgacggctaccacctggacaccgccaagatgacctgcgtggacgtgaacgagtgcgacgagctgaacaacagaatgagcctgtgcaagaacgccaagtgcatcaacaccgacggcagctacaagtgcctgtgcctgcccggctacgtgcccagcgacaagcccaactactgcacccccctgaacaccgccctgaacctggagaaggacagcgacctggagtag

SEQ ID NO: 86568 - DNA, 5466 bp, synthetic construct
  misc_feature 1..5466: note = Description of Artificial Sequence: Synthetic coding sequence
  source 1..5466: mol_type = other DNA
atgagacccagaaccaaggccagaagccccggcagagccctgagaaacccctggagaggcttcctgcccctgaccctggccctgttcgtgggcgccggccacgcccagagagaccccgtgggcagatacgagcccgccggcggcgacgccaacagactgagaagacccggcggcagctaccccgccgccgccgccgccaaggtgtacagcctgttcagagagcaggacgcccccgtggccggcctgcagcccgtggagagagcccagcccggctggggcagccccagaagacccaccgaggccgaggccagaagacccagcagagcccagcagagcagaagagtgcagccccccgcccagaccagaagaagcacccccctgggccagcagcagcccgcccccagaaccagagccgcccccgccctgcccagactgggcaccccccagagaagcggcgccgccccccccaccccccccagaggcagactgaccggcagaaacgtgtgcggcggccagtgctgccccggctggaccaccgccaacagcaccaaccactgcatcaagcccgtgtgcgagcccccctgccagaacagaggcagctgcagcagaccccagctgtgcgtgtgcagaagcggcttcagaggcgccagatgcgaggaggtgatccccgacgaggagttcgacccccagaacagcagactggcccccagaagatgggccgagagaagccccaacctgagaagaagcagcgccgccggcgagggcaccctggccagagcccagccccccgccccccagagcccccccgccccccagagcccccccgccggcaccctgagcggcctgagccagacccaccccagccagcagcacgtgggcctgagcagaaccgtgagactgcaccccaccgccaccgccagcagccagctgagcagcaacgccctgccccccggccccggcctggagcagagagacggcacccagcaggccgtgcccctggagcaccccagcagcccctggggcctgaacctgaccgagaagatcaagaagatcaagatcgtgttcacccccaccatctgcaagcagacctgcgccagaggccactgcgccaacagctgcgagagaggcgacaccaccaccctgtacagccagggcggccacggccacgaccccaagagcggcttcagaatctacttctgccagatcccctgcctgaacggcggcagatgcatcggcagagacgagtgctggtgccccgccaacagcaccggcaagttctgccacctgcccatcccccagcccgacagagagccccccggcagaggcagcagacccagagccctgctggaggcccccctgaagcagagcaccttcaccctgcccctgagcaaccagctggccagcgtgaaccccagcctggtgaaggtgcacatccaccacccccccgaggccagcgtgcagatccaccaggtggcccaggtgagaggcggcgtggaggaggccctggtggagaacagcgtggagaccagaccccccccctggctgcccgccagccccggccacagcctgtgggacagcaacaacatccccgccagaagcggcgagccccccagacccctgccccccgccgcccccagacccagaggcctgctgggcagatgctacctgaacaccgtgaacggccagtgcgccaaccccctgctggagctgaccacccaggaggactgctgcggcagcgtgggcgccttctggggcgtgaccctgtgcgccccctgcccccccagacccgccagccccgtgatcgagaacggccagctggagtgcccccagggctacaagagactgaacctgacccactgccaggacatcaacgagtgcctgaccctgggcctgtgcaaggacgccgagtgcgtgaacaccagaggcagctacctgtgcacctgcagacccggcctgatgctggaccccagcagaagcagatgcgtgagcgacaaggccatcagcatgctgcagggcctgtgctacagaagcctgggccccggcacctgcaccctgcccctggcccagagaatcaccaagcagatctgctgctgcagcagagtgggcaaggcctggggcagcgagtgcgagaagtgccccctgcccggcaccgaggccttcagagagatctgccccgccggccacggctacacctacgccagcagcgacatcagactgagcatgagaaaggccgaggaggaggagctggccagaccccccagagagcagggccagagaagcagcggcgccctgcccggccccgccgagagacagcccctgagagtggtgaccgacacctggctggaggccggcaccatccccgacaagggcgacagccaggccggccaggtgaccaccagcgtgacccacgcccccgcctgggtgaccggcaacgccaccaccccccccatgcccgagcagggcatcgccgagatccaggaggagcaggtgacccccagcaccgacgtgctggtgaccctgagcacccccggcatcgacagatgcgccgccggcgccaccaacgtgtgcggccccggcacctgcgtgaacctgcccgacggctacagatgcgtgtgcagccccggctaccagctgcaccccagccaggcctactgcaccgacgacaacgagtgcctgagagacccctgcaagggcaagggcagatgcatcaacagagtgggcagctacagctgcttctgctaccccggctacaccctggccaccagcggcgccacccaggagtgccaggacatcaacgagtgcgagcagcccggcgtgtgcagcggcggccagtgcaccaacaccgagggcagctaccactgcgagtgcgaccagggctacatcatggtgagaaagggccactgccaggacatcaacgagtgcagacaccccggcacctgccccgacggcagatgcgtgaacagccccggcagctacacctgcctggcctgcgaggagggctacagaggccagagcggcagctgcgtggacgtgaacgagtgcctgacccccggcgtgtgcgcccacggcaagtgcaccaacctggagggcagcttcagatgcagctgcgagcagggctacgaggtgaccagcgacgagaagggctgccaggacgtggacgagtgcgccagcagagccagctgccccaccggcctgtgcctgaacaccgagggcagcttcgcctgcagcgcctgcgagaacggctactgggtgaacgaggacggcaccgcctgcgaggacctggacgagtgcgccttccccggcgtgtgccccagcggcgtgtgcaccaacaccgccggcagcttcagctgcaaggactgcgacggcggctacagacccagccccctgggcgacagctgcgaggacgtggacgagtgcgaggacccccagagcagctgcctgggcggcgagtgcaagaacaccgtgggcagctaccagtgcctgtgcccccagggcttccagctggccaacggcaccgtgtgcgaggacgtgaacgagtgcatgggcgaggagcactgcgccccccacggcgagtgcctgaacagccacggcagcttcttctgcctgtgcgcccccggcttcgtgagcgccgagggcggcaccagctgccaggacgtggacgagtgcgccaccaccgacccctgcgtgggcggccactgcgtgaacaccgagggcagcttcaactgcctgtgcgagaccggcttccagcccagccccgagagcggcgagtgcgtggacatcgacgagtgcgaggactacggcgaccccgtgtgcggcacctggaagtgcgagaacagccccggcagctacagatgcgtgctgggctgccagcccggcttccacatggcccccaacggcgactgcatcgacatcgacgagtgcgccaacgacaccatgtgcggcagccacggcttctgcgacaacaccgacggcagcttcagatgcctgtgcgaccagggcttcgagatcagccccagcggctgggactgcgtggacgtgaacgagtgcgagctgatgctggccgtgtgcggcgccgccctgtgcgagaacgtggagggcagcttcctgtgcctgtgcgccagcgacctggaggagtacgacgcccaggagggccactgcagacccagaggcgccggcggccagagcatgagcgaggcccccaccggcgaccacgcccccgcccccaccagaatggactgctacagcggccagaagggccacgccccctgcagcagcgtgctgggcagaaacaccacccaggccgagtgctgctgcacccagggcgccagctggggcgacgcctgcgacctgtgccccagcgaggacagcgccgagttcagcgagatctgccccagcggcaagggctacatccccgtggagggcgcctggaccttcggccagaccatgtacaccgacgccgacgagtgcgtgatcttcggccccggcctgtgccccaacggcagatgcctgaacaccgtgcccggctacgtgtgcctgtgcaaccccggcttccactacgacgccagccacaagaagtgcgaggaccacgacgagtgccaggacctggcctgcgagaacggcgagtgcgtgaacaccgagggcagcttccactgcttctgcagcccccccctgaccctggacctgagccagcagagatgcatgaacagcaccagcagcaccgaggacctgcccgaccacgacatccacatggacatctgctggaagaaggtgaccaacgacgtgtgcagcgagcccctgagaggccacagaaccacctacaccgagtgctgctgccaggacggcgaggcctggagccagcagtgcgccctgtgcccccccagaagcagcgaggtgtacgcccagctgtgcaacgtggccagaatcgaggccgagagagaggccggcgtgcacttcagacccggctacgagtacggccccggccccgacgacctgcactacagcatctacggccccgacggcgcccccttctacaactacctgggccccgaggacaccgtgcccgagcccgccttccccaacaccgccggccacagcgccgacagaacccccatcctggagagccccctgcagcccagcgagctgcagccccactacgtggccagccaccccgagccccccgccggcttcgagggcctgcaggccgaggagtgcggcatcctgaacggctgcgagaacggcagatgcgtgagagtgagagagggctacacctgcgactgcttcgagggcttccagctggacgccgcccacatggcctgcgtggacgtgaacgagtgcgacgacctgaacggccccgccgtgctgtgcgtgcacggctactgcgagaacaccgagggcagctacagatgccactgcagccccggctacgtggccgaggccggccccccccactgcaccgccaaggagtag

SEQ ID NO: 86569 - DNA, 3912 bp, synthetic construct
  misc_feature 1..3912: note = Description of Artificial Sequence: Synthetic coding sequence
  source 1..3912: mol_type = other DNA
atgcccggccccagaggcgccgccggcggcctggcccccgagatgagaggcgccggcgccgccggcctgctggccctgctgctgctgctgctgctgctgctgctgggcctgggcggcagagtggagggcggccccgccggcgagagaggcgccggcggcggcggcgccctggccagagagagattcaaggtggtgttcgcccccgtgatctgcaagagaacctgcctgaagggccagtgcagagacagctgccagcagggcagcaacatgaccctgatcggcgagaacggccacagcaccgacaccctgaccggcagcggcttcagagtggtggtgtgccccctgccctgcatgaacggcggccagtgcagcagcagaaaccagtgcctgtgcccccccgacttcaccggcagattctgccaggtgcccgccggcggcgccggcggcggcaccggcggcagcggccccggcctgagcagaaccggcgccctgagcaccggcgccctgccccccctggcccccgagggcgacagcgtggccagcaagcacgccatctacgccgtgcaggtgatcgccgacccccccggccccggcgagggcccccccgcccagcacgccgccttcctggtgcccctgggccccggccagatcagcgccgaggtgcaggcccccccccccgtggtgaacgtgagagtgcaccacccccccgaggccagcgtgcaggtgcacagaatcgagagcagcaacgccgagagcgccgcccccagccagcacctgctgccccaccccaagcccagccaccccagaccccccacccagaagcccctgggcagatgcttccaggacaccctgcccaagcagccctgcggcagcaaccccctgcccggcctgaccaagcaggaggactgctgcggcagcatcggcaccgcctggggccagagcaagtgccacaagtgcccccagctgcagtacaccggcgtgcagaagcccggccccgtgagaggcgaggtgggcgccgactgcccccagggctacaagagactgaacagcacccactgccaggacatcaacgagtgcgccatgcccggcgtgtgcagacacggcgactgcctgaacaaccccggcagctacagatgcgtgtgcccccccggccacagcctgggccccagcagaacccagtgcatcgccgacaagcccgaggagaagagcctgtgcttcagactggtgagccccgagcaccagtgccagcaccccctgaccaccagactgaccagacagctgtgctgctgcagcgtgggcaaggcctggggcgccagatgccagagatgccccaccgacggcaccgccgccttcaaggagatctgccccgccggcaagggctaccacatcctgaccagccaccagaccctgaccatccagggcgagagcgacttcagcctgttcctgcaccccgacggcccccccaagccccagcagctgcccgagagccccagccaggcccccccccccgaggacaccgaggaggagagaggcgtgaccaccgacagccccgtgagcgaggagagaagcgtgcagcagagccaccccaccgccaccaccacccccgccagaccctaccccgagctgatcagcagacccagcccccccaccatgagatggttcctgcccgacctgccccccagcagaagcgccgtggagatcgcccccacccaggtgaccgagaccgacgagtgcagactgaaccagaacatctgcggccacggcgagtgcgtgcccggcccccccgactacagctgccactgcaaccccggctacagaagccacccccagcacagatactgcgtggacgtgaacgagtgcgaggccgagccctgcggccccggcagaggcatctgcatgaacaccggcggcagctacaactgccactgcaacagaggctacagactgcacgtgggcgccggcggcagaagctgcgtggacctgaacgagtgcgccaagccccacctgtgcggcgacggcggcttctgcatcaacttccccggccactacaagtgcaactgctaccccggctacagactgaaggccagcagaccccccgtgtgcgaggacatcgacgagtgcagagaccccagcagctgccccgacggcaagtgcgagaacaagcccggcagcttcaagtgcatcgcctgccagcccggctacagaagccagggcggcggcgcctgcagagacgtgaacgagtgcgccgagggcagcccctgcagccccggctggtgcgagaacctgcccggcagcttcagatgcacctgcgcccagggctacgcccccgcccccgacggcagaagctgcctggacgtggacgagtgcgaggccggcgacgtgtgcgacaacggcatctgcagcaacacccccggcagcttccagtgccagtgcctgagcggctaccacctgagcagagacagaagccactgcgaggacatcgacgagtgcgacttccccgccgcctgcatcggcggcgactgcatcaacaccaacggcagctacagatgcctgtgcccccagggccacagactggtgggcggcagaaagtgccaggacatcgacgagtgcagccaggaccccagcctgtgcctgccccacggcgcctgcaagaacctgcagggcagctacgtgtgcgtgtgcgacgagggcttcacccccacccaggaccagcacggctgcgaggaggtggagcagccccaccacaagaaggagtgctacctgaacttcgacgacaccgtgttctgcgacagcgtgctggccaccaacgtgacccagcaggagtgctgctgcagcctgggcgccggctggggcgaccactgcgagatctacccctgccccgtgtacagcagcgccgagttccacagcctgtgccccgacggcaagggctacacccaggacaacaacatcgtgaactacggcatccccgcccacagagacatcgacgagtgcatgctgttcggcagcgagatctgcaaggagggcaagtgcgtgaacacccagcccggctacgagtgctactgcaagcagggcttctactacgacggcaacctgctggagtgcgtggacgtggacgagtgcctggacgagagcaactgcagaaacggcgtgtgcgagaacaccagaggcggctacagatgcgcctgcaccccccccgccgagtacagccccgcccagagacagtgcctgagccccgaggagatggacgtggacgagtgccaggaccccgccgcctgcagacccggcagatgcgtgaacctgcccggcagctacagatgcgagtgcagacccccctgggtgcccggccccagcggcagagactgccagctgcccgagagccccgccgagagagcccccgagagaagagacgtgtgctggagccagagaggcgaggacggcatgtgcgccggccccctggccggccccgccctgaccttcgacgactgctgctgcagacagggcagaggctggggcgcccagtgcagaccctgcccccccagaggcgccggcagccactgccccaccagccagagcgagagcaacagcttctgggacaccagccccctgctgctgggcaagccccccagagacgaggacagcagcgaggaggacagcgacgagtgcagatgcgtgagcggcagatgcgtgcccagacccggcggcgccgtgtgcgagtgccccggcggcttccagctggacgccagcagagccagatgcgtggacatcgacgagtgcagagagctgaaccagagaggcctgctgtgcaagagcgagagatgcgtgaacaccagcggcagcttcagatgcgtgtgcaaggccggcttcgccagaagcagaccccacggcgcctgcgtgccccagagaagaagatag

SEQ ID NO: 86570 - DNA, 792 bp, synthetic construct
  misc_feature 1..792: note = Description of Artificial Sequence: Synthetic coding sequence
  source 1..792: mol_type = other DNA
atgctgttcggcagcgagatctgcaaggagggcaagtgcgtgaacacccagcccggctacgagtgctactgcaagcagggcttctactacgacggcaacctgctggagtgcgtggacgtggacgagtgcctggacgagagcaactgcagaaacggcgtgtgcgagaacaccagaggcggctacagatgcgcctgcaccccccccgccgagtacagccccgcccagagacagtgcctgagccccgaggagatggacgtggacgagtgccaggaccccgccgcctgcagacccggcagatgcgtgaacctgcccggcagctacagatgcgagtgcagacccccctgggtgcccggccccagcggcagagactgccagctgcccgagagccccgccgagagagcccccgagagaagagacgtgtgctggagccagagaggcgaggacggcatgtgcgccggccccctggccggccccgccctgaccttcgacgactgctgctgcagacagggcagaggctggggcgcccagtgcagaccctgcccccccagaggcgccggcagccactgccccaccagccagagcgagagcaacagcttctgggacaccagccccctgctgctgggcaagccccccagagacgaggacagcagcgaggaggacagcgacgagtgcagatgcgtgagcgccgccgcctgcagaggcagagccgccccctgcgccagcgtgcccgccgccagcagcagcaccccccccgcccccgccgcctggatcagcaccagcgccgagagctag

SEQ ID NO: 86571 - DNA, 3771 bp, synthetic construct
  misc_feature 1..3771: note = Description of Artificial Sequence: Synthetic coding sequence
  source 1..3771: mol_type = other DNA
atgcccggccccagaggcgccgccggcggcctggcccccgagatgagaggcgccggcgccgccggcctgctggccctgctgctgctgctgctgctgctgctgctgggcctgggcggcagagtggagggcggccccgccggcgagagaggcgccggcggcggcggcgccctggccagagagagattcaaggtggtgttcgcccccgtgatctgcaagagaacctgcctgaagggccagtgcagagacagctgccagcagggcagcaacatgaccctgatcggcgagaacggccacagcaccgacaccctgaccggcagcggcttcagagtggtggtgtgccccctgccctgcatgaacggcggccagtgcagcagcagaaaccagtgcctgtgcccccccgacttcaccggcagattctgccaggtgcccgccggcggcgccggcggcggcaccggcggcagcggccccggcctgagcagaaccggcgccctgagcaccggcgccctgccccccctggcccccgagggcgacagcgtggccagcaagcacgccatctacgccgtgcaggtgatcgccgacccccccggccccggcgagggcccccccgcccagcacgccgccttcctggtgcccctgggccccggccagatcagcgccgaggtgcaggcccccccccccgtggtgaacgtgagagtgcaccacccccccgaggccagcgtgcaggtgcacagaatcgagagcagcaacgccgagagcgccgcccccagccagcacctgctgccccaccccaagcccagccaccccagaccccccacccagaagcccctgggcagatgcttccaggacaccctgcccaagcagccctgcggcagcaaccccctgcccggcctgaccaagcaggaggactgctgcggcagcatcggcaccgcctggggccagagcaagtgccacaagtgcccccagctgcagtacaccggcgtgcagaagcccggccccgtgagaggcgaggtgggcgccgactgcccccagggctacaagagactgaacagcacccactgccaggacatcaacgagtgcgccatgcccggcgtgtgcagacacggcgactgcctgaacaaccccggcagctacagatgcgtgtgcccccccggccacagcctgggccccagcagaacccagtgcatcgccgacaagcccgaggagaagagcctgtgcttcagactggtgagccccgagcaccagtgccagcaccccctgaccaccagactgaccagacagctgtgctgctgcagcgtgggcaaggcctggggcgccagatgccagagatgccccaccgacggcaccgccgccttcaaggagatctgccccgccggcaagggctaccacatcctgaccagccaccagaccctgaccatccagggcgagagcgacttcagcctgttcctgcaccccgacggcccccccaagccccagcagctgcccgagagccccagccaggcccccccccccgaggacaccgaggaggagagaggcgtgaccaccgacagccccgtgagcgaggagagaagcgtgcagcagagccaccccaccgccaccaccacccccgccagaccctaccccgagctgatcagcagacccagcccccccaccatgagatggttcctgcccgacctgccccccagcagaagcgccgtggagatcgcccccacccaggtgaccgagaccgacgagtgcagactgaaccagaacatctgcggccacggcgagtgcgtgcccggcccccccgactacagctgccactgcaaccccggctacagaagccacccccagcacagatactgcgtggacgtgaacgagtgcgaggccgagccctgcggccccggcagaggcatctgcatgaacaccggcggcagctacaactgccactgcaacagaggctacagactgcacgtgggcgccggcggcagaagctgcgtggacctgaacgagtgcgccaagccccacctgtgcggcgacggcggcttctgcatcaacttccccggccactacaagtgcaactgctaccccggctacagactgaaggccagcagaccccccgtgtgcgaggacatcgacgagtgcagagaccccagcagctgccccgacggcaagtgcgagaacaagcccggcagcttcaagtgcatcgcctgccagcccggctacagaagccagggcggcggcgcctgcagagacgtgaacgagtgcgccgagggcagcccctgcagccccggctggtgcgagaacctgcccggcagcttcagatgcacctgcgcccagggctacgcccccgcccccgacggcagaagctgcctggacgtggacgagtgcgaggccggcgacgtgtgcgacaacggcatctgcagcaacacccccggcagcttccagtgccagtgcctgagcggctaccacctgagcagagacagaagccactgcgaggacatcgacgagtgcgacttccccgccgcctgcatcggcggcgactgcatcaacaccaacggcagctacagatgcctgtgcccccagggccacagactggtgggcggcagaaagtgccaggacatcgacgagtgcagccaggaccccagcctgtgcctgccccacggcgcctgcaagaacctgcagggcagctacgtgtgcgtgtgcgacgagggcttcacccccacccaggaccagcacggctgcgaggaggtggagcagccccaccacaagaaggagtgctacctgaacttcgacgacaccgtgttctgcgacagcgtgctggccaccaacgtgacccagcaggagtgctgctgcagcctgggcgccggctggggcgaccactgcgagatctacccctgccccgtgtacagcagcgccgagttccacagcctgtgccccgacggcaagggctacacccaggacaacaacatcgtgaactacggcatccccgcccacagagacatcgacgagtgcatgctgttcggcagcgagatctgcaaggagggcaagtgcgtgaacacccagcccggctacgagtgctactgcaagcagggcttctactacgacggcaacctgctggagtgcgtggacgtggacgagtgcctggacgagagcaactgcagaaacggcgtgtgcgagaacaccagaggcggctacagatgcgcctgcaccccccccgccgagtacagccccgcccagagacagtgcctgagccccgaggagatggagagagcccccgagagaagagacgtgtgctggagccagagaggcgaggacggcatgtgcgccggccccctggccggccccgccctgaccttcgacgactgctgctgcagacagggcagaggctggggcgcccagtgcagaccctgcccccccagaggcgccggcagccactgccccaccagccagagcgagagcaacagcttctgggacaccagccccctgctgctgggcaagccccccagagacgaggacagcagcgaggaggacagcgacgagtgcagatgcgtgagcggcagatgcgtgcccagacccggcggcgccgtgtgcgagtgccccggcggcttccagctggacgccagcagagccagatgcgtggacatcgacgagtgcagagagctgaaccagagaggcctgctgtgcaagagcgagagatgcgtgaacaccagcggcagcttcagatgcgtgtgcaaggccggcttcgccagaagcagaccccacggcgcctgcgtgccccagagaagaagatag

SEQ ID NO: 86572 - DNA, 921 bp, synthetic construct
  misc_feature 1..921: note = Description of Artificial Sequence: Synthetic coding sequence
  source 1..921: mol_type = other DNA
atgctgttcggcagcgagatctgcaaggagggcaagtgcgtgaacacccagcccggctacgagtgctactgcaagcagggcttctactacgacggcaacctgctggagtgcgtggacgtggacgagtgcctggacgagagcaactgcagaaacggcgtgtgcgagaacaccagaggcggctacagatgcgcctgcaccccccccgccgagtacagccccgcccagagacagtgcctgagccccgaggagatggacgtggacgagtgccaggaccccgccgcctgcagacccggcagatgcgtgaacctgcccggcagctacagatgcgagtgcagacccccctgggtgcccggccccagcggcagagactgccagctgcccgagagccccgccgagagagcccccgagagaagagacgtgtgctggagccagagaggcgaggacggcatgtgcgccggccccctggccggccccgccctgaccttcgacgactgctgctgcagacagggcagaggctggggcgcccagtgcagaccctgcccccccagaggcgccggcagccactgccccaccagccagagcgagagcaacagcttctgggacaccagccccctgctgctgggcaagccccccagagacgaggacagcagcgaggaggacagcgacgagtgcagatgcgtgagcggcagatgcgtgcccagacccggcggcgccgtgtgcgagtgccccggcggcttccagctggacgccagcagagccagatgcgtggacatcgacgagtgcagagagctgaaccagagaggcctgctgtgcaagagcgagagatgcgtgaacaccagcggcagcttcagatgcgtgtgcaaggccggcttcgccagaagcagaccccacggcgcctgcgtgccccagagaagaagatag

SEQ ID NO: 86573 - DNA, 3414 bp, synthetic construct
  misc_feature 1..3414: note = Description of Artificial Sequence: Synthetic coding sequence
  source 1..3414: mol_type = other DNA
atgaccctgatcggcgagaacggccacagcaccgacaccctgaccggcagcggcttcagagtggtggtgtgccccctgccctgcatgaacggcggccagtgcagcagcagaaaccagtgcctgtgcccccccgacttcaccggcagattctgccaggtgcccgccggcggcgccggcggcggcaccggcggcagcggccccggcctgagcagaaccggcgccctgagcaccggcgccctgccccccctggcccccgagggcgacagcgtggccagcaagcacgccatctacgccgtgcaggtgatcgccgacccccccggccccggcgagggcccccccgcccagcacgccgccttcctggtgcccctgggccccggccagatcagcgccgaggtgcaggcccccccccccgtggtgaacgtgagagtgcaccacccccccgaggccagcgtgcaggtgcacagaatcgagagcagcaacgccgagagcgccgcccccagccagcacctgctgccccaccccaagcccagccaccccagaccccccacccagaagcccctgggcagatgcttccaggacaccctgcccaagcagccctgcggcagcaaccccctgcccggcctgaccaagcaggaggactgctgcggcagcatcggcaccgcctggggccagagcaagtgccacaagtgcccccagctgcagtacaccggcgtgcagaagcccggccccgtgagaggcgaggtgggcgccgactgcccccagggctacaagagactgaacagcacccactgccaggacatcaacgagtgcgccatgcccggcgtgtgcagacacggcgactgcctgaacaaccccggcagctacagatgcgtgtgcccccccggccacagcctgggccccagcagaacccagtgcatcgccgacaagcccgaggagaagagcctgtgcttcagactggtgagccccgagcaccagtgccagcaccccctgaccaccagactgaccagacagctgtgctgctgcagcgtgggcaaggcctggggcgccagatgccagagatgccccaccgacggcaccgccgccttcaaggagatctgccccgccggcaagggctaccacatcctgaccagccaccagaccctgaccatccagggcgagagcgacttcagcctgttcctgcaccccgacggcccccccaagccccagcagctgcccgagagccccagccaggcccccccccccgaggacaccgaggaggagagaggcgtgaccaccgacagccccgtgagcgaggagagaagcgtgcagcagagccaccccaccgccaccaccacccccgccagaccctaccccgagctgatcagcagacccagcccccccaccatgagatggttcctgcccgacctgccccccagcagaagcgccgtggagatcgcccccacccaggtgaccgagaccgacgagtgcagactgaaccagaacatctgcggccacggcgagtgcgtgcccggcccccccgactacagctgccactgcaaccccggctacagaagccacccccagcacagatactgcgtggacgtgaacgagtgcgaggccgagccctgcggccccggcagaggcatctgcatgaacaccggcggcagctacaactgccactgcaacagaggctacagactgcacgtgggcgccggcggcagaagctgcgtggacctgaacgagtgcgccaagccccacctgtgcggcgacggcggcttctgcatcaacttccccggccactacaagtgcaactgctaccccggctacagactgaaggccagcagaccccccgtgtgcgaggacatcgacgagtgcagagaccccagcagctgccccgacggcaagtgcgagaacaagcccggcagcttcaagtgcatcgcctgccagcccggctacagaagccagggcggcggcgcctgcagagacgtgaacgagtgcgccgagggcagcccctgcagccccggctggtgcgagaacctgcccggcagcttcagatgcacctgcgcccagggctacgcccccgcccccgacggcagaagctgcctggacgtggacgagtgcgaggccggcgacgtgtgcgacaacggcatctgcagcaacacccccggcagcttccagtgccagtgcctgagcggctaccacctgagcagagacagaagccactgcgaggacatcgacgagtgcgacttccccgccgcctgcatcggcggcgactgcatcaacaccaacggcagctacagatgcctgtgcccccagggccacagactggtgggcggcagaaagtgccaggacatcgacgagtgcagccaggaccccagcctgtgcctgccccacggcgcctgcaagaacctgcagggcagctacgtgtgcgtgtgcgacgagggcttcacccccacccaggaccagcacggctgcgaggaggtggagcagccccaccacaagaaggagtgctacctgaacttcgacgacaccgtgttctgcgacagcgtgctggccaccaacgtgacccagcaggagtgctgctgcagcctgggcgccggctggggcgaccactgcgagatctacccctgccccgtgtacagcagcgccgagttccacagcctgtgccccgacggcaagggctacacccaggacaacaacatcgtgaactacggcatccccgcccacagagacatcgacgagtgcatgctgttcggcagcgagatctgcaaggagggcaagtgcgtgaacacccagcccggctacgagtgctactgcaagcagggcttctactacgacggcaacctgctggagtgcgtggacgtggacgagtgcctggacgagagcaactgcagaaacggcgtgtgcgagaacaccagaggcggctacagatgcgcctgcaccccccccgccgagtacagccccgcccagagacagtgcctgagccccgaggagatggacgtggacgagtgccaggaccccgccgcctgcagacccggcagatgcgtgaacctgcccggcagctacagatgcgagtgcagacccccctgggtgcccggccccagcggcagagactgccagctgcccgagagccccgccgagagagcccccgagagaagagacgtgtgctggagccagagaggcgaggacggcatgtgcgccggccccctggccggccccgccctgaccttcgacgactgctgctgcagacagggcagaggctggggcgcccagtgcagaccctgcccccccagaggcgccggcagccactgccccaccagccagagcgagagcaacagcttctgggacaccagccccctgctgctgggcaagccccccagagacgaggacagcagcgaggaggacagcgacgagtgcagatgcgtgagcggctag

SEQ ID NO: 86574 - DNA, 2202 bp, synthetic construct
  misc_feature 1..2202: note = Description of Artificial Sequence: Synthetic coding sequence
  source 1..2202: mol_type = other DNA
atgcccgccgagaccgacgagtgcagactgaaccagaacatctgcggccacggcgagtgcgtgcccggcccccccgactacagctgccactgcaaccccggctacagaagccacccccagcacagatactgcgtggacgtgaacgagtgcgaggccgagccctgcggccccggcagaggcatctgcatgaacaccggcggcagctacaactgccactgcaacagaggctacagactgcacgtgggcgccggcggcagaagctgcgtggacctgaacgagtgcgccaagccccacctgtgcggcgacggcggcttctgcatcaacttccccggccactacaagtgcaactgctaccccggctacagactgaaggccagcagaccccccgtgtgcgaggacatcgacgagtgcagagaccccagcagctgccccgacggcaagtgcgagaacaagcccggcagcttcaagtgcatcgcctgccagcccggctacagaagccagggcggcggcgcctgcagagacgtgaacgagtgcgccgagggcagcccctgcagccccggctggtgcgagaacctgcccggcagcttcagatgcacctgcgcccagggctacgcccccgcccccgacggcagaagctgcctggacgtggacgagtgcgaggccggcgacgtgtgcgacaacggcatctgcagcaacacccccggcagcttccagtgccagtgcctgagcggctaccacctgagcagagacagaagccactgcgaggacatcgacgagtgcgacttccccgccgcctgcatcggcggcgactgcatcaacaccaacggcagctacagatgcctgtgcccccagggccacagactggtgggcggcagaaagtgccaggacatcgacgagtgcagccaggaccccagcctgtgcctgccccacggcgcctgcaagaacctgcagggcagctacgtgtgcgtgtgcgacgagggcttcacccccacccaggaccagcacggctgcgaggaggtggagcagccccaccacaagaaggagtgctacctgaacttcgacgacaccgtgttctgcgacagcgtgctggccaccaacgtgacccagcaggagtgctgctgcagcctgggcgccggctggggcgaccactgcgagatctacccctgccccgtgtacagcagcgccgagttccacagcctgtgccccgacggcaagggctacacccaggacaacaacatcgtgaactacggcatccccgcccacagagacatcgacgagtgcatgctgttcggcagcgagatctgcaaggagggcaagtgcgtgaacacccagcccggctacgagtgctactgcaagcagggcttctactacgacggcaacctgctggagtgcgtggacgtggacgagtgcctggacgagagcaactgcagaaacggcgtgtgcgagaacaccagaggcggctacagatgcgcctgcaccccccccgccgagtacagccccgcccagagacagtgcctgagccccgaggagatggacgtggacgagtgccaggaccccgccgcctgcagacccggcagatgcgtgaacctgcccggcagctacagatgcgagtgcagacccccctgggtgcccggccccagcggcagagactgccagctgcccgagagccccgccgagagagcccccgagagaagagacgtgtgctggagccagagaggcgaggacggcatgtgcgccggccccctggccggccccgccctgaccttcgacgactgctgctgcagacagggcagaggctggggcgcccagtgcagaccctgcccccccagaggcgccggcagccactgccccaccagccagagcgagagcaacagcttctgggacaccagccccctgctgctgggcaagccccccagagacgaggacagcagcgaggaggacagcgacgagtgcagatgcgtgagcggcagatgcgtgcccagacccggcggcgccgtgtgcgagtgccccggcggcttccagctggacgccagcagagccagatgcgtggacatcgacgagtgcagagagctgaaccagagaggcctgctgtgcaagagcgagagatgcgtgaacaccagcggcagcttcagatgcgtgtgcaaggccggcttcgccagaagcagaccccacggcgcctgcgtgccccagagaagaagatag

SEQ ID NO: 86575 - DNA, 2649 bp, synthetic construct
  misc_feature 1..2649: note = Description of Artificial Sequence: Synthetic coding sequence
  source 1..2649: mol_type = other DNA
atgaccctgatcggcgagaacggccacagcaccgacaccctgaccggcagcggcttcagagtggccgacaagcccgaggagaagagcctgtgcttcagactggtgagccccgagcaccagtgccagcaccccctgaccaccagactgaccagacagctgtgctgctgcagcgtgggcaaggcctggggcgccagatgccagagatgccccaccgacggcaccgccgccttcaaggagatctgccccgccggcaagggctaccacatcctgaccagccaccagaccctgaccatccagggcgagagcgacttcagcctgttcctgcaccccgacggcccccccaagccccagcagctgcccgagagccccagccaggcccccccccccgaggacaccgaggaggagagaggcgtgaccaccgacagccccgtgagcgaggagagaagcgtgcagcagagccaccccaccgccaccaccacccccgccagaccctaccccgagctgatcagcagacccagcccccccaccatgagatggttcctgcccgacctgccccccagcagaagcgccgtggagatcgcccccacccaggtgaccgagaccgacgagtgcagactgaaccagaacatctgcggccacggcgagtgcgtgcccggcccccccgactacagctgccactgcaaccccggctacagaagccacccccagcacagatactgcgtggacgtgaacgagtgcgaggccgagccctgcggccccggcagaggcatctgcatgaacaccggcggcagctacaactgccactgcaacagaggctacagactgcacgtgggcgccggcggcagaagctgcgtggacctgaacgagtgcgccaagccccacctgtgcggcgacggcggcttctgcatcaacttccccggccactacaagtgcaactgctaccccggctacagactgaaggccagcagaccccccgtgtgcgaggacatcgacgagtgcagagaccccagcagctgccccgacggcaagtgcgagaacaagcccggcagcttcaagtgcatcgcctgccagcccggctacagaagccagggcggcggcgcctgcagagacgtgaacgagtgcgccgagggcagcccctgcagccccggctggtgcgagaacctgcccggcagcttcagatgcacctgcgcccagggctacgcccccgcccccgacggcagaagctgcctggacgtggacgagtgcgaggccggcgacgtgtgcgacaacggcatctgcagcaacacccccggcagcttccagtgccagtgcctgagcggctaccacctgagcagagacagaagccactgcgaggacatcgacgagtgcgacttccccgccgcctgcatcggcggcgactgcatcaacaccaacggcagctacagatgcctgtgcccccagggccacagactggtgggcggcagaaagtgccaggacatcgacgagtgcagccaggaccccagcctgtgcctgccccacggcgcctgcaagaacctgcagggcagctacgtgtgcgtgtgcgacgagggcttcacccccacccaggaccagcacggctgcgaggaggtggagcagccccaccacaagaaggagtgctacctgaacttcgacgacaccgtgttctgcgacagcgtgctggccaccaacgtgacccagcaggagtgctgctgcagcctgggcgccggctggggcgaccactgcgagatctacccctgccccgtgtacagcagcgccgagttccacagcctgtgccccgacggcaagggctacacccaggacaacaacatcgtgaactacggcatccccgcccacagagacatcgacgagtgcatgctgttcggcagcgagatctgcaaggagggcaagtgcgtgaacacccagcccggctacgagtgctactgcaagcagggcttctactacgacggcaacctgctggagtgcgtggacgtggacgagtgcctggacgagagcaactgcagaaacggcgtgtgcgagaacaccagaggcggctacagatgcgcctgcaccccccccgccgagtacagccccgcccagagacagtgcctgagccccgaggagatggagagagcccccgagagaagagacgtgtgctggagccagagaggcgaggacggcatgtgcgccggccccctggccggccccgccctgaccttcgacgactgctgctgcagacagggcagaggctggggcgcccagtgcagaccctgcccccccagaggcgccggcagccactgccccaccagccagagcgagagcaacagcttctgggacaccagccccctgctgctgggcaagccccccagagacgaggacagcagcgaggaggacagcgacgagtgcagatgcgtgagcggcagatgcgtgcccagacccggcggcgccgtgtgcgagtgccccggcggcttccagctggacgccagcagagccagatgcgtggacatcgacgagtgcagagagctgaaccagagaggcctgctgtgcaagagcgagagatgcgtgaacaccagcggcagcttcagatgcgtgtgcaaggccggcttcgccagaagcagaccccacggcgcctgcgtgccccagagaagaagatag

SEQ ID NO: 86576 - DNA, 4761 bp, synthetic construct
  misc_feature 1..4761: note = Description of Artificial Sequence: Synthetic coding sequence
  source 1..4761: mol_type = other DNA
atgggcgacgtgaaggccctgctgttcgtggccgccgccagagccagaagactgggcggcgccgccgccagcgagagcctggccgtgagcgaggccttctgcagagtgagaagctgccagcccaagaagtgcgccggcccccagagatgcctgaaccccgtgcccgccgtgcccagccccagccccagcgtgagaaagagacaggtgagcctgaactggcagcccctgaccctgcaggaggccagagccctgctgaagagaagaagacccagaggccccggcggcagaggcctgctgagaagaagacccccccagagagcccccgccggcaaggcccccgtgctgtgccccctgatctgccacaacggcggcgtgtgcgtgaagcccgacagatgcctgtgcccccccgacttcgccggcaagttctgccagctgcacagcagcggcgccagaccccccgcccccgccgtgcccggcctgaccagaagcgtgtacaccatgcccctggccaaccacagagacgacgagcacggcgtggccagcatggtgagcgtgcacgtggagcacccccaggaggccagcgtggtggtgcaccaggtggagagagtgagcggcccctgggaggaggccgacgccgaggccgtggccagagccgaggccgccgccagagccgaggccgccgccccctacaccgtgctggcccagagcgcccccagagaggacggctacagcgacgccagcggcttcggctactgcttcagagagctgagaggcggcgagtgcgccagccccctgcccggcctgagaacccaggaggtgtgctgcagaggcgccggcctggcctggggcgtgcacgactgccagctgtgcagcgagagactgggcaacagcgagagagtgagcgcccccgacggcccctgccccaccggcttcgagagagtgaacggcagctgcgaggacgtggacgagtgcgccaccggcggcagatgccagcacggcgagtgcgccaacaccagaggcggctacacctgcgtgtgccccgacggcttcctgctggacagcagcagaagcagctgcatcagccagcacgtgatcagcgaggccaagggcccctgcttcagagtgctgagagacggcggctgcagcctgcccatcctgagaaacatcaccaagcagatctgctgctgcagcagagtgggcaaggcctggggcagaggctgccagctgtgcccccccttcggcagcgagggcttcagagagatctgccccgccggccccggctaccactacagcgccagcgacctgagatacaacaccagacccctgggccaggagccccccagagtgagcctgagccagcccagaaccctgcccgccaccagcagacccagcgccggcttcctgcccacccacagactggagcccagacccgagcccagacccgaccccagacccggccccgagctgcccctgcccagcatccccgcctggaccggccccgagatccccgagagcggccccagcagcggcatgtgccagagaaacccccaggtgtgcggccccggcagatgcatcagcagacccagcggctacacctgcgcctgcgacagcggcttcagactgagcccccagggcaccagatgcatcgacgtggacgagtgcagaagagtgccccccccctgcgcccccggcagatgcgagaacagccccggcagcttcagatgcgtgtgcggccccggcttcagagccggccccagagccgccgagtgcctggacgtggacgagtgccacagagtgccccccccctgcgacctgggcagatgcgagaacacccccggcagcttcctgtgcgtgtgccccgccggctaccaggccgccccccacggcgccagctgccaggacgtggacgagtgcacccagagccccggcctgtgcggcagaggcgcctgcaagaacctgcccggcagcttcagatgcgtgtgccccgccggcttcagaggcagcgcctgcgaggaggacgtggacgagtgcgcccaggagccccccccctgcggccccggcagatgcgacaacaccgccggcagcttccactgcgcctgccccgccggcttcagaagcagaggccccggcgccccctgccaggacgtggacgagtgcgccagaagcccccccccctgcacctacggcagatgcgagaacaccgagggcagcttccagtgcgtgtgccccatgggcttccagcccaacaccgccggcagcgagtgcgaggacgtggacgagtgcgagaaccacctggcctgccccggccaggagtgcgtgaacagccccggcagcttccagtgcagaacctgccccagcggccaccacctgcacagaggcagatgcaccgacgtggacgagtgcagcagcggcgcccccccctgcggcccccacggccactgcaccaacaccgagggcagcttcagatgcagctgcgcccccggctacagagcccccagcggcagacccggcccctgcgccgacgtgaacgagtgcctggagggcgacttctgcttcccccacggcgagtgcctgaacaccgacggcagcttcgcctgcacctgcgcccccggctacagacccggccccagaggcgccagctgcctggacgtggacgagtgcagcgaggaggacctgtgccagagcggcatctgcaccaacaccgacggcagcttcgagtgcatctgcccccccggccacagagccggccccgacctggccagctgcctggacgtggacgagtgcagagagagaggccccgccctgtgcggcagccagagatgcgagaacagccccggcagctacagatgcgtgagagactgcgaccccggctaccacgccggccccgagggcacctgcgacgacgtggacgagtgccaggagtacggccccgagatctgcggcgcccagagatgcgagaacacccccggcagctacagatgcacccccgcctgcgaccccggctaccagcccacccccggcggcggctgccaggacgtggacgagtgcagaaacagaagcttctgcggcgcccacgccgtgtgccagaacctgcccggcagcttccagtgcctgtgcgaccagtacgagggcgccagagacggcagacactgcgtggacgtgaacgagtgcgagaccctgcagggcgtgtgcggcgccgccctgtgcgagaacgtggagggcagcttcctgtgcgtgtgccccaacagccccgaggagttcgaccccatgaccggcagatgcgtgccccccagaaccagcgccggcaccttccccggcagccagccccaggcccccgccagccccgtgctgcccgccagacccccccccccccccctgcccagaagacccagcacccccagacagggccccgtgggcagcggcagaagagagtgctacttcgacaccgccgcccccgacgcctgcgacaacatcctggccagaaacgtgacctggcaggagtgctgctgcaccgtgggcgagggctggggcagcggctgcagaatccagcagtgccccggcaccgagaccgccgagtaccagagcctgtgcccccacggcagaggctacctggcccccagcggcgacctgagcctgagaagagacgtggacgagtgccagctgttcagagaccaggtgtgcaagagcggcgtgtgcgtgaacaccgcccccggctacagctgctactgcagcaacggctactactaccacacccagagactggagtgcatcgacaacgacgagtgcgccgacgaggagcccgcctgcgagggcggcagatgcgtgaacaccgtgggcagctaccactgcacctgcgagccccccctggtgctggacggcagccagagaagatgcgtgagcaacgagagccagagcctggacgacaacctgggcgtgtgctggcaggaggtgggcgccgacctggtgtgcagccaccccagactggacagacaggccacctacaccgagtgctgctgcctgtacggcgaggcctggggcatggactgcgccctgtgccccgcccaggacagcgacgacttcgaggccctgtgcaacgtgctgagaccccccgcctacagcccccccagacccggcggcttcggcctgccctacgagtacggccccgacctgggccccccctaccagggcctgccctacggccccgagctgtaccccccccccgccctgccctacgacccctacccccccccccccggccccttcgccagaagagaggccccctacggcgcccccagattcgacatgcccgacttcgaggacgacggcggcccctacggcgagagcgaggcccccgccccccccggccccggcaccagatggccctacagaagcagagacaccagaagaagcttccccgagcccgaggagccccccgagggcggcagctacgccggcagcctggccgagccctacgaggagctggaggccgaggagtgcggcatcctggacggctgcaccaacggcagatgcgtgagagtgcccgagggcttcacctgcagatgcttcgacggctacagactggacatgaccagaatggcctgcgtggacatcaacgagtgcgacgaggccgaggccgccagccccctgtgcgtgaacgccagatgcctgaacaccgacggcagcttcagatgcatctgcagacccggcttcgcccccacccaccagccccaccactgcgcccccgccagacccagagcctag

SEQ ID NO: 86577 - DNA, 561 bp, synthetic construct
  misc_feature 1..561: note = Description of Artificial Sequence: Synthetic coding sequence
  source 1..561: mol_type = other DNA
atgctgggcggcgccggcggcggccccggcctgagaaccccctgccccgccgacgtggacgagtgcagcgaggaggacctgtgccagagcggcatctgcaccaacaccgacggcagcttcgagtgcatctgcccccccggccacagagccggccccgacctggccagctgcctggacgtggacgagtgcagagagagaggccccgccctgtgcggcagccagagatgcgagaacagccccggcagctacagatgcgtgagagactgcgaccccggctaccacgccggccccgagggcacctgcgacgacgtggacgagtgcagaaacagaagcttctgcggcgcccacgccgtgtgccagaacctgcccggcagcttccagtgcctgtgcgaccagtacgagggcgccagagacggcagacactgcgtggacgtgaacgagtgcgagaccctgcagggcgtgtgcggcgccgccctgtgcgagaacgtggagggcagcttcctgtgcgtgtgccccaacagccccgaggagttcgaccccatgaccggcagatgcgtgtag

SEQ ID NO: 86578 - DNA, 4872 bp, synthetic construct
  misc_feature 1..4872: note = Description of Artificial Sequence: Synthetic coding sequence
  source 1..4872: mol_type = other DNA
atgcccagacccggcaccagcggcagaagacccctgctgctggtgctgctgctgcccctgttcgccgccgccaccagcgccgccagccccagccccagccccagccaggtggtggaggtgcccggcgtgcccagcagacccgccagcgtggccgtgtgcagatgctgccccggccagaccagcagaagaagcagatgcatcagagccttctgcagagtgagaagctgccagcccaagaagtgcgccggcccccagagatgcctgaaccccgtgcccgccgtgcccagccccagccccagcgtgagaaagagacaggtgagcctgaactggcagcccctgaccctgcaggaggccagagccctgctgaagagaagaagacccagaggccccggcggcagaggcctgctgagaagaagacccccccagagagcccccgccggcaaggcccccgtgctgtgccccctgatctgccacaacggcggcgtgtgcgtgaagcccgacagatgcctgtgcccccccgacttcgccggcaagttctgccagctgcacagcagcggcgccagaccccccgcccccgccgtgcccggcctgaccagaagcgtgtacaccatgcccctggccaaccacagagacgacgagcacggcgtggccagcatggtgagcgtgcacgtggagcacccccaggaggccagcgtggtggtgcaccaggtggagagagtgagcggcccctgggaggaggccgacgccgaggccgtggccagagccgaggccgccgccagagccgaggccgccgccccctacaccgtgctggcccagagcgcccccagagaggacggctacagcgacgccagcggcttcggctactgcttcagagagctgagaggcggcgagtgcgccagccccctgcccggcctgagaacccaggaggtgtgctgcagaggcgccggcctggcctggggcgtgcacgactgccagctgtgcagcgagagactgggcaacagcgagagagtgagcgcccccgacggcccctgccccaccggcttcgagagagtgaacggcagctgcgaggacgtggacgagtgcgccaccggcggcagatgccagcacggcgagtgcgccaacaccagaggcggctacacctgcgtgtgccccgacggcttcctgctggacagcagcagaagcagctgcatcagccagcacgtgatcagcgaggccaagggcccctgcttcagagtgctgagagacggcggctgcagcctgcccatcctgagaaacatcaccaagcagatctgctgctgcagcagagtgggcaaggcctggggcagaggctgccagctgtgcccccccttcggcagcgagggcttcagagagatctgccccgccggccccggctaccactacagcgccagcgacctgagatacaacaccagacccctgggccaggagccccccagagtgagcctgagccagcccagaaccctgcccgccaccagcagacccagcgccggcttcctgcccacccacagactggagcccagacccgagcccagacccgaccccagacccggccccgagctgcccctgcccagcatccccgcctggaccggccccgagatccccgagagcggccccagcagcggcatgtgccagagaaacccccaggtgtgcggccccggcagatgcatcagcagacccagcggctacacctgcgcctgcgacagcggcttcagactgagcccccagggcaccagatgcatcgacgtggacgagtgcagaagagtgccccccccctgcgcccccggcagatgcgagaacagccccggcagcttcagatgcgtgtgcggccccggcttcagagccggccccagagccgccgagtgcctggacgtggacgagtgccacagagtgccccccccctgcgacctgggcagatgcgagaacacccccggcagcttcctgtgcgtgtgccccgccggctaccaggccgccccccacggcgccagctgccaggacgtggacgagtgcacccagagccccggcctgtgcggcagaggcgcctgcaagaacctgcccggcagcttcagatgcgtgtgccccgccggcttcagaggcagcgcctgcgaggaggacgtggacgagtgcgcccaggagccccccccctgcggccccggcagatgcgacaacaccgccggcagcttccactgcgcctgccccgccggcttcagaagcagaggccccggcgccccctgccaggacgtggacgagtgcgccagaagcccccccccctgcacctacggcagatgcgagaacaccgagggcagcttccagtgcgtgtgccccatgggcttccagcccaacaccgccggcagcgagtgcgaggacgtggacgagtgcgagaaccacctggcctgccccggccaggagtgcgtgaacagccccggcagcttccagtgcagaacctgccccagcggccaccacctgcacagaggcagatgcaccgacgtggacgagtgcagcagcggcgcccccccctgcggcccccacggccactgcaccaacaccgagggcagcttcagatgcagctgcgcccccggctacagagcccccagcggcagacccggcccctgcgccgacgtgaacgagtgcctggagggcgacttctgcttcccccacggcgagtgcctgaacaccgacggcagcttcgcctgcacctgcgcccccggctacagacccggccccagaggcgccagctgcctggacgtggacgagtgcagcgaggaggacctgtgccagagcggcatctgcaccaacaccgacggcagcttcgagtgcatctgcccccccggccacagagccggccccgacctggccagctgcctggacgtggacgagtgcagagagagaggccccgccctgtgcggcagccagagatgcgagaacagccccggcagctacagatgcgtgagagactgcgaccccggctaccacgccggccccgagggcacctgcgacgacgtggacgagtgccaggagtacggccccgagatctgcggcgcccagagatgcgagaacacccccggcagctacagatgcacccccgcctgcgaccccggctaccagcccacccccggcggcggctgccaggacgtggacgagtgcagaaacagaagcttctgcggcgcccacgccgtgtgccagaacctgcccggcagcttccagtgcctgtgcgaccagtacgagggcgccagagacggcagacactgcgtggacgtgaacgagtgcgagaccctgcagggcgtgtgcggcgccgccctgtgcgagaacgtggagggcagcttcctgtgcgtgtgccccaacagccccgaggagttcgaccccatgaccggcagatgcgtgccccccagaaccagcgccggcaccttccccggcagccagccccaggcccccgccagccccgtgctgcccgccagacccccccccccccccctgcccagaagacccagcacccccagacagggccccgtgggcagcggcagaagagagtgctacttcgacaccgccgcccccgacgcctgcgacaacatcctggccagaaacgtgacctggcaggagtgctgctgcaccgtgggcgagggctggggcagcggctgcagaatccagcagtgccccggcaccgagaccgccgagtaccagagcctgtgcccccacggcagaggctacctggcccccagcggcgacctgagcctgagaagagacgtggacgagtgccagctgttcagagaccaggtgtgcaagagcggcgtgtgcgtgaacaccgcccccggctacagctgctactgcagcaacggctactactaccacacccagagactggagtgcatcgacaacgacgagtgcgccgacgaggagcccgcctgcgagggcggcagatgcgtgaacaccgtgggcagctaccactgcacctgcgagccccccctggtgctggacggcagccagagaagatgcgtgagcaacgagagccagagcctggacgacaacctgggcgtgtgctggcaggaggtgggcgccgacctggtgtgcagccaccccagactggacagacaggccacctacaccgagtgctgctgcctgtacggcgaggcctggggcatggactgcgccctgtgccccgcccaggacagcgacgacttcgaggccctgtgcaacgtgctgagaccccccgcctacagcccccccagacccggcggcttcggcctgccctacgagtacggccccgacctgggccccccctaccagggcctgccctacggccccgagctgtaccccccccccgccctgccctacgacccctacccccccccccccggccccttcgccagaagagaggccccctacggcgcccccagattcgacatgcccgacttcgaggacgacggcggcccctacggcgagagcgaggcccccgccccccccggccccggcaccagatggccctacagaagcagagacaccagaagaagcttccccgagcccgaggagccccccgagggcggcagctacgccggcagcctggccgagccctacgaggagctggaggccgaggagtgcggcatcctggacggctgcaccaacggcagatgcgtgagagtgcccgagggcttcacctgcagatgcttcgacggctacagactggacatgaccagaatggcctgcgtggacatcaacgagtgcgacgaggccgaggccgccagccccctgtgcgtgaacgccagatgcctgaacaccgacggcagcttcagatgcatctgcagacccggcttcgcccccacccaccagccccaccactgcgcccccgccagacccagagcctag

SEQ ID NO: 86579 - DNA, 1155 bp, synthetic construct
  misc_feature 1..1155: note = Description of Artificial Sequence: Synthetic coding sequence
  source 1..1155: mol_type = other DNA
atgaccggcagatgcgtgccccccagaaccagcgccgacgtggacgagtgccagctgttcagagaccaggtgtgcaagagcggcgtgtgcgtgaacaccgcccccggctacagctgctactgcagcaacggctactactaccacacccagagactggagtgcatcgacaacgacgagtgcgccgacgaggagcccgcctgcgagggcggcagatgcgtgaacaccgtgggcagctaccactgcacctgcgagccccccctggtgctggacggcagccagagaagatgcgtgagcaacgagagccagagcctggacgacaacctgggcgtgtgctggcaggaggtgggcgccgacctggtgtgcagccaccccagactggacagacaggccacctacaccgagtgctgctgcctgtacggcgaggcctggggcatggactgcgccctgtgccccgcccaggacagcgacgacttcgaggccctgtgcaacgtgctgagaccccccgcctacagcccccccagacccggcggcttcggcctgccctacgagtacggccccgacctgggccccccctaccagggcctgccctacggccccgagctgtaccccccccccgccctgccctacgacccctacccccccccccccggccccttcgccagaagagaggccccctacggcgcccccagattcgacatgcccgacttcgaggacgacggcggcccctacggcgagagcgaggcccccgccccccccggccccggcaccagatggccctacagaagcagagacaccagaagaagcttccccgagcccgaggagccccccgagggcggcagctacgccggcagcctggccgagccctacgaggagctggaggccgaggagtgcggcatcctggacggctgcaccaacggcagatgcgtgagagtgcccgagggcttcacctgcagatgcttcgacggctacagactggacatgaccagaatggcctgcgtggacatcaacgagtgcgacgaggccgaggccgccagccccctgtgcgtgaacgccagatgcctgaacaccgacggcagcttcagatgcatctgcagacccggcttcgcccccacccaccagccccaccactgcgcccccgccagacccagagcctag

SEQ ID NO: 86580 - DNA, 4671 bp, synthetic construct
  misc_feature 1..4671: note = Description of Artificial Sequence: Synthetic coding sequence
  source 1..4671: mol_type = other DNA
atggccggcggcgtgagactgctgtgggtgagcctgctggtgctgctggcccagctgggcccccagcccggcctgggcagactgggcgagagactgagagtgagattcacccccgtggtgtgcggcctgagatgcgtgcacggccccaccggcagcagatgcacccccacctgcgcccccagaaacgccaccagcgtggacagcggcgcccccggcggcgccgcccccggcggccccggcttcagagccttcctgtgccccctgatctgccacaacggcggcgtgtgcgtgaagcccgacagatgcctgtgcccccccgacttcgccggcaagttctgccagctgcacagcagcggcgccagaccccccgcccccgccgtgcccggcctgaccagaagcgtgtacaccatgcccctggccaaccacagagacgacgagcacggcgtggccagcatggtgagcgtgcacgtggagcacccccaggaggccagcgtggtggtgcaccaggtggagagagtgagcggcccctgggaggaggccgacgccgaggccgtggccagagccgaggccgccgccagagccgaggccgccgccccctacaccgtgctggcccagagcgcccccagagaggacggctacagcgacgccagcggcttcggctactgcttcagagagctgagaggcggcgagtgcgccagccccctgcccggcctgagaacccaggaggtgtgctgcagaggcgccggcctggcctggggcgtgcacgactgccagctgtgcagcgagagactgggcaacagcgagagagtgagcgcccccgacggcccctgccccaccggcttcgagagagtgaacggcagctgcgaggacgtggacgagtgcgccaccggcggcagatgccagcacggcgagtgcgccaacaccagaggcggctacacctgcgtgtgccccgacggcttcctgctggacagcagcagaagcagctgcatcagccagcacgtgatcagcgaggccaagggcccctgcttcagagtgctgagagacggcggctgcagcctgcccatcctgagaaacatcaccaagcagatctgctgctgcagcagagtgggcaaggcctggggcagaggctgccagctgtgcccccccttcggcagcgagggcttcagagagatctgccccgccggccccggctaccactacagcgccagcgacctgagatacaacaccagacccctgggccaggagccccccagagtgagcctgagccagcccagaaccctgcccgccaccagcagacccagcgccggcttcctgcccacccacagactggagcccagacccgagcccagacccgaccccagacccggccccgagctgcccctgcccagcatccccgcctggaccggccccgagatccccgagagcggccccagcagcggcatgtgccagagaaacccccaggtgtgcggccccggcagatgcatcagcagacccagcggctacacctgcgcctgcgacagcggcttcagactgagcccccagggcaccagatgcatcgacgtggacgagtgcagaagagtgccccccccctgcgcccccggcagatgcgagaacagccccggcagcttcagatgcgtgtgcggccccggcttcagagccggccccagagccgccgagtgcctggacgtggacgagtgccacagagtgccccccccctgcgacctgggcagatgcgagaacacccccggcagcttcctgtgcgtgtgccccgccggctaccaggccgccccccacggcgccagctgccaggacgtggacgagtgcacccagagccccggcctgtgcggcagaggcgcctgcaagaacctgcccggcagcttcagatgcgtgtgccccgccggcttcagaggcagcgcctgcgaggaggacgtggacgagtgcgcccaggagccccccccctgcggccccggcagatgcgacaacaccgccggcagcttccactgcgcctgccccgccggcttcagaagcagaggccccggcgccccctgccaggacgtggacgagtgcgccagaagcccccccccctgcacctacggcagatgcgagaacaccgagggcagcttccagtgcgtgtgccccatgggcttccagcccaacaccgccggcagcgagtgcgaggacgtggacgagtgcgagaaccacctggcctgccccggccaggagtgcgtgaacagccccggcagcttccagtgcagaacctgccccagcggccaccacctgcacagaggcagatgcaccgacgtggacgagtgcagcagcggcgcccccccctgcggcccccacggccactgcaccaacaccgagggcagcttcagatgcagctgcgcccccggctacagagcccccagcggcagacccggcccctgcgccgacgtgaacgagtgcctggagggcgacttctgcttcccccacggcgagtgcctgaacaccgacggcagcttcgcctgcacctgcgcccccggctacagacccggccccagaggcgccagctgcctggacgtggacgagtgcagcgaggaggacctgtgccagagcggcatctgcaccaacaccgacggcagcttcgagtgcatctgcccccccggccacagagccggccccgacctggccagctgcctggacgtggacgagtgcagagagagaggccccgccctgtgcggcagccagagatgcgagaacagccccggcagctacagatgcgtgagagactgcgaccccggctaccacgccggccccgagggcacctgcgacgacgtggacgagtgccaggagtacggccccgagatctgcggcgcccagagatgcgagaacacccccggcagctacagatgcacccccgcctgcgaccccggctaccagcccacccccggcggcggctgccaggacgtggacgagtgcagaaacagaagcttctgcggcgcccacgccgtgtgccagaacctgcccggcagcttccagtgcctgtgcgaccagtacgagggcgccagagacggcagacactgcgtggacgtgaacgagtgcgagaccctgcagggcgtgtgcggcgccgccctgtgcgagaacgtggagggcagcttcctgtgcgtgtgccccaacagccccgaggagttcgaccccatgaccggcagatgcgtgccccccagaaccagcgccggcaccttccccggcagccagccccaggcccccgccagccccgtgctgcccgccagacccccccccccccccctgcccagaagacccagcacccccagacagggccccgtgggcagcggcagaagagagtgctacttcgacaccgccgcccccgacgcctgcgacaacatcctggccagaaacgtgacctggcaggagtgctgctgcaccgtgggcgagggctggggcagcggctgcagaatccagcagtgccccggcaccgagaccgccgagtaccagagcctgtgcccccacggcagaggctacctggcccccagcggcgacctgagcctgagaagagacgtggacgagtgccagctgttcagagaccaggtgtgcaagagcggcgtgtgcgtgaacaccgcccccggctacagctgctactgcagcaacggctactactaccacacccagagactggagtgcatcgacaacgacgagtgcgccgacgaggagcccgcctgcgagggcggcagatgcgtgaacaccgtgggcagctaccactgcacctgcgagccccccctggtgctggacggcagccagagaagatgcgtgagcaacgagagccagagcctggacgacaacctgggcgtgtgctggcaggaggtgggcgccgacctggtgtgcagccaccccagactggacagacaggccacctacaccgagtgctgctgcctgtacggcgaggcctggggcatggactgcgccctgtgccccgcccaggacagcgacgacttcgaggccctgtgcaacgtgctgagaccccccgcctacagcccccccagacccggcggcttcggcctgccctacgagtacggccccgacctgggccccccctaccagggcctgccctacggccccgagctgtaccccccccccgccctgccctacgacccctacccccccccccccggccccttcgccagaagagaggccccctacggcgcccccagattcgacatgcccgacttcgaggacgacggcggcccctacggcgagagcgaggcccccgccccccccggccccggcaccagatggccctacagaagcagagacaccagaagaagcttccccgagcccgaggagccccccgagggcggcagctacgccggcagcctggccgagccctacgaggagctggaggccgaggagtgcggcatcctggacggctgcaccaacggcagatgcgtgagagtgcccgagggcttcacctgcagatgcttcgacggctacagactggacatgaccagaatggcctgcgtggacatcaacgagtgcgacgaggccgaggccgccagccccctgtgcgtgaacgccagatgcctgaacaccgacggcagcttcagatgcatctgcagacccggcttcgcccccacccaccagccccaccactgcgcccccgccagacccagagcctag

SEQ ID NO: 86581 - DNA, 2700 bp, synthetic construct
  misc_feature 1..2700: note = Description of Artificial Sequence: Synthetic coding sequence
  source 1..2700: mol_type = other DNA
atgtgccagagaaacccccaggtgtgcggccccggcagatgcatcagcagacccagcggctacacctgcgcctgcgacagcggcttcagactgagcccccagggcaccagatgcatcgacgtggacgagtgcagaagagtgccccccccctgcgcccccggcagatgcgagaacagccccggcagcttcagatgcgtgtgcggccccggcttcagagccggccccagagccgccgagtgcctggacgtggacgagtgccacagagtgccccccccctgcgacctgggcagatgcgagaacacccccggcagcttcctgtgcgtgtgccccgccggctaccaggccgccccccacggcgccagctgccaggacgtggacgagtgcacccagagccccggcctgtgcggcagaggcgcctgcaagaacctgcccggcagcttcagatgcgtgtgccccgccggcttcagaggcagcgcctgcgaggaggacgtggacgagtgcgcccaggagccccccccctgcggccccggcagatgcgacaacaccgccggcagcttccactgcgcctgccccgccggcttcagaagcagaggccccggcgccccctgccaggacgtggacgagtgcgccagaagcccccccccctgcacctacggcagatgcgagaacaccgagggcagcttccagtgcgtgtgccccatgggcttccagcccaacaccgccggcagcgagtgcgaggacgtggacgagtgcgagaaccacctggcctgccccggccaggagtgcgtgaacagccccggcagcttccagtgcagaacctgccccagcggccaccacctgcacagaggcagatgcaccgacgtggacgagtgcagcagcggcgcccccccctgcggcccccacggccactgcaccaacaccgagggcagcttcagatgcagctgcgcccccggctacagagcccccagcggcagacccggcccctgcgccgacgtgaacgagtgcctggagggcgacttctgcttcccccacggcgagtgcctgaacaccgacggcagcttcgcctgcacctgcgcccccggctacagacccggccccagaggcgccagctgcctggacgtggacgagtgcagcgaggaggacctgtgccagagcggcatctgcaccaacaccgacggcagcttcgagtgcatctgcccccccggccacagagccggccccgacctggccagctgcctggacgtggacgagtgcagagagagaggccccgccctgtgcggcagccagagatgcgagaacagccccggcagctacagatgcgtgagagactgcgaccccggctaccacgccggccccgagggcacctgcgacgacgtgaacgagtgcgagaccctgcagggcgtgtgcggcgccgccctgtgcgagaacgtggagggcagcttcctgtgcgtgtgccccaacagccccgaggagttcgaccccatgaccggcagatgcgtgccccccagaaccagcgccggcaccttccccggcagccagccccaggcccccgccagccccgtgctgcccgccagacccccccccccccccctgcccagaagacccagcacccccagacagggccccgtgggcagcggcagaagagagtgctacttcgacaccgccgcccccgacgcctgcgacaacatcctggccagaaacgtgacctggcaggagtgctgctgcaccgtgggcgagggctggggcagcggctgcagaatccagcagtgccccggcaccgagaccgccgagtaccagagcctgtgcccccacggcagaggctacctggcccccagcggcgacctgagcctgagaagagacgtggacgagtgccagctgttcagagaccaggtgtgcaagagcggcgtgtgcgtgaacaccgcccccggctacagctgctactgcagcaacggctactactaccacacccagagactggagtgcatcgacaacgacgagtgcgccgacgaggagcccgcctgcgagggcggcagatgcgtgaacaccgtgggcagctaccactgcacctgcgagccccccctggtgctggacggcagccagagaagatgcgtgagcaacgagagccagagcctggacgacaacctgggcgtgtgctggcaggaggtgggcgccgacctggtgtgcagccaccccagactggacagacaggccacctacaccgagtgctgctgcctgtacggcgaggcctggggcatggactgcgccctgtgccccgcccaggacagcgacgacttcgaggccctgtgcaacgtgctgagaccccccgcctacagcccccccagacccggcggcttcggcctgccctacgagtacggccccgacctgggccccccctaccagggcctgccctacggccccgagctgtaccccccccccgccctgccctacgacccctacccccccccccccggccccttcgccagaagagaggccccctacggcgcccccagattcgacatgcccgacttcgaggacgacggcggcccctacggcgagagcgaggcccccgccccccccggccccggcaccagatggccctacagaagcagagacaccagaagaagcttccccgagcccgaggagccccccgagggcggcagctacgccggcagcctggccgagccctacgaggagctgtag

SEQ ID NO: 86582 - DNA, 639 bp, synthetic construct
  misc_feature 1..639: note = Description of Artificial Sequence: Synthetic coding sequence
  source 1..639: mol_type = other DNA
atgtggaccagcgccaccgcctgcagaagaagagtgaccagcggcgccgccagaaccagacaggccgccagctgcgcctgcgccccccccggcaccagactgcacagaaccgagcccgccgccagaatgtggatgagcgtgcccgaggccccccaccccgcccccaccgccggcgtgagaacccagaaggccgccagcagcgtgagcgccccctgggccagcaaccccaccctgctggcccccaacgtggacgagtgcgagaaccacctggcctgccccggccaggagtgcgtgaacagccccggcagcttccagtgcagaacctgccccagcggccaccacctgcacagaggcagatgcaccgacgtggacgagtgcagcagcggcgcccccccctgcggcccccacggccactgcaccaacaccgagggcagcttcagatgcagctgcgcccccggctacagagcccccagcggcagacccggcccctgcgccgacgtgaacgagtgcctggagggcgacttctgcttcccccacggcgagtgcctgaacaccgacggcagcttcgcctgcacctgcgcccccggctacagacccggccccagaggcgccagctgcctgggcagctaccccggctag

SEQ ID NO: 86583 - DNA, 669 bp, synthetic construct
  misc_feature 1..669: note = Description of Artificial Sequence: Synthetic coding sequence
  source 1..669: mol_type = other DNA
atggagatcccccccaccaactaccccgccagcagagccgccctggtggcccagaactacatcaactaccagcagggcaccccccacagagtgttcgaggtgcagaaggtgaagcaggccagcatggaggacatccccggcagaggccacaagtaccacctgaagttcgccgtggaggagatcatccagaagcaggtgaaggtgaactgcaccgccgaggtgctgtaccccagcaccggccaggagaccgcccccgaggtgaacttcaccttcgagggcgagaccggcaagaaccccgacgaggaggacaacaccttctaccagagactgaagagcatgaaggagcccctggaggcccagaacatccccgacaacttcggcaacgtgagccccgagatgaccctggtgctgcacctggcctgggtggcctgcggctacatcatctggcagaacagcaccgaggacacctggtacaagatggtgaagatccagaccgtgaagcaggtgcagagaaacgacgacttcatcgagctggactacaccatcctgctgcacaacatcgccagccaggagatcatcccctggcagatgcaggtgctgtggcacccccagtacggcaccaaggtgaagcacaacagcagactgcccaaggaggtgcagctggagtag

SEQ ID NO: 86584 - DNA, 888 bp, synthetic construct
  misc_feature 1..888: note = Description of Artificial Sequence: Synthetic coding sequence
  source 1..888: mol_type = other DNA
atgggcctgcccgtgagctgggccccccccgccctgtgggtgctgggctgctgcgccctgctgctgagcctgtgggccctgtgcaccgcctgcagaagacccgaggacgccgtggcccccagaaagagagccagaagacagagagccagactgcagggcagcgccaccgccgccgaggccagcctgctgagaagaacccacctgtgcagcctgagcaagagcgacaccagactgcacgagctgcacagaggccccagaagcagcagagccctgagacccgccagcatggacctgctgagaccccactggctggaggtgagcagagacatcaccggcccccaggccgcccccagcgccttcccccaccaggagctgcccagagccctgcccgccgccgccgccaccgccggctgcgccggcctggaggccacctacagcaacgtgggcctggccgccctgcccggcgtgagcctggccgccagccccgtggtggccgagtacgccagagtgcagaagagaaagggcacccacagaagcccccaggagccccagcagggcaagaccgaggtgacccccgccgcccaggtggacgtgctgtacagcagagtgtgcaagcccaagagaagagaccccggccccaccaccgaccccctggaccccaagggccagggcgccatcctggccctggccggcgacctggcctaccagaccctgcccctgagagccctggacgtggacagcggccccctggagaacgtgtacgagagcatcagagagctgggcgaccccgccggcagaagcagcacctgcggcgccggcaccccccccgccagcagctgccccagcctgggcagaggctggagacccctgcccgccagcctgccctag

SEQ ID NO: 86585 - DNA, 324 bp, synthetic construct
  misc_feature 1..324: note = Description of Artificial Sequence: Synthetic coding sequence
  source 1..324: mol_type = other DNA
atgggcctgcccgtgagctgggccccccccgccctgtgggtgctgggctgctgcgccctgctgctgagcctgtgggccctgtgcaccgcctgcagaagacccgaggacgccgtggcccccagaaagagagccagaagacagagagccagactgcagggcagcgccaccgccgccgaggccagcctgctgagaagaacccacctgtgcagcctgagcaagagcgacaccagactgcacgagctgcacagaggccccagaagcagcagagccctgagacccgccagcatggacctgctgagaccccactggctggaggtgagctag

SEQ ID NO: 86586 - DNA, 2094 bp, synthetic construct
  misc_feature 1..2094: note = Description of Artificial Sequence: Synthetic coding sequence
  source 1..2094: mol_type = other DNA
atgggcgagagagccggcagccccggcaccgaccaggagagaaaggccggcaagcaccactacagctacctgagcgacttcgagaccccccagagcagcggcagaagcagcctggtgagcagcagccccgccagcgtgagaagaaagaaccccaagagacagaccagcgacggccaggtgcaccaccaggcccccagaaagcccagccccaagggcctgcccaacagaaagggcgtgagagtgggcttcagaagccagagcctgaacagagagcccctgagaaaggacaccgacctggtgaccaagagaatcctgagcgccagactgctgaagatcaacgagctgcagaacgaggtgagcgagctgcaggtgaagctggccgagctgctgaaggagaacaagagcctgaagagactgcagtacagacaggagaaggccctgaacaagttcgaggacgccgagaacgagatcagccagctgatcttcagacacaacaacgagatcaccgccctgaaggagagactgagaaagagccaggagaaggagagagccaccgagaagagagtgaaggacaccgagagcgagctgttcagaaccaagttcagcctgcagaagctgaaggagatcagcgaggccagacacctgcccgagagagacgacctggccaagaagctggtgagcgccgagctgaagctggacgacaccgagagaagaatcaaggagctgagcaagaacctggagctgagcaccaacagcttccagagacagctgctggccgagagaaagagagcctacgaggcccacgacgagaacaaggtgctgcagaaggaggtgcagagactgtaccacaagctgaaggagaaggagagagagctggacatcaagaacatctacagcaacagactgcccaagagcagccccaacaaggagaaggagctggccctgagaaagaacgccgcctgccagagcgacttcgccgacctgtgcaccaagggcgtgcagaccatggaggacttcaagcccgaggagtaccccctgacccccgagaccatcatgtgctacgagaacaagtgggaggagcccggccacctgaccctggacctgcagagccagaagcaggacagacacggcgaggccggcatcctgaaccccatcatggagagagaggagaagttcgtgaccgacgaggagctgcacgtggtgaagcaggaggtggagaagctggaggacgagtgggagagagaggagctggacaagaagcagaaggagaaggccagcctgctggagagagaggagaagcccgagtgggagaccggcagataccagctgggcatgtaccccatccagaacatggacaagctgcagggcgaggaggaggagagactgaagagagagatgctgctggccaagctgaacgagatcgacagagagctgcaggacagcagaaacctgaagtaccccgtgctgcccctgctgcccgacttcgagagcaagctgcacagccccgagagaagccccaagacctacagattcagcgagagcagcgagagactgttcaacggccaccacctgcaggacatcagcttcagcacccccaagggcgagggccagaacagcggcaacgtgagaagccccgccagccccaacgagttcgccttcggcagctacgtgcccagcttcgccaagaccagcgagagaagcaaccccttcagccagaagagcagcttcctggacttccagagaaacagcatggagaagctgagcaaggacggcgtggacctgatcaccagaaaggagaagaaggccaacctgatggagcagctgttcggcgccagcggcagcagcaccatcagcagcaagagcagcgaccccaacagcgtggccagcagcaagggcgacatcgaccccctgaacttcctgcccggcaacaagggcagcagagaccaggagcacgacgaggacgagggcttcttcctgagcgagggcagaagcttcaaccccaacagacacagactgaagcacgccgacgacaagcccgccgtgaaggccgccgacagcgtggaggacgagatcgaggaggtggccctgagatag

SEQ ID NO: 86587 - DNA, 2094 bp, synthetic construct; identical to SEQ ID NO: 86586
  misc_feature 1..2094: note = Description of Artificial Sequence: Synthetic coding sequence
  source 1..2094: mol_type = other DNA

SEQ ID NO: 86588 - DNA, 693 bp, synthetic construct
  misc_feature 1..693: note = Description of Artificial Sequence: Synthetic coding sequence
  source 1..693: mol_type = other DNA
atgaagaaccccatgctggaggtggtgagcctgctgctggagaagctgctgctgatcagcaacttcaccctgttcagcagcggcgccgccggcgaggacaagggcagaaacagcttctacgagaccagcagcttccacagaggcgacgtgctggaggtgcccagaacccacctgacccactacggcatctacctgggcgacaacagagtggcccacatgatgcccgacatcctgctggccctgaccgacgacatgggcagaacccagaaggtggtgagcaacaagagactgatcctgggcgtgatcgtgaaggtggccagcatcagagtggacaccgtggaggacttcgcctacggcgccaacatcctggtgaaccacctggacgagagcctgcagaagaaggccctgctgaacgaggaggtggccagaagagccgagaagctgctgggcttcaccccctacagcctgctgtggaacaactgcgagcacttcgtgacctactgcagatacggcacccccatcagcccccagagcgacaagttctgcgagaccgtgaagatcatcatcagagaccagagaagcgtgctggccagcgccgtgctgggcctggccagcatcgtgtgcaccggcctggtgagctacaccaccctgcccgccatcttcatccccttcttcctgtggatggccggctag

SEQ ID NO: 86589 - DNA, 210 bp, synthetic construct
  misc_feature 1..210: note = Description of Artificial Sequence: Synthetic coding sequence
  source 1..210: mol_type = other DNA
atgaagaaccccatgctggaggtggtgagcctgctgctggagaagctgctgctgatcagcaacttcaccctgttcagcagcggcgccgccggcgaggacaagggcagaaacagcttctacgagaccagcagcttccacagaggcgacgtgctggaggtgcccagaacccacctgacccactacggcatctacctgggcgacaacagatag

SEQ ID NO: 86590 - DNA, 693 bp, synthetic construct; identical to SEQ ID NO: 86588
  misc_feature 1..693: note = Description of Artificial Sequence: Synthetic coding sequence
  source 1..693: mol_type = other DNA

SEQ ID NO: 86591 - DNA, 1110 bp, synthetic construct
  misc_feature 1..1110: note = Description of Artificial Sequence: Synthetic coding sequence
  source 1..1110: mol_type = other DNA
atggtgtgggcccccctgggcccccccagaaccgactgcctgaccctgctgcacacccccagcaaggacagccccaagatgagcctggagtggctggtggcctggagctggagcctggacggcctgagagactgcatcgccaccggcatccagagcgtgagagactgcgacaccaccgccgtgatcaccgtggcctgcctgctggtgctgttcgtgtggtactgctaccacgtgggcagagagcagcccagaccctacgtgagcgtgaacagcctgatgcaggccgccgacgccaacggcctgcagaacggctacgtgtactgccagagccccgagtgcgtgagatgcacccacaacgagggcctgaaccagaagctgtaccacaacctgcaggagtacgccaagagatacagctggagcggcatgggcagaatccacaagggcatcagagagcagggcagatacctgaacagcagacccagcatccagaagcccgaggtgttcttcctgcccgacctgcccaccaccccctacttcagcagagacgcccagaagcacgacgtggaggtgctggagagaaacttccagaccatcctgtgcgagttcgagaccctgtacaaggccttcagcaactgcagcctgccccagggctggaagatgaacagcacccccagcggcgagtggttcaccttctacctggtgaaccagggcgtgtgcgtgcccagaaactgcagaaagtgccccagaacctacagactgctgggcagcctgagaacctgcatcggcaacaacgtgttcggcaacgcctgcatcagcgtgctgagccccggcaccgtgatcaccgagcactacggccccaccaacatcagaatcagatgccacctgggcctgaagacccccaacggctgcgagctggtggtgggcggcgagccccagtgctgggccgagggcagatgcctgctgttcgacgacagcttcctgcacgccgccttccacgagggcagcgccgaggacggccccagagtggtgttcatggtggacctgtggcaccccaacgtggccgccgccgagagacaggccctggacttcatcttcgcccccggcagatag

SEQ ID NO: 86592 - DNA, 984 bp, synthetic construct
  misc_feature 1..984: note = Description of Artificial Sequence: Synthetic coding sequence
  source 1..984: mol_type = other DNA
atgagccagcccagcggcggcagagcccccggcaccagaatctacagctggagctgccccaccgtgatgagccccggcgagaagctggaccccatccccgacagcttcatcctgcagccccccgtgttccaccccgtggtgccctacgtgaccaccatcttcggcggcctgcacgccggcaagatggtgatgctgcagggcgtggtgcccctggacgcccacagattccaggtggacttccagtgcggctgcagcctgtgccccagacccgacatcgccttccacttcaaccccagattccacaccaccaagccccacgtgatctgcaacaccctgcacggcggcagatggcagagagaggccagatggccccacctggccctgagaagaggcagcagcttcctgatcctgttcctgttcggcaacgaggaggtgaaggtgagcgtgaacggccagcacttcctgcacttcagatacagactgcccctgagccacgtggacaccctgggcatcttcggcgacatcctggtggaggccgtgggcttcctgaacatcaaccccttcgtggagggcagcagagagtaccccgccggccacgaggtgccctgcagccacgccctgccccagggcctgagccccggccaggtgatcatcgtgagaggcctggtgctgcaggagcccaagcacttcaccgtgagcctgagagaccaggccgcccacgcccccgtgaccctgagagccagcttcgccgacagaaccctggcctggatcagcagatggggccagaagaagctgatcagcgcccccttcctgttctacccccagagattcttcgaggtgctgctgctgttccaggagggcggcctgaagctggccctgaacggccagggcctgggcgccaccagcatgaaccagcaggccctggagcagctgagagagctgagaatcagcggcagcgtgcagctgtactgcgtgcacagctag

SEQ ID NO: 86593 - DNA, 1014 bp, synthetic construct
  misc_feature 1..1014: note = Description of Artificial Sequence: Synthetic coding sequence
  source 1..1014: mol_type = other DNA
atgagccagcccagcggcggcagagcccccggcaccagaatctacagctggagctgccccaccgtgatgagccccggcgagaagctggaccccatccccgacagcttcatcctgcagccccccgtgttccaccccgtggtgccctacgtgaccaccatcttcggcggcctgcacgccggcaagatggtgatgctgcagggcgtggtgcccctggacgcccacagcagattccaggtggacttccagtgcggctgcagcctgtgccccagacccgacatcgccttccacttcaaccccagattccacaccaccaagccccacgtgatctgcaacaccctgcacggcggcagatggcagagagaggccagatggccccacctggccctgagaagaggcagcagcttcctgatcctgttcctgttcggcaacgaggaggtgaaggtgagcgtgaacggccagcacttcctgcacttcagatacagactgcccctgagccacgtggacaccctgggcatcttcggcgacatcctggtggaggccgtgggcttcctgaacatcaaccccttcgtggagggcagcagagagtaccccgccggccaccccttcctgctgatgagccccagactggaggtgccctgcagccacgccctgccccagggcctgagccccggccaggtgatcatcgtgagaggcctggtgctgcaggagcccaagcacttcaccgtgagcctgagagaccaggccgcccacgcccccgtgaccctgagagccagcttcgccgacagaaccctggcctggatcagcagatggggccagaagaagctgatcagcgcccccttcctgttctacccccagagattcttcgaggtgctgctgctgttccaggagggcggcctgaagctggccctgaacggccagggcctgggcgccaccagcatgaaccagcaggccctggagcagctgagagagctgagaatcagcggcagcgtgcagctgtactgcgtgcacagctag

SEQ ID NO: 86594 - DNA, 1011 bp, synthetic construct
  misc_feature 1..1011: note = Description of Artificial Sequence: Synthetic coding sequence
  source 1..1011: mol_type = other DNA
atgagccagcccagcggcggcagagcccccggcaccagaatctacagctggagctgccccaccgtgatgagccccggcgagaagctggaccccatccccgacagcttcatcctgcagccccccgtgttccaccccgtggtgccctacgtgaccaccatcttcggcggcctgcacgccggcaagatggtgatgctgcagggcgtggtgcccctggacgcccacagattccaggtggacttccagtgcggctgcagcctgtgccccagacccgacatcgccttccacttcaaccccagattccacaccaccaagccccacgtgatctgcaacaccctgcacggcggcagatggcagagagaggccagatggccccacctggccctgagaagaggcagcagcttcctgatcctgttcctgttcggcaacgaggaggtgaaggtgagcgtgaacggccagcacttcctgcacttcagatacagactgcccctgagccacgtggacaccctgggcatcttcggcgacatcctggtggaggccgtgggcttcctgaacatcaaccccttcgtggagggcagcagagagtaccccgccggccaccccttcctgctgatgagccccagactggaggtgccctgcagccacgccctgccccagggcctgagccccggccaggtgatcatcgtgagaggcctggtgctgcaggagcccaagcacttcaccgtgagcctgagagaccaggccgcccacgcccccgtgaccctgagagccagcttcgccgacagaaccctggcctggatcagcagatggggccagaagaagctgatcagcgcccccttcctgttctacccccagagattcttcgaggtgctgctgctgttccaggagggcggcctgaagctggccctgaacggccagggcctgggcgccaccagcatgaaccagcaggccctggagcagctgagagagctgagaatcagcggcagcgtgcagctgtactgcgtgcacagctag

SEQ ID NO: 86595 - DNA, 828 bp, synthetic construct
  misc_feature 1..828: note = Description of Artificial Sequence: Synthetic coding sequence
  source 1..828: mol_type = other DNA
atggtgatgctgcagggcgtggtgcccctggacgcccacagattccaggtggacttccagtgcggctgcagcctgtgccccagacccgacatcgccttccacttcaaccccagattccacaccaccaagccccacgtgatctgcaacaccctgcacggcggcagatggcagagagaggccagatggccccacctggccctgagaagaggcagcagcttcctgatcctgttcctgttcggcaacgaggaggtgaaggtgagcgtgaacggccagcacttcctgcacttcagatacagactgcccctgagccacgtggacaccctgggcatcttcggcgacatcctggtggaggccgtgggcttcctgaacatcaaccccttcgtggagggcagcagagagtaccccgccggccaccccttcctgctgatgagccccagactggaggtgccctgcagccacgccctgccccagggcctgagccccggccaggtgatcatcgtgagaggcctggtgctgcaggagcccaagcacttcaccgtgagcctgagagaccaggccgcccacgcccccgtgaccctgagagccagcttcgccgacagaaccctggcctggatcagcagatggggccagaagaagctgatcagcgcccccttcctgttctacccccagagattcttcgaggtgctgctgctgttccaggagggcggcctgaagctggccctgaacggccagggcctgggcgccaccagcatgaaccagcaggccctggagcagctgagagagctgagaatcagcggcagcgtgcagctgtactgcgtgcacagctag

SEQ ID NO: 86596 - DNA, 801 bp, synthetic construct
  misc_feature 1..801: note = Description of Artificial Sequence: Synthetic coding sequence
  source 1..801: mol_type = other DNA
atggtgatgctgcagggcgtggtgcccctggacgcccacagattccaggtggacttccagtgcggctgcagcctgtgccccagacccgacatcgccttccacttcaaccccagattccacaccaccaagccccacgtgatctgcaacaccctgcacggcggcagatggcagagagaggccagatggccccacctggccctgagaagaggcagcagcttcctgatcctgttcctgttcggcaacgaggaggtgaaggtgagcgtgaacggccagcacttcctgcacttcagatacagactgcccctgagccacgtggacaccctgggcatcttcggcgacatcctggtggaggccgtgggcttcctgaacatcaaccccttcgtggagggcagcagagagtaccccgccggccacgaggtgccctgcagccacgccctgccccagggcctgagccccggccaggtgatcatcgtgagaggcctggtgctgcaggagcccaagcacttcaccgtgagcctgagagaccaggccgcccacgcccccgtgaccctgagagccagcttcgccgacagaaccctggcctggatcagcagatggggccagaagaagctgatcagcgcccccttcctgttctacccccagagattcttcgaggtgctgctgctgttccaggagggcggcctgaagctggccctgaacggccagggcctgggcgccaccagcatgaaccagcaggccctggagcagctgagagagctgagaatcagcggcagcgtgcagctgtactgcgtgcacagctag

SEQ ID NO: 86597 - DNA, 378 bp, synthetic construct
  misc_feature 1..378: note = Description of Artificial Sequence: Synthetic coding sequence
  source 1..378: mol_type = other DNA
atggccgacgaggagctggaggccctgagaagacagagactggccgagctgcaggccaagcacggcgaccccggcgacgccgcccagcaggaggccaagcacagagaggccgagatgagaaacagcatcctggcccaggtgctggaccagagcgccagagccagactgagcaacctggccctggtgaagcccgagaagaccaaggccgtggagaactacctgatccagatggccagatacggccagctgagcgagaaggtgagcgagcagggcctgatcgagatcctgaagaaggtgagccagcagaccgagaagaccaccaccgtgaagttcaacagaagaaaggtgatggacagcgacgaggacgacgactactag

SEQ ID NO: 86598 - DNA, 1530 bp, synthetic construct
  misc_feature 1..1530: note = Description of Artificial Sequence: Synthetic coding sequence
  source 1..1530: mol_type = other DNA
atgggcgtgcaggccggcctgttcggcatgctgggcttcctgggcgtggccctgggcggcagccccgccctgagatggtacagaaccagctgccacctgaccaaggccgtgcccggcaaccccctgggctacctgagcttcctggccaaggacgcccagggcctggccctgatccacgccagatgggacgcccacagaagactgcagagctgcagctgggaggacgagcccgagctgaccgccgcctacggcgccctgtgcgcccacgagaccgcctggggcagcttcatccacacccccggccccgagctgcagagagccctggccaccctgcagagccagtgggaggcctgcagagccctggaggagagccccgccggcgccagaaagaagagagccgccggccagagcggcgtgcccggcggcggccaccagagagagaagagaggctggaccatgcccggcaccctgtggtgcggcgtgggcgacagcgccggcaacagcagcgagctgggcgtgttccagggccccgacctgtgctgcagagagcacgacagatgcccccagaacatcagccccctgcagtacaactacggcatcagaaactacagattccacaccatcagccactgcgactgcgacaccagattccagcagtgcctgcagaaccagcacgacagcatcagcgacatcgtgggcgtggccttcttcaacgtgctggagatcccctgcttcgtgctggaggagcaggaggcctgcgtggcctggtactggtggggcggctgcagaatgtacggcaccgtgcccctggccagactgcagcccagaaccttctacaacgccagctggagcagcagagccaccagccccacccccagcagcagaagccccgccccccccaagcccagacagaagcagcacctgagaaagggccccccccaccagaagggcagcaagagacccagcaaggccaacaccaccgccctgcaggaccccatggtgagccccagactggacgtggcccccaccggcctgcagggcccccagggcggcctgaagccccagggcgccagatgggtgtgcagaagcttcagaagacacctggaccagtgcgagcaccagatcggccccagagagatcgagttccagctgctgaacagcgcccaggagcccctgttccactgcaactgcaccagaagactggccagattcctgagactgcacagcccccccgaggtgaccaacatgctgtgggagctgctgggcaccacctgcttcaagctggccccccccctggactgcgtggagggcaagaactgcagcagagaccccagagccatcagagtgagcgccagacacctgagaagactgcagcagagaagacaccagctgcaggacaagggcaccgacgagagacagccctggcccagcgagcccctgagaggccccatgagcttctacaaccagtgcctgcagctgacccaggccgccagaagacccgacagacagcagaagagctggagccagtag

SEQ ID NO: 86599 - DNA, 93 bp, synthetic construct
  misc_feature 1..93: note = Description of Artificial Sequence: Synthetic coding sequence
  source 1..93: mol_type = other DNA
atgaccggcgagctggaggtgaagaacatggacatgaagcccggcagcaccctgaagatcaccggcagcatcgccgacggcaccgacggctag

SEQ ID NO: 86600 - DNA, 1758 bp, synthetic construct
  misc_feature 1..1758: note = Description of Artificial Sequence: Synthetic coding sequence
  source 1..1758: mol_type = other DNA
atgaccccccccagactgttctgggtgtggctgctggtggccggcacccagggcgtgaacgacggcgacatgagactggccgacggcggcgccaccaaccagggcagagtggagatcttctacagaggccagtggggcaccgtgtgcgacaacctgtgggacctgaccgacgccagcgtggtgtgcagagccctgggcttcgagaacgccacccaggccctgggcagagccgccttcggccagggcagcggccccatcatgctggacgaggtgcagtgcaccggcaccgaggccagcctggccgactgcaagagcctgggctggctgaagagcaactgcagacacgagagagacgccggcgtggtgtgcaccaacgagaccagaagcacccacaccctggacctgagcagagagctgagcgaggccctgggccagatcttcgacagccagagaggctgcgacctgagcatcagcgtgaacgtgcagggcgaggacgccctgggcttctgcggccacaccgtgatcctgaccgccaacctggaggcccaggccctgtggaaggagcccggcagcaacgtgaccatgagcgtggacgccgagtgcgtgcccatggtgagagacctgctgagatacttctacagcagaagaatcgacatcaccctgagcagcgtgaagtgcttccacaagctggccagcgcctacggcgccagacagctgcagggctactgcgccagcctgttcgccatcctgctgccccaggaccccagcttccagatgcccctggacctgtacgcctacgccgtggccaccggcgacgccctgctggagaagctgtgcctgcagttcctggcctggaacttcgaggccctgacccaggccgaggcctggcccagcgtgcccaccgacctgctgcagctgctgctgcccagaagcgacctggccgtgcccagcgagctggccctgctgaaggccgtggacacctggagctggggcgagagagccagccacgaggaggtggagggcctggtggagaagatcagattccccatgatgctgcccgaggagctgttcgagctgcagttcaacctgagcctgtactggagccacgaggccctgttccagaagaagaccctgcaggccctggagttccacaccgtgcccttccagctgctggccagatacaagggcctgaacctgaccgaggacacctacaagcccagaatctacaccagccccacctggagcgccttcgtgaccgacagcagctggagcgccagaaagagccagctggtgtaccagagcagaagaggccccctggtgaagtacagcagcgactacttccaggcccccagcgactacagatactacccctaccagagcttccagaccccccagcaccccagcttcctgttccaggacaagagagtgagctggagcctggtgtacctgcccaccatccagagctgctggaactacggcttcagctgcagcagcgacgagctgcccgtgctgggcctgaccaagagcggcggcagcgacagaaccatcgcctacgagaacaaggccctgatgctgtgcgagggcctgttcgtggccgacgtgaccgacttcgagggctggaaggccgccatccccagcgccctggacaccaacagcagcaagagcaccagcagcttcccctgccccgccggccacttcaacggcttcagaaccgtgatcagacccttctacctgaccaacagcagcggcgtggactag

SEQ ID NO: 86601 - DNA, 1722 bp, synthetic construct
  misc_feature 1..1722: note = Description of Artificial Sequence: Synthetic coding sequence
  source 1..1722: mol_type = other DNA
atgaccccccccagactgttctgggtgtggctgctggtggccggcacccagggcgtgaacgacggcgacatgagactggccgacggcggcgccaccaaccagggcagagtggagatcttctacagaggccagtggggcaccgtgtgcgacaacctgtgggacctgaccgacgccagcgtggtgtgcagagccctgggcttcgagaacgccacccaggccctgggcagagccgccttcggccagggcagcggccccatcatgctggccgactgcaagagcctgggctggctgaagagcaactgcagacacgagagagacgccggcgtggtgtgcaccaacgagaccagaagcacccacaccctggacctgagcagagagctgagcgaggccctgggccagatcttcgacagccagagaggctgcgacctgagcatcagcgtgaacgtgcagggcgaggacgccctgggcttctgcggccacaccgtgatcctgaccgccaacctggaggcccaggccctgtggaaggagcccggcagcaacgtgaccatgagcgtggacgccgagtgcgtgcccatggtgagagacctgctgagatacttctacagcagaagaatcgacatcaccctgagcagcgtgaagtgcttccacaagctggccagcgcctacggcgccagacagctgcagggctactgcgccagcctgttcgccatcctgctgccccaggaccccagcttccagatgcccctggacctgtacgcctacgccgtggccaccggcgacgccctgctggagaagctgtgcctgcagttcctggcctggaacttcgaggccctgacccaggccgaggcctggcccagcgtgcccaccgacctgctgcagctgctgctgcccagaagcgacctggccgtgcccagcgagctggccctgctgaaggccgtggacacctggagctggggcgagagagccagccacgaggaggtggagggcctggtggagaagatcagattccccatgatgctgcccgaggagctgttcgagctgcagttcaacctgagcctgtactggagccacgaggccctgttccagaagaagaccctgcaggccctggagttccacaccgtgcccttccagctgctggccagatacaagggcctgaacctgaccgaggacacctacaagcccagaatctacaccagccccacctggagcgccttcgtgaccgacagcagctggagcgccagaaagagccagctggtgtaccagagcagaagaggccccctggtgaagtacagcagcgactacttccaggcccccagcgactacagatactacccctaccagagcttccagaccccccagcaccccagcttcctgttccaggacaagagagtgagctggagcctggtgtacctgcccaccatccagagctgctggaactacggcttcagctgcagcagcgacgagctgcccgtgctgggcctgaccaagagcggcggcagcgacagaaccatcgcctacgagaacaaggccctgatgctgtgcgagggcctgttcgtggccgacgtgaccgacttcgagggctggaaggccgccatccccagcgccctggacaccaacagcagcaagagcaccagcagcttcccctgccccgccggccacttcaacggcttcagaaccgtgatcagacccttctacctgaccaacagcagcggcgtggactag

SEQ ID NO: 86602 - DNA, 411 bp, synthetic construct
  misc_feature 1..411: note = Description of Artificial Sequence: Synthetic coding sequence
  source 1..411: mol_type = other DNA
atgagcaacgtgccccacaagagcagcctgcccgagggcatcagacccggcaccgtgctgagaatcagaggcctggtgccccccaacgccagcagattccacgtgaacctgctgtgcggcgaggagcagggcagcgacgccgccctgcacttcaaccccagactggacaccagcgaggtggtgttcaacagcaaggagcagggcagctggggcagagaggagagaggccccggcgtgcccttccagagaggccagcccttcgaggtgctgatcatcgccagcgacgacggcttcaaggccgtggtgggcgacgcccagtaccaccacttcagacacagactgcccctggccagagtgagactggtggaggtgggcggcgacgtgcagctggacagcgtgagaatcttctag

SEQ ID NO: 86603 - DNA, 954 bp, synthetic construct
  misc_feature 1..954: note = Description of Artificial Sequence: Synthetic coding sequence
  source 1..954: mol_type = other DNA
atgatgctgagcctgaacaacctgcagaacatcatctacaaccccgtgatccccttcgtgggcaccatccccgaccagctggaccccggcaccctgatcgtgatcagaggccacgtgcccagcgacgccgacagattccaggtggacctgcagaacggcagcagcatgaagcccagagccgacgtggccttccacttcaaccccagattcaagagagccggctgcatcgtgtgcaacaccctgatcaacgagaagtggggcagagaggagatcacctacgacacccccttcaagagagagaagagcttcgagatcgtgatcatggtgctgaaggacaagttccaggtggccgtgaacggcaagcacaccctgctgtacggccacagaatcggccccgagaagatcgacaccctgggcatctacggcaaggtgaacatccacagcatcggcttcagcttcagcagcgacctgcagagcacccaggccagcagcctggagctgaccgagatcagcagagagaacgtgcccaagagcggcaccccccagctgagactgcccttcgccgccagactgaacacccccatgggccccggcagaaccgtggtggtgaagggcgaggtgaacgccaacgccaagagcttcaacgtggacctgctggccggcaagagcaaggacatcgccctgcacctgaaccccagactgaacatcaaggccttcgtgagaaacagcttcctgcaggagagctggggcgaggaggagagaaacatcaccagcttccccttcagccccggcatgtacttcgagatgatcatctactgcgacgtgagagagttcaaggtggccgtgaacggcgtgcacagcctggagtacaagcacagattcaaggagctgagcagcatcgacaccctggagatcaacggcgacatccacctgctggaggtgagaagctggtag

SEQ ID NO: 86604 - DNA, 1080 bp, synthetic construct
  misc_feature 1..1080: note = Description of Artificial Sequence: Synthetic coding sequence
  source 1..1080: mol_type = other DNA
atgatgctgagcctgaacaacctgcagaacatcatctacaaccccgtgatccccttcgtgggcaccatccccgaccagctggaccccggcaccctgatcgtgatcagaggccacgtgcccagcgacgccgacagattccaggtggacctgcagaacggcagcagcatgaagcccagagccgacgtggccttccacttcaaccccagattcaagagagccggctgcatcgtgtgcaacaccctgatcaacgagaagtggggcagagaggagatcacctacgacacccccttcaagagagagaagagcttcgagatcgtgatcatggtgctgaaggacaagttccaggtggccgtgaacggcaagcacaccctgctgtacggccacagaatcggccccgagaagatcgacaccctgggcatctacggcaaggtgaacatccacagcatcggcttcagcttcagcagcgacctgcagagcacccaggccagcagcctggagctgaccgagatcagcagagagaacgtgcccaagagcggcaccccccagctgcccagcaacagaggcggcgacatcagcaagatcgcccccagaaccgtgtacaccaagagcaaggacagcaccgtgaaccacaccctgacctgcaccaagatcccccccatgaactacgtgagcaagagactgcccttcgccgccagactgaacacccccatgggccccggcagaaccgtggtggtgaagggcgaggtgaacgccaacgccaagagcttcaacgtggacctgctggccggcaagagcaaggacatcgccctgcacctgaaccccagactgaacatcaaggccttcgtgagaaacagcttcctgcaggagagctggggcgaggaggagagaaacatcaccagcttccccttcagccccggcatgtacttcgagatgatcatctactgcgacgtgagagagttcaaggtggccgtgaacggcgtgcacagcctggagtacaagcacagattcaaggagctgagcagcatcgacaccctggagatcaacggcgacatccacctgctggaggtgagaagctggtag

SEQ ID NO: 86605 - DNA, 1077 bp, synthetic construct
  misc_feature 1..1077: note = Description of Artificial Sequence: Synthetic coding sequence
  source 1..1077: mol_type = other DNA
atgatgctgagcctgaacaacctgcagaacatcatctacaaccccgtgatccccttcgtgggcaccatccccgaccagctggaccccggcaccctgatcgtgatcagaggccacgtgcccagcgacgccgacagattccaggtggacctgcagaacggcagcagcatgaagcccagagccgacgtggccttccacttcaaccccagattcaagagagccggctgcatcgtgtgcaacaccctgatcaacgagaagtggggcagagaggagatcacctacgacacccccttcaagagagagaagagcttcgagatcgtgatcatggtgctgaaggacaagttccaggtggccgtgaacggcaagcacaccctgctgtacggccacagaatcggccccgagaagatcgacaccctgggcatctacggcaaggtgaacatccacagcatcggcttcagcttcagcagcgacctgcagagcacccaggccagcagcctggagctgaccgagatcagcagagagaacgtgcccaagagcggcaccccccagctgagactgagcctgcccagctgggacctgcagggccacggcagcgagaccttcagaagcgtgctgtggaccagagtgttcgagatcgccttctgcagacccctgggcaccgtggccagcttccagagactgcccttcgccgccagactgaacacccccatgggccccggcagaaccgtggtggtgaagggcgaggtgaacgccaacgccaagagcttcaacgtggacctgctggccggcaagagcaaggacatcgccctgcacctgaaccccagactgaacatcaaggccttcgtgagaaacagcttcctgcaggagagctggggcgaggaggagagaaacatcaccagcttccccttcagccccggcatgtacttcgagatgatcatctactgcgacgtgagagagttcaaggtggccgtgaacggcgtgcacagcctggagtacaagcacagattcaaggagctgagcagcatcgacaccctggagatcaacggcgacatccacctgctggaggtgagaagctggtag

SEQ ID NO: 86606 - DNA, 954 bp, synthetic construct; identical to SEQ ID NO: 86603
  misc_feature 1..954: note = Description of Artificial Sequence: Synthetic coding sequence
  source 1..954: mol_type = other DNA

SEQ ID NO: 86607 - DNA, 627 bp, synthetic construct
  misc_feature 1..627: note = Description of Artificial Sequence: Synthetic coding sequence
  source 1..627: mol_type = other DNA
atgatgctgagcctgaacaacctgcagaacatcatctacaaccccgtgatccccttcgtgggcaccatccccgaccagctggaccccggcaccctgatcgtgatcagaggccacgtgcccagcgacgccgacagattccaggtggacctgcagaacggcagcagcatgaagcccagagccgacgtggccttccacttcaaccccagattcaagagagccggctgcatcgtgtgcaacaccctgatcaacgagaagtggggcagagaggagatcacctacgacacccccttcaagagagagaagagcttcgagatcgtgatcatggtgctgaaggacaagttccaggtggccgtgaacggcaagcacaccctgctgtacggccacagaatcggccccgagaagatcgacaccctgggcatctacggcaaggtgaacatccacagcatcggcttcagcttcagcagcgacctgcagagcacccaggccagcagcctggagctgaccgagatcagcagagagaacgtgcccaagagcggcaccccccagctgcccagcaacagaggcggcgacatcagcaagatcgcccccagaaccgtgtacaccaagagcaaggacagcaccgtgtag

SEQ ID NO: 86608 - DNA, 903 bp, synthetic construct
  misc_feature 1..903: note = Description of Artificial Sequence: Synthetic coding sequence
  source 1..903: mol_type = other DNA
atgatgctgagcctgaacaacctgcagaacatcatctacaaccccgtgatccccttcgtgggcaccatccccgaccagctggaccccggcaccctgatcgtgatcagaggccacgtgcccagcgacgccgacagattccaggtggacctgcagaacggcagcagcatgaagcccagagccgacgtggccttccacttcaaccccagattcaagagagccggctgcatcgtgtgcaacaccctgatcaacgagaagtggggcagagaggagatcacctacgacacccccttcaagagagagaagagcttcgagatcgtgatcatggtgctgaaggacaagttccaggtgcccaagagcggcaccccccagctgcccagcaacagaggcggcgacatcagcaagatcgcccccagaaccgtgtacaccaagagcaaggacagcaccgtgaaccacaccctgacctgcaccaagatcccccccatgaactacgtgagcaagagactgcccttcgccgccagactgaacacccccatgggccccggcagaaccgtggtggtgaagggcgaggtgaacgccaacgccaagagcttcaacgtggacctgctggccggcaagagcaaggacatcgccctgcacctgaaccccagactgaacatcaaggccttcgtgagaaacagcttcctgcaggagagctggggcgaggaggagagaaacatcaccagcttccccttcagccccggcatgtacttcgagatgatcatctactgcgacgtgagagagttcaaggtggccgtgaacggcgtgcacagcctggagtacaagcacagattcaaggagctgagcagcatcgacaccctggagatcaacggcgacatccacctgctggaggtgagaagctggtag

SEQ ID NO: 86609 - DNA, 1080 bp, synthetic construct; identical to SEQ ID NO: 86604
  misc_feature 1..1080: note = Description of Artificial Sequence: Synthetic coding sequence
  source 1..1080: mol_type = other DNA

SEQ ID NO: 86610 - DNA, 507 bp, synthetic construct
  misc_feature 1..507: note = Description of Artificial Sequence: Synthetic coding sequence
  source 1..507: mol_type = other DNA
atgatgctgagcctgaacaacctgcagaacatcatctacaaccccgtgatccccttcgtgggcaccatccccgaccagctggaccccggcaccctgatcgtgatcagaggccacgtgcccagcgacgccgacagattccaggtggacctgcagaacggcagcagcatgaagcccagagccgacgtggccttccacttcaaccccagattcaagagagccggctgcatcgtgtgcaacaccctgatcaacgagaagtggggcagagaggagatcacctacgacacccccttcaagagagagaagagcttcgagatcgtgatcatggtgctgaaggacaagttccaggtggccgtgaacggcaagcacaccctgctgtacggccacagaatcggccccgagaagatcgacaccctgggcatctacggcaaggtgaacatccacagcatcggcttcagcttcagcagcgacctgcagagcacccaggccagcagcctggagctgacctag

SEQ ID NO: 86611 - DNA, 321 bp, synthetic construct
  misc_feature 1..321: note = Description of Artificial Sequence: Synthetic coding sequence
  source 1..321: mol_type = other DNA
atgatgctgagcctgaacaacctgcagaacatcatctacaaccccgtgatccccttcgtgggcaccatccccgaccagctggaccccggcaccctgatcgtgatcagaggccacgtgcccagcgacgccgacagattccaggtggacctgcagaacggcagcagcatgaagcccagagccgacgtggccttccacttcaaccccagattcaagagagccggctgcatcgtgtgcaacaccctgatcaacgagaagtggggcagagaggagatcacctacgacacccccttcaagagagagaagagcttcgagatcgtgtag

SEQ ID NO: 86612 - DNA, 1080 bp, synthetic construct; identical to SEQ ID NO: 86604
  misc_feature 1..1080: note = Description of Artificial Sequence: Synthetic coding sequence
  source 1..1080: mol_type = other DNA

SEQ ID NO: 86613 - DNA, 954 bp, synthetic construct; identical to SEQ ID NO: 86603
  misc_feature 1..954: note = Description of Artificial Sequence: Synthetic coding sequence
  source 1..954: mol_type = other DNA

SEQ ID NO: 86614 - DNA, 1080 bp, synthetic construct; identical to SEQ ID NO: 86604
  misc_feature 1..1080: note = Description of Artificial Sequence: Synthetic coding sequence
  source 1..1080: mol_type = other DNA

SEQ ID NO: 86615 - DNA, 132 bp, synthetic construct
  misc_feature 1..132: note = Description of Artificial Sequence: Synthetic coding sequence
  source 1..132: mol_type = other DNA
atgatgctgagcctgaacaacctgcagaacatcatctacaaccccgtgatccccttcgtgggcaccatccccgaccagctggaccccggcaccctgatcgtgatcagaggccacgtgcccagcgacgcctag

SEQ ID NO: 86616 - DNA, 972 bp, synthetic construct
  misc_feature 1..972: note = Description of Artificial Sequence: Synthetic coding sequence
  source 1..972: mol_type = other DNA
atggccttcagcggcagccaggccccctacctgagccccgccgtgcccttcagcggcaccatccagggcggcctgcaggacggcctgcagatcaccgtgaacggcaccgtgctgagcagcagcggcaccagattcgccgtgaacttccagaccggcttcagcggcaacgacatcgccttccacttcaaccccagattcgaggacggcggctacgtggtgtgcaacaccagacagaacggcagctggggccccgaggagagaaagacccacatgcccttccagaagggcatgcccttcgacctgtgcttcctggtgcagagcagcgacttcaaggtgatggtgaacggcatcctgttcgtgcagtacttccacagagtgcccttccacagagtggacaccatcagcgtgaacggcagcgtgcagctgagctacatcagcttccagccccccggcgtgtggcccgccaaccccgcccccatcacccagaccgtgatccacaccgtgcagagcgcccccggccagatgttcagcacccccgccatcccccccatgatgtacccccaccccgcctaccccatgcccttcatcaccaccatcctgggcggcctgtaccccagcaagagcatcctgctgagcggcaccgtgctgcccagcgcccagagattccacatcaacctgtgcagcggcaaccacatcgccttccacctgaaccccagattcgacgagaacgccgtggtgagaaacacccagatcgacaacagctggggcagcgaggagagaagcctgcccagaaagatgcccttcgtgagaggccagagcttcagcgtgtggatcctgtgcgaggcccactgcctgaaggtggccgtggacggccagcacctgttcgagtactaccacagactgagaaacctgcccaccatcaacagactggaggtgggcggcgacatccagctgacccacgtgcagacctag

SEQ ID NO: 86617 - DNA, 936 bp, synthetic construct
  misc_feature 1..936: note = Description of Artificial Sequence: Synthetic coding sequence
  source 1..936: mol_type = other DNA
atggccttcagcggcagccaggccccctacctgagccccgccgtgcccttcagcggcaccatccagggcggcctgcaggacggcctgcagatcaccgtgaacggcaccgtgctgagcagcagcggcaccagattcgccgtgaacttccagaccggcttcagcggcaacgacatcgccttccacttcaaccccagattcgaggacggcggctacgtggtgtgcaacaccagacagaacggcagctggggccccgaggagagaaagacccacatgcccttccagaagggcatgcccttcgacctgtgcttcctggtgcagagcagcgacttcaaggtgatggtgaacggcatcctgttcgtgcagtacttccacagagtgcccttccacagagtggacaccatcagcgtgaacggcagcgtgcagctgagctacatcagcttccagacccagaccgtgatccacaccgtgcagagcgcccccggccagatgttcagcacccccgccatcccccccatgatgtacccccaccccgcctaccccatgcccttcatcaccaccatcctgggcggcctgtaccccagcaagagcatcctgctgagcggcaccgtgctgcccagcgcccagagattccacatcaacctgtgcagcggcaaccacatcgccttccacctgaaccccagattcgacgagaacgccgtggtgagaaacacccagatcgacaacagctggggcagcgaggagagaagcctgcccagaaagatgcccttcgtgagaggccagagcttcagcgtgtggatcctgtgcgaggcccactgcctgaaggtggccgtggacggccagcacctgttcgagtactaccacagactgagaaacctgcccaccatcaacagactggaggtgggcggcgacatccagctgacccacgtgcagacctag

SEQ ID NO: 86618 - DNA, 741 bp, synthetic construct
  misc_feature 1..741: note = Description of Artificial Sequence: Synthetic coding sequence
  source 1..741: mol_type = other DNA
atggccttcagcggcagccaggccccctacctgagccccgccgtgcccttcagcggcaccatccagggcggcctgcaggacggcctgcagatcaccgtgaacggcaccgtgctgagcagcagcggcaccagattcgccgtgaacttccagaccggcttcagcggcaacgacatcgccttccacttcaaccccagattcgaggacggcggctacgtggtgtgcaacaccagacagaacggcagctggggccccgaggagagaaagacccacatgcccttccagaagggcatgcccttcgacctgtgcttcctggtgcagagcagcgacttcaaggtgatggtgaacggcatcctgttcgtgcagtacttccacagagtgcccttccacagagtggacaccatcagcgtgaacggcagcgtgcagctgagctacatcagcttccagccccccggcgtgtggcccgccaaccccgcccccatcacccagaccgtgatccacaccgtgcagagcgcccccggccagatgttcagcacccccgccatcccccccatgatgtacccccaccccgcctaccccatgcccttcatcaccaccatcctgggcggcctgtaccccagcaagagcatcctgctgagcggcaccgtgctgcccagcgcccagagatgcggcagctgcgtgaagctgaccgccagcagatggccctggatggtgagcacctgcctgaacaccaccatcgcctag

SEQ ID NO: 86619 - DNA, 1068 bp, synthetic construct
  misc_feature 1..1068: note = Description of Artificial Sequence: Synthetic coding sequence
  source 1..1068: mol_type = other DNA
atggccttcagcggcagccaggccccctacctgagccccgccgtgcccttcagcggcaccatccagggcggcctgcaggacggcctgcagatcaccgtgaacggcaccgtgctgagcagcagcggcaccagattcgccgtgaacttccagaccggcttcagcggcaacgacatcgccttccacttcaaccccagattcgaggacggcggctacgtggtgtgcaacaccagacagaacggcagctggggccccgaggagagaaagacccacatgcccttccagaagggcatgcccttcgacctgtgcttcctggtgcagagcagcgacttcaaggtgatggtgaacggcatcctgttcgtgcagtacttccacagagtgcccttccacagagtggacaccatcagcgtgaacggcagcgtgcagctgagctacatcagcttccagaaccccagaaccgtgcccgtgcagcccgccttcagcaccgtgcccttcagccagcccgtgtgcttcccccccagacccagaggcagaagacagaagccccccggcgtgtggcccgccaaccccgcccccatcacccagaccgtgatccacaccgtgcagagcgcccccggccagatgttcagcacccccgccatcccccccatgatgtacccccaccccgcctaccccatgcccttcatcaccaccatcctgggcggcctgtaccccagcaagagcatcctgctgagcggcaccgtgctgcccagcgcccagagattccacatcaacctgtgcagcggcaaccacatcgccttccacctgaaccccagattcgacgagaacgccgtggtgagaaacacccagatcgacaacagctggggcagcgaggagagaagcctgcccagaaagatgcccttcgtgagaggccagagcttcagcgtgtggatcctgtgcgaggcccactgcctgaaggtggccgtggacggccagcacctgttcgagtactaccacagactgagaaacctgcccaccatcaacagactggaggtgggcggcgacatccagctgacccacgtgcagacctag

SEQ ID NO: 86620 - DNA, 666 bp, synthetic construct
  misc_feature 1..666: note = Description of Artificial Sequence: Synthetic coding sequence
  source 1..666: mol_type = other DNA
atgggccccttcagcgcccccgtggagcccgacggcggctacgtggtgtgcaacaccagacagaacggcagctggggccccgaggagagaaagacccacatgcccttccagaagggcatgcccttcgacctgtgcttcctggtgcagagcagcgacttcaaggtgatggtgaacggcatcctgttcgtgcagtacttccacagagtgcccttccacagagtggacaccatcagcgtgaacggcagcgtgcagctgagctacatcagcttccagaaccccagaaccgtgcccgtgcagcccgccttcagcaccgtgcccttcagccagcccgtgtgcttcccccccagacccagaggcagaagacagaagccccccggcgtgtggcccgccaaccccgcccccatcacccagaccgtgatccacaccgtgcagagcgcccccggccagatgttcagcacccccgccatcccccccatgatgtacccccaccccgcctaccccatgcccttcatcaccaccatcctgggcggcctgtaccccagcaagagcatcctgctgagcggcaccgtgctgcccagcgcccagagatgcggcagctgcgtgaagctgaccgccagcagatggccctggatggtgagcacctgcctgaacaccaccatcgcctag

SEQ ID NO: 86621 - DNA, 360 bp, synthetic construct
  misc_feature 1..360: note = Description of Artificial Sequence: Synthetic coding sequence
  source 1..360: mol_type = other DNA
atggccttcagcggcagccaggccccctacctgagccccgccgtgcccttcagcggcaccatccagggcggcctgcaggacggcctgcagatcaccgtgaacggcaccgtgctgagcagcagcggcaccagattcgccgtgaacttccagaccggcttcagcggcaacgacatcgccttccacttcaaccccagattcgaggacggcggctacgtggtgtgcaacaccagacagaacggcagctggggccccgaggagagaaagacccacatgcccttccagaagggcatgcccttcgacctgtgcttcctggtgcagagcagcgacttcaaggtgcacctgctgctgctgctgctgtag

SEQ ID NO: 86622 - DNA, 1533 bp, synthetic construct
  misc_feature 1..1533: note = Description of Artificial Sequence: Synthetic coding sequence
  source 1..1533: mol_type = other DNA
atggccggcagcagacagagaggcctgagagccagagtgagacccctgttctgcgccctgctgctgagcctgggcagattcgtgagaggcgacggcgtgggcggcgaccccgccgtggccctgccccacagaagattcgagtacaagtacagcttcaagggcccccacctggtgcagagcgacggcaccgtgcccttctgggcccacgccggcaacgccatccccagcagcgaccagatcagagtggcccccagcctgaagagccagagaggcagcgtgtggaccaagaccaaggccgccttcgagaactgggaggtggaggtgaccttcagagtgaccggcagaggcagaatcggcgccgacggcctggccatctggtacgccgagaaccagggcctggagggccccgtgttcggcagcgccgacctgtggaacggcgtgggcatcttcttcgacagcttcgacaacgacggcaagaagaacaaccccgccatcgtgatcatcggcaacaacggccagatccactacgaccaccagaacgacggcgccagccaggccctggccagctgccagagagacttcagaaacaagccctaccccgtgagagccaagatcacctactaccagaacaccctgaccgtgatgatcaacaacggcttcacccccgacaagaacgactacgagttctgcgccaaggtggagaacatgatcatccccgcccagggccacttcggcatcagcgccgccaccggcggcctggccgacgaccacgacgtgctgagcttcctgaccttccagctgaccgagcccggcaaggagccccccacccccgacaaggagatcagcgagaaggagaaggagaagtaccaggaggagttcgagcacttccagcaggagctggacaagaagaaggaggagttccagaagggccaccccgacctgcagggccagcccgccgaggagatcttcgagagcgtgggcgacagagagctgagacaggtgttcgagggccagaacagaatccacctggagatcaagcagctgaacagacagctggacatgatcctggacgagcagagaagatacgtgagcagcctgaccgaggagatcagcaagagaggcgccggcatgcccggccagcacggccagatcacccagcaggagctggacaccgtggtgaagacccagcacgagatcctgagacaggtgaacgagatgaagaacagcatgagcgagaccgtgagactggtgagcggcatgcagcaccccggcagcgccggcggcgtgtacgagaccacccagcacttcatcgacatcaaggagcacctgcacatcgtgaagagagacatcgacaacctggtgcagagaaacatgcccagcaacgagaagcccaagtgccccgagctgccccccttccccagctgcctgagcaccgtgcacttcatcatcttcgtggtggtgcagaccgtgctgttcatcggctacatcatgtacagaagccagcaggaggccgccgccaagaagttcttctag

SEQ ID NO: 86623 - DNA, 1101 bp, synthetic construct
  misc_feature 1..1101: note = Description of Artificial Sequence: Synthetic coding sequence
  source 1..1101: mol_type = other DNA
atgcagcccctgtggctgtgctgggccctgtgggtgctgcccctggccagccccggcgccgccctgaccggcgagcagctgctgggcagcctgctgagacagctgcagctgaaggaggtgcccaccctggacagagccgacatggaggagctggtgatccccacccacgtgagagcccagtacgtggccctgctgcagagaagccacggcgacagaagcagaggcaagagattcagccagagcttcagagaggtggccggcagattcctggccctggaggccagcacccacctgctggtgttcggcatggagcagagactgccccccaacagcgagctggtgcaggccgtgctgagactgttccaggagcccgtgcccaaggccgccctgcacagacacggcagactgagccccagaagcgccagagccagagtgaccgtggagtggctgagagtgagagacgacggcagcaacagaaccagcctgatcgacagcagactggtgagcgtgcacgagagcggctggaaggccttcgacgtgaccgaggccgtgaacttctggcagcagctgagcagacccagacagcccctgctgctgcaggtgagcgtgcagagagagcacctgggccccctggccagcggcgcccacaagctggtgagattcgccagccagggcgcccccgccggcctgggcgagccccagctggagctgcacaccctggacctgggcgactacggcgcccagggcgactgcgaccccgaggcccccatgaccgagggcaccagatgctgcagacaggagatgtacatcgacctgcagggcatgaagtgggccgagaactgggtgctggagccccccggcttcctggcctacgagtgcgtgggcacctgcagacagccccccgaggccctggccttcaagtggcccttcctgggccccagacagtgcatcgccagcgagaccgacagcctgcccatgatcgtgagcatcaaggagggcggcagaaccagaccccaggtggtgagcctgcccaacatgagagtgcagaagtgcagctgcgccagcgacggcgccctggtgcccagaagactgcagccctag

SEQ ID NO: 86624 - DNA, 1101 bp, synthetic construct
  misc_feature 1..1101: note = Description of Artificial Sequence: Synthetic coding sequence
  source 1..1101: mol_type = other DNA
atgtggcccctgtggctgtgctgggccctgtgggtgctgcccctggccggccccggcgccgccctgaccgaggagcagctgctgggcagcctgctgagacagctgcagctgagcgaggtgcccgtgctggacagagccgacatggagaagctggtgatccccgcccacgtgagagcccagtacgtggtgctgctgagaagaagccacggcgacagaagcagaggcaagagattcagccagagcttcagagaggtggccggcagattcctggccagcgaggccagcacccacctgctggtgttcggcatggagcagagactgccccccaacagcgagctggtgcaggccgtgctgagactgttccaggagcccgtgcccaaggccgccctgcacagacacggcagactgagccccagaagcgcccaggccagagtgaccgtggagtggctgagagtgagagacgacggcagcaacagaaccagcctgatcgacagcagactggtgagcgtgcacgagagcggctggaaggccttcgacgtgaccgaggccgtgaacttctggcagcagctgagcagacccagacagcccctgctgctgcaggtgagcgtgcagagagagcacctgggccccctggccagcggcgcccacaagctggtgagattcgccagccagggcgcccccgccggcctgggcgagccccagctggagctgcacaccctggacctgagagactacggcgcccagggcgactgcgaccccgaggcccccatgaccgagggcaccagatgctgcagacaggagatgtacatcgacctgcagggcatgaagtgggccaagaactgggtgctggagccccccggcttcctggcctacgagtgcgtgggcacctgccagcagccccccgaggccctggccttcaactggcccttcctgggccccagacagtgcatcgccagcgagaccgccagcctgcccatgatcgtgagcatcaaggagggcggcagaaccagaccccaggtggtgagcctgcccaacatgagagtgcagaagtgcagctgcgccagcgacggcgccctggtgcccagaagactgcagccctag

SEQ ID NO: 86625 - DNA, 999 bp, synthetic construct
  misc_feature 1..999: note = Description of Artificial Sequence: Synthetic coding sequence
  source 1..999: mol_type = other DNA
atgtggcccctgtggctgtgctgggccctgtgggtgctgcccctggccggccccggcgccgccctgaccgaggagcagctgctgggcagcctgctgagacagctgcagctgagcgaggtgcccgtgctggacagagccgacatggagaagctggtgatccccgcccacgtgagagcccagtacgtggtgctgctgagaagaagccacggcgacagaagcagaggcaagagattcagccagagcttcagagaggtggccggcagattcctggccagcgaggccgccctgcacagacacggcagactgagccccagaagcgcccaggccagagtgaccgtggagtggctgagagtgagagacgacggcagcaacagaaccagcctgatcgacagcagactggtgagcgtgcacgagagcggctggaaggccttcgacgtgaccgaggccgtgaacttctggcagcagctgagcagacccagacagcccctgctgctgcaggtgagcgtgcagagagagcacctgggccccctggccagcggcgcccacaagctggtgagattcgccagccagggcgcccccgccggcctgggcgagccccagctggagctgcacaccctggacctgagagactacggcgcccagggcgactgcgaccccgaggcccccatgaccgagggcaccagatgctgcagacaggagatgtacatcgacctgcagggcatgaagtgggccaagaactgggtgctggagccccccggcttcctggcctacgagtgcgtgggcacctgccagcagccccccgaggccctggccttcaactggcccttcctgggccccagacagtgcatcgccagcgagaccgccagcctgcccatgatcgtgagcatcaaggagggcggcagaaccagaccccaggtggtgagcctgcccaacatgagagtgcagaagtgcagctgcgccagcgacggcgccctggtgcccagaagactgcagccctag

SEQ ID NO: 86626 - DNA, 1131 bp, synthetic construct
  misc_feature 1..1131: note = Description of Artificial Sequence: Synthetic coding sequence
  source 1..1131: mol_type = other DNA
atggtgtggaaggtggccgtgttcctgagcgtggccctgggcatcggcgccgtgcccatcgacgaccccgaggacggcggcaagcactgggtggtgatcgtggccggcagcaacggctggtacaactacagacaccaggccgacgcctgccacgcctaccagatcatccacagaaacggcatccccgacgagcagatcgtggtgatgatgtacgacgacatcgcctacagcgaggacaaccccacccccggcatcgtgatcaacagacccaacggcaccgacgtgtaccagggcgtgcccaaggactacaccggcgaggacgtgaccccccagaacttcctggccgtgctgagaggcgacgccgaggccgtgaagggcatcggcagcggcaaggtgctgaagagcggcccccaggaccacgtgttcatctacttcaccgaccacggcagcaccggcatcctggtgttccccaacgaggacctgcacgtgaaggacctgaacgagaccatccactacatgtacaagcacaagatgtacagaaagatggtgttctacatcgaggcctgcgagagcggcagcatgatgaaccacctgcccgacaacatcaacgtgtacgccaccaccgccgccaaccccagagagagcagctacgcctgctactacgacgagaagagaagcacctacctgggcgactggtacagcgtgaactggatggaggacagcgacgtggaggacctgaccaaggagaccctgcacaagcagtaccacctggtgaagagccacaccaacaccagccacgtgatgcagtacggcaacaagaccatcagcaccatgaaggtgatgcagttccagggcatgaagagaaaggccagcagccccgtgcccctgccccccgtgacccacctggacctgacccccagccccgacgtgcccctgaccatcatgaagagaaagctgatgaacaccaacgacctggaggagagcagacagctgaccgaggagatccagagacacctggactacgagtacgccctgagacacctgtacgtgctggtgaacctgtgcgagaagccctaccccctgcacagaatcaagctgagcatggaccacgtgtgcctgggccactactag

SEQ ID NO: 86627 - DNA, 1119 bp, synthetic construct
  misc_feature 1..1119: note = Description of Artificial Sequence: Synthetic coding sequence
  source 1..1119: mol_type = other DNA
atggtgtggaaggtggccgtgttcctgagcgtggccctgggcatcggcgccgtgcccatcgacgaccccgaggacggcggcaagcactgggtggtgatcgtggccggcagcaacggctggtacaactacagacaccaggccgacgcctgccacgcctaccagatcatccacagaaacggcatccccgacgagcagatcgtggtgatgatgtacgacgacatcgcctacagcgaggacaaccccacccccggcatcgtgatcaacagacccaacggcaccgacgtgtaccagggcgtgcccaaggactacaccggcgaggacgtgaccccccagaacttcctggccgtgctgagaggcgacgccgaggccgtgaagggcatcggcagcggcaaggtgctgaagagcggcccccaggaccacgtgttcatctacttcaccgaccacggcagcaccggcatcctggtgttccccaacgaggacctgcacgtgaaggacctgaacgagaccatccactacatgtacaagcacaagatgtacagaaagatggtgttctacatcgaggcctgcgagagcggcagcatgatgaaccacctgcccgacaacatcaacgtgtacgccaccaccgccgccaaccccagagagagcagctacgcctgctactacgacgagaagagaagcacctacctgggcgactggtacagcgtgaactggatggaggacagcgacgtggaggacctgaccaaggagaccctgcacaagcagtaccacctggtgaagagccacaccaacaccagccacgtgatgcagtacggcaacaagaccatcagcaccatgaaggtgatgcagttccagggcatgaagagaaaggccagcagccccgtgcccctgccccccgtgacccacctggacctgacccccagccccgacgtgcccctgaccatcatgaagagaaagctgatgaacaccaacgacctggaggagagcagacagctgaccgaggagatccagagacacctggacgacaagatcgtgcacggccccagagtgccctggagcctgctgaagagctgcctgctggaggccttccccagcgtgagcgccccccccaccgtgtgctag

SEQ ID NO: 86628 - DNA, 1302 bp, synthetic construct
  misc_feature 1..1302: note = Description of Artificial Sequence: Synthetic coding sequence
  source 1..1302: mol_type = other DNA
atggtgtggaaggtggccgtgttcctgagcgtggccctgggcatcggcgccgtgcccatcgacgaccccgaggacggcggcaagcactgggtggtgatcgtggccggcagcaacggctggtacaactacagacaccaggccgacgcctgccacgcctaccagatcatccacagaaacggcatccccgacgagcagatcgtggtgatgatgtacgacgacatcgcctacagcgaggacaaccccacccccggcatcgtgatcaacagacccaacggcaccgacgtgtaccagggcgtgcccaaggactacaccggcgaggacgtgaccccccagaacttcctggccgtgctgagaggcgacgccgaggccgtgaagggcatcggcagcggcaaggtgctgaagagcggcccccaggaccacgtgttcatctacttcaccgaccacggcagcaccggcatcctggtgttccccaacgaggacctgcacgtgaaggacctgaacgagaccatccactacatgtacaagcacaagatgtacagaaagatggtgttctacatcgaggcctgcgagagcggcagcatgatgaaccacctgcccgacaacatcaacgtgtacgccaccaccgccgccaaccccagagagagcagctacgcctgctactacgacgagaagagaagcacctacctgggcgactggtacagcgtgaactggatggaggacagcgacgtggaggacctgaccaaggagaccctgcacaagcagtaccacctggtgaagagccacaccaacaccagccacgtgatgcagtacggcaacaagaccatcagcaccatgaaggtgatgcagttccagggcatgaagagaaaggccagcagccccgtgcccctgccccccgtgacccacctggacctgacccccagccccgacgtgcccctgaccatcatgaagagaaagctgatgaacaccaacgacctggaggagagcagacagctgaccgaggagatccagagacacctggacgccagacacctgatcgagaagagcgtgagaaagatcgtgagcctgctggccgccagcgaggccgaggtggagcagctgctgagcgagagagcccccctgaccggccacagctgctaccccgaggccctgctgcacttcagaacccactgcttcaactggcacagccccacctacgagtacgccctgagacacctgtacgtgctggtgaacctgtgcgagaagccctaccccctgcacagaatcaagctgagcatggaccacgtgtgcctgggccactactag

SEQ ID NO: 86629 - DNA, 1302 bp, synthetic construct; identical to SEQ ID NO: 86628
  misc_feature 1..1302: note = Description of Artificial Sequence: Synthetic coding sequence
  source 1..1302: mol_type = other DNA

SEQ ID NO: 86630 - DNA, 1197 bp, synthetic construct
  misc_feature 1..1197: note = Description of Artificial Sequence: Synthetic coding sequence
  source 1..1197: mol_type = other DNA
atggtgtggaaggtggccgtgttcctgagcgtggccctgggcatcggcgccgtgcccatcgacgaccccgaggacggcggcaagcactgggtggtgatcgtggccggcagcaacggctggtacaactacagacaccaggccgacgcctgccacgcctaccagatcatccacagaaacggcatccccgacgagcagatcgtggtgatgatgtacgacgtgaccccccagaacttcctggccgtgctgagaggcgacgccgaggccgtgaagggcatcggcagcggcaaggtgctgaagagcggcccccaggaccacgtgttcatctacttcaccgaccacggcagcaccggcatcctggtgttccccaacgaggacctgcacgtgaaggacctgaacgagaccatccactacatgtacaagcacaagatgtacagaaagatggtgttctacatcgaggcctgcgagagcggcagcatgatgaaccacctgcccgacaacatcaacgtgtacgccaccaccgccgccaaccccagagagagcagctacgcctgctactacgacgagaagagaagcacctacctgggcgactggtacagcgtgaactggatggaggacagcgacgtggaggacctgaccaaggagaccctgcacaagcagtaccacctggtgaagagccacaccaacaccagccacgtgatgcagtacggcaacaagaccatcagcaccatgaaggtgatgcagttccagggcatgaagagaaaggccagcagccccgtgcccctgccccccgtgacccacctggacctgacccccagccccgacgtgcccctgaccatcatgaagagaaagctgatgaacaccaacgacctggaggagagcagacagctgaccgaggagatccagagacacctggacgccagacacctgatcgagaagagcgtgagaaagatcgtgagcctgctggccgccagcgaggccgaggtggagcagctgctgagcgagagagcccccctgaccggccacagctgctaccccgaggccctgctgcacttcagaacccactgcttcaactggcacagccccacctacgagtacgccctgagacacctgtacgtgctggtgaacctgtgcgagaagccctaccccctgcacagaatcaagctgagcatggaccacgtgtgcctgggccactactag

SEQ ID NO: 86631 - DNA, 1233 bp, synthetic construct
  misc_feature 1..1233: note = Description of Artificial Sequence: Synthetic coding sequence
  source 1..1233: mol_type = other DNA
atggtgtggaaggtggccgtgttcctgagcgtggccggcagcaacggctggtacaactacagacaccaggccgacgcctgccacgcctaccagatcatccacagaaacggcatccccgacgagcagatcgtggtgatgatgtacgacgacatcgcctacagcgaggacaaccccacccccggcatcgtgatcaacagacccaacggcaccgacgtgtaccagggcgtgcccaaggactacaccggcgaggacgtgaccccccagaacttcctggccgtgctgagaggcgacgccgaggccgtgaagggcatcggcagcggcaaggtgctgaagagcggcccccaggaccacgtgttcatctacttcaccgaccacggcagcaccggcatcctggtgttccccaacgaggacctgcacgtgaaggacctgaacgagaccatccactacatgtacaagcacaagatgtacagaaagatggtgttctacatcgaggcctgcgagagcggcagcatgatgaaccacctgcccgacaacatcaacgtgtacgccaccaccgccgccaaccccagagagagcagctacgcctgctactacgacgagaagagaagcacctacctgggcgactggtacagcgtgaactggatggaggacagcgacgtggaggacctgaccaaggagaccctgcacaagcagtaccacctggtgaagagccacaccaacaccagccacgtgatgcagtacggcaacaagaccatcagcaccatgaaggtgatgcagttccagggcatgaagagaaaggccagcagccccgtgcccctgccccccgtgacccacctggacctgacccccagccccgacgtgcccctgaccatcatgaagagaaagctgatgaacaccaacgacctggaggagagcagacagctgaccgaggagatccagagacacctggacgccagacacctgatcgagaagagcgtgagaaagatcgtgagcctgctggccgccagcgaggccgaggtggagcagctgctgagcgagagagcccccctgaccggccacagctgctaccccgaggccctgctgcacttcagaacccactgcttcaactggcacagccccacctacgagtacgccctgagacacctgtacgtgctggtgaacctgtgcgagaagccctaccccctgcacagaatcaagctgagcatggaccacgtgtgcctgggccactactag

SEQ ID NO: 86632 - DNA, 174 bp, synthetic construct
  misc_feature 1..174: note = Description of Artificial Sequence: Synthetic coding sequence
  source 1..174: mol_type = other DNA
atggtgtggaaggtggccgtgttcctgagcgtggccctgggcatcggcgccgtgcccatcgacgaccccgaggacggcggcaagcactgggtggtgatcgtggccggcagcaacggctggtacaactacagacaccaggccgacgcctgccacgcctaccagatcatccactag

SEQ ID NO: 86633 - DNA, 60 bp, synthetic construct
  misc_feature 1..60: note = Description of Artificial Sequence: Synthetic coding sequence
  source 1..60: mol_type = other DNA
atggtgtggaaggtggccgtgttcctgagcgtggccctgggcatcggcgccgtgccctag

SEQ ID NO: 86634 - DNA, 177 bp, synthetic construct
  misc_feature 1..177: note = Description of Artificial Sequence: Synthetic coding sequence
  source 1..177: mol_type = other DNA
atggtgtggaaggtggccgtgttcctgagcgtggccctgggcatcggcgccgtgcccatcgacgaccccgaggacggcggcaagcactgggtggtgatcgtggccggcagcaacggctggtacaactacagacaccaggccgacgcctgccacgcctaccagatcatccacagatag

SEQ ID NO: 86635 - DNA, 237 bp, synthetic construct
  misc_feature 1..237: note = Description of Artificial Sequence: Synthetic coding sequence
  source 1..237: mol_type = other DNA
atggtgtggaaggtggccgtgttcctgagcgtggccctgggcatcggcgccgtgcccatcgacgaccccgaggacggcggcaagcactgggtggtgatcgtggccggcagcaacggctggtacaactacagacaccaggccgacgcctgccacgcctaccagatcatccacagaaacggcatccccgacgagcagatcgtggtgatgatgtacgacgacatcgcctacagcgagtag

SEQ ID NO: 86636 - DNA, 237 bp, synthetic construct; identical to SEQ ID NO: 86635
  misc_feature 1..237: note = Description of Artificial Sequence: Synthetic coding sequence
  source 1..237: mol_type = other DNA

SEQ ID NO: 86637 - DNA, 2736 bp, synthetic construct
  misc_feature 1..2736: note = Description of Artificial Sequence: Synthetic coding sequence
  source 1..2736: mol_type = other DNA
atggccgccgccgccgccagcgccccccagcagctgagcgacgaggagctgttcagccagctgagaagatacggcctgagccccggccccgtgaccgagagcaccagacccgtgtacctgaagaagctgaagaagctgagagaggaggagcagcagcagcacagaagcggcggcagaggcaacaagaccagaaacagcaacaacaacaacaccgccgccgccaccgtggccgccgccggccccgccgccgccgccgccgccggcatgggcgtgagacccgtgagcggcgacctgagctacctgagaacccccggcggcctgtgcagaatcagcgccagcggccccgagagcctgctgggcggccccggcggcgccagcgccgcccccgccgccggcagcaaggtgctgctgggcttcagcagcgacgagagcgacgtggaggccagccccagagaccaggccggcggcggcggcagaaaggacagagccagcctgcagtacagaggcctgaaggccccccccgcccccctggccgccagcgaggtgaccaacagcaacagcgccgagagaagaaagccccacagctggtggggcgccagaagacccgccggccccgagctgcagaccccccccggcaaggacggcgccgtggaggacgaggagggcgagggcgaggacggcgaggagagagaccccgagaccgaggagcccctgtgggccagcagaaccgtgaacggcagcagactggtgccctacagctgcagagagaactacagcgacagcgaggaggaggacgacgacgacgtggccagcagcagacaggtgctgaaggacgacagcctgagcagacacagacccagaagaacccacagcaagcccctgccccccctgaccgccaagagcgccggcggcagactggagaccagcgtgcagggcggcggcggcctggccatgaacgacagagccgccgccgccggcagcctggacagaagcagaaacctggaggaggccgccgccgccgagcagggcggcggctgcgaccaggtggacagcagccccgtgcccagatacagagtgaacgccaagaagctgacccccctgctgcccccccccctgaccgacatggacagcaccctggacagcagcaccggcagcctgctgaagaccaacaaccacatcggcggcggcgccttcagcgtggacagccccagaatctacagcaacagcctgccccccagcgccgccgtggccgccagcagcagcctgagaatcaaccacgccaaccacaccggcagcaaccacacctacctgaagaacacctacaacaagcccaagctgagcgagcccgaggaggagctgctgcagcagttcaagagagaggaggtgagccccaccggcagcttcagcgcccactacctgagcatgttcctgctgaccgccgcctgcctgttcttcctgatcctgggcctgacctacctgggcatgagaggcaccggcgtgagcgaggacggcgagctgagcatcgagaaccccttcggcgagaccttcggcaagatccaggagagcgagaagaccctgatgatgaacaccctgtacaagctgcacgacagactggcccagctggccggcgaccacgagtgcggcagcagcagccagagaaccctgagcgtgcaggaggccgccgcctacctgaaggacctgggccccgagtacgagggcatcttcaacaccagcctgcagtggatcctggagaacggcaaggacgtgggcatcagatgcgtgggcttcggccccgaggaggagctgaccaacatcaccgacgtgcagttcctgcagagcaccagacccctgatgagcttctggtgcagattcagaagagccttcgtgaccgtgacccacagactgctgctgctgtgcctgggcgtggtgatggtgtgcgtggtgctgagatacatgaagtacagatggaccaaggaggaggaggagaccagacagatgtacgacatggtggtgaagatcatcgacgtgctgagaagccacaacgaggcctgccaggagaacaaggacctgcagccctacatgcccatcccccacgtgagagacagcctgatccagccccacgacagaaagaagatgaagaaggtgtgggacagagccgtggacttcctggccgccaacgagagcagagtgagaaccgagaccagaagaatcggcggcgccgacttcctggtgtggagatggatccagcccagcgccagctgcgacaagatcctggtgatccccagcaaggtgtggcagggccaggccttccacctggacagaagaaacagcccccccaacagcctgaccccctgcctgaagatcagaaacatgttcgaccccgtgatggagatcggcgaccagtggcacctggccatccaggaggccatcctggagaagtgcagcgacaacgacggcatcgtgcacatcgccgtggacaagaacagcagagagggctgcgtgtacgtgaagtgcctgagccccgagtacgccggcaaggccttcaaggccctgcacggcagctggttcgacggcaagctggtgaccgtgaagtacctgagactggacagataccaccacagattcccccaggccctgaccagcaacacccccctgaagcccagcaacaagcacatgaacagcatgagccacctgagactgagaaccggcctgaccaacagccagggcagcagctag

SEQ ID NO: 86638 - DNA, 4512 bp, synthetic construct
  misc_feature 1..4512: note = Description of Artificial Sequence: Synthetic coding sequence
  source 1..4512: mol_type = other DNA
atgcccggcccccccgccctgagaagaagactgctgctgctgctgctggtgctgctgatcgccggcagcgccggcgccgcccccctgccccagaccggcgccggcgaggccccccccgccgccgaggtgagcagcagcttcgtgatcctgtgcgtgtgcagcctgatcatcctgatcgtgctgatcgccaactgcgtgagctgctgcaaggaccccgagatcgacttcaaggagttcgaggacaacttcgacgacgagatcgacttcaccccccccgccgaggacacccccagcgtgcagagccccgccgaggtgttcaccctgagcgtgcccaacatcagcctgcccgcccccagccagttccagcccagcgtggagggcctgaagagccaggtggccagacacagcctgaactacatccaggagatcggcaacggctggttcggcaaggtgctgctgggcgagatctacaccggcaccagcgtggccagagtgatcgtgaaggagctgaaggccagcgccaaccccaaggagcaggacaccttcctgaagaacggcgagccctactacatcctgcagcaccccaacatcctgcagtgcgtgggccagtgcgtggaggccatcccctacctgctggtgttcgagttctgcgacctgggcgacctgaaggcctacctgagaagcgagcaggagcacatgagaggcgacagccagaccatgctgctgcagagaatggcctgcgaggtggccgccggcctggccgccatgcacaagctgcacttcctgcacagcgacctggccctgagaaactgcttcctgaccagcgacctgaacgtgaaggtgggcgactacggcatcggcttcagcagatacaaggaggactacatcgagaccgacgacaagaaggtgttccccctgagatggaccgcccccgagctggtgaccagcttccaggacagactgctgaccgccgaccagaccaagtacagcaacatctggagcctgggcgtgaccctgtgggagctgttcgacaacgccgcccagccctacagcaacctgagcaacctggacgtgctgaaccaggtgatcagagagagagacaccaagctgcccaagccccagctggagcagccctacagcgacagatggtacgaggtgctgcagttctgctggctgagccccgagaagagacccgccgccgaggacgtgcacagactgctgacctacctgagactgcagagccagagagacagcgaggtggacttcgagcagcagtggaacgccctgaagcccaacaccaacagcagagacagcagcaacaacgccgccttccccatcctggaccacttcgccagagacagactgggcagagagatggaggaggtgctgaccgtgaccgagaccagccagggcctgagcttcgagtacgtgtgggaggccgccaagcacgaccacttcgacgagagaagcagaggccacctggacgagggcctgagctacaccagcatcttctaccccgtggaggtgttcgagagcagcctgagcgaccccggccccggcaagcaggacgacagcggccaggacgtgcccctgagagtgcccggcgtggtgcccgtgttcgacgcccacaacctgagcgtgggcagcgactactacatccagctggaggagaagagcggcagcaacctggagctggactacccccccgccctgctgaccaccgacatggacaaccccgagagaaccggccccgagctgagccagctgaccgccctgagaagcgtggagctggaggagagcagcaccgacgaggacttcttccagagcagcaccgaccccaaggacagcagcctgcccggcgacctgcacgtgaccagcggccccgagagccccttcaacaacatcttcaacgacgtggacaagagcgaggacctgcccagccaccagaagatcttcgacctgatggagctgaacggcgtgcaggccgacttcaagcccgccaccctgagcagcagcctggacaaccccaaggagagcgtgatcaccggccacttcgagaaggagaagcccagaaagatcttcgacagcgagcccctgtgcctgagcgacaacctgatgcaccaggacaacttcgaccccctgaacgtgcaggagctgagcgagaacttcctgttcctgcaggagaagaacctgctgaagggcagcctgagcagcaaggagcacatcaacgacctgcagaccgagctgaagaacgccggcttcaccgaggccatgctggagaccagctgcagaaacagcctggacaccgagctgcagttcgccgagaacaagcccggcctgagcctgctgcaggagaacgtgagcaccaagggcgacgacaccgacgtgatgctgaccggcgacaccctgagcaccagcctgcagagcagccccgaggtgcaggtgccccccaccagcttcgagaccgaggagacccccagaagagtgccccccgacagcctgcccacccagggcgagacccagcccacctgcctggacgtgatcgtgcccgaggactgcctgcaccaggacatcagccccgacgccgtgaccgtgcccgtggagatcctgagcaccgacgccagaacccacagcctggacaacagaagccaggacagccccggcgagagcgaggagaccctgagactgaccgagagcgacagcgtgctggccgacgacatcctggccagcagagtgagcgtgggcagcagcctgcccgagctgggccaggagctgcacaacaagcccttcagcgaggaccaccacagccacagaagactggagaagaacctggaggccgtggagaccctgaaccagctgaacagcaaggacgccgccaaggaggccggcctggtgagcgccctgagcagcgacagcaccagccaggacagcctgctggaggacagcctgagcgcccccttccccgccagcgagcccagcctggagacccccgacagcctggagagcgtggacgtgcacgaggccctgctggacagcctgggcagccacaccccccagaagctggtgccccccgacaagcccgccgacagcggctacgagaccgagaacctggagagccccgagtggaccctgcaccccgcccccgagggcaccgccgacagcgagcccgccaccaccggcgacggcggccacagcggcctgccccccaaccccgtgatcgtgatcagcgacgccggcgacggccacagaggcaccgaggtgacccccgagaccttcaccgccggcagccagggcagctacagagacagcgcctacttcagcgacaacgacagcgagcccgagaagagaagcgaggaggtgcccggcaccagccccagcgccctggtgctggtgcaggagcagcccctgcccgagcccgtgctgcccgagcagagccccgccgcccaggacagctgcctggaggccagaaagagccagcccgacgagagctgcctgagcgccctgcacaacagcagcgacctggagctgagagccacccccgagcccgcccagaccggcgtgccccagcaggtgcaccccaccgaggacgaggccagcagcccctggagcgtgctgaacgccgagctgagcagcggcgacgacttcgagacccaggacgacagaccctgcaccctggccagcaccggcaccaacaccaacgagctgctggcctacaccaacagcgccctggacaagagcctgagcagccacagcgagggccccaagctgaaggagcccgacatcgagggcaagtacctgggcaagctgggcgtgagcggcatgctggacctgagcgaggacggcatggacgccgacgaggaggacgagaacagcgacgacagcgacgaggacctgagagccttcaacctgcacagcctgagcagcgagagcgaggacgagaccgagcaccccgtgcccatcatcctgagcaacgaggacggcagacacctgagaagcctgctgaagcccaccgccgccaacgcccccgaccccctgcccgaggactggaagaaggagaagaaggccgtgaccttcttcgacgacgtgaccgtgtacctgttcgaccaggagacccccaccaaggagctgggcccctgcggcggcgaggcctgcggccccgacctgagcggccccgcccccgccagcggcagcccctacctgagcagatgcatcaacagcgagagcagcaccgacgaggagggcggcggcttcgagtgggacgacgacttcagccccgaccccttcatgagcaagaccaccagcaacctgctgagcagcaagcccagcctgcagaccagcaagtacttcagcccccccccccccgccagaagcaccgagcagagctggccccacagcgccccctacagcagattcagcatcagccccgccaacatcgccagcttcagcctgacccacctgaccgacagcgacatcgagcagggcggcagcagcgaggacggcgagaaggactag

SEQ ID NO: 86639 - DNA, 186 bp, synthetic construct
  misc_feature 1..186: note = Description of Artificial Sequence: Synthetic coding sequence
  source 1..186: mol_type = other DNA
atgcagcccagaacccagcccctggcccagaccctgcccttcttcctgggcggcgcccccagagacaccggcctgagagtgcccgtgatcaagatgggcaccggctgggagggcttccagagaaccctgaaggaggtggcctacatcctgctgtgctgctggtgcatcaaggagctgctggactag

SEQ ID NO: 86640 - DNA, 186 bp, synthetic construct; identical to SEQ ID NO: 86639
  misc_feature 1..186: note = Description of Artificial Sequence: Synthetic coding sequence
  source 1..186: mol_type = other DNA

SEQ ID NO: 86641 - DNA, 522 bp, synthetic construct
  misc_feature 1..522: note = Description of Artificial Sequence: Synthetic coding sequence
  source 1..522: mol_type = other DNA
atgtacagcttcatgggcggcggcctgttctgcgcctgggtgggcaccatcctgctggtggtggccatggccaccgaccactggatgcagtacagactgagcggcagcttcgcccaccagggcctgtggagatactgcctgggcaacaagtgctacctgcagaccgacagcatcgcctactggaacgccaccagagccttcatgatcctgagcgccctgtgcgccatcagcggcatcatcatgggcatcatggccttcgcccaccagcccaccttcagcagaatcagcagacccttcagcgccggcatcatgttcttcagcagcaccctgttcgtggtgctggccctggccatctacaccggcgtgaccgtgagcttcctgggcagaagattcggcgactggagattcagctggagctacatcctgggctgggtggccgtgctgatgaccttcttcgccggcatcttctacatgtgcgcctacagagtgcacgagtgcagaagactgagcacccccagatag

SEQ ID NO: 86642 - DNA, 681 bp, synthetic construct
  misc_feature 1..681: note = Description of Artificial Sequence: Synthetic coding sequence
  source 1..681: mol_type = other DNA
atgcccggcggccccggcgtgctgcaggccctgcccgccaccatcttcctgctgttcctgctgagcgccgtgtacctgggccccggctgccaggccctgtggatgcacaaggtgcccgccagcctgatggtgagcctgggcgaggacgcccacttccagtgcccccacaacagcagcaacaacgccaacgtgacctggtggagagtgctgcacggcaactacacctggccccccgagttcctgggccccggcgaggaccccaacggcaccctgatcatccagaacgtgaacaagagccacggcggcatctacgtgtgcagagtgcaggagggcaacgagagctaccagcagagctgcggcacctacctgagagtgagacagcccccccccagacccttcctggacatgggcgagggcaccaagaacagaatcatcaccgccgagggcatcatcctgctgttctgcgccgtggtgcccggcaccctgctgctgttcagaaagagatggcagaacgagaagctgggcctggacgccggcgacgagtacgaggacgagaacctgtacgagggcctgaacctggacgactgcagcatgtacgaggacatcagcagaggcctgcagggcacctaccaggacgtgggcagcctgaacatcggcgacgtgcagctggagaagccctag

SEQ ID NO: 86643 - DNA, 2001 bp, synthetic construct
  misc_feature 1..2001: note = Description of Artificial Sequence: Synthetic coding sequence
  source 1..2001: mol_type = other DNA
atggccgacatggaggacctgttcggcagcgacgccgacagcgaggccgagagaaaggacagcgacagcggcagcgacagcgacagcgaccaggagaacgccgccagcggcagcaacgccagcggcagcgagagcgaccaggacgagagaggcgacagcggccagcccagcaacaaggagctgttcggcgacgacagcgaggacgagggcgccagccaccacagcggcagcgacaaccacagcgagagaagcgacaacagaagcgaggccagcgagagaagcgaccacgaggacaacgaccccagcgacgtggaccagcacagcggcagcgaggcccccaacgacgacgaggacgagggccacagaagcgacggcggcagccaccacagcgaggccgagggcagcgagaaggcccacagcgacgacgagaagtggggcagagaggacaagagcgaccagagcgacgacgagaagatccagaacagcgacgacgaggagagagcccagggcagcgacgaggacaagctgcagaacagcgacgacgacgagaagatgcagaacaccgacgacgaggagagaccccagctgagcgacgacgagagacagcagctgagcgaggaggagaaggccaacagcgacgacgagagacccgtggccagcgacaacgacgacgagaagcagaacagcgacgacgaggagcagccccagctgagcgacgaggagaagatgcagaacagcgacgacgagagaccccaggccagcgacgaggagcacagacacagcgacgacgaggaggagcaggaccacaagagcgagagcgccagaggcagcgacagcgaggacgaggtgctgagaatgaagagaaagaacgccatcgccagcgacagcgaggccgacagcgacaccgaggtgcccaaggacaacagcggcaccatggacctgttcggcggcgccgacgacatcagcagcggcagcgacggcgaggacaagccccccacccccggccagcccgtggacgagaacggcctgccccaggaccagcaggaggaggagcccatccccgagaccagaatcgaggtggagatccccaaggtgaacaccgacctgggcaacgacctgtacttcgtgaagctgcccaacttcctgagcgtggagcccagacccttcgacccccagtactacgaggacgagttcgaggacgaggagatgctggacgaggagggcagaaccagactgaagctgaaggtggagaacaccatcagatggagaatcagaagagacgaggagggcaacgagatcaaggagagcaacgccagaatcgtgaagtggagcgacggcagcatgagcctgcacctgggcaacgaggtgttcgacgtgtacaaggcccccctgcagggcgaccacaaccacctgttcatcagacagggcaccggcctgcagggccaggccgtgttcaagaccaagctgaccttcagaccccacagcaccgacagcgccacccacagaaagatgaccctgagcctggccgacagatgcagcaagacccagaagatcagaatcctgcccatggccggcagagaccccgagtgccagagaaccgagatgatcaagaaggaggaggagagactgagagccagcatcagaagagagagccagcagagaagaatgagagagaagcagcaccagagaggcctgagcgccagctacctggagcccgacagatacgacgaggaggaggagggcgaggagagcatcagcctggccgccatcaagaacagatacaagggcggcatcagagaggagagagccagaatctacagcagcgacagcgacgagggcagcgaggaggacaaggcccagagactgctgaaggccaagaagctgaccagcgacgaggagggcgagcccagcggcaagagaaaggccgaggacgacgacaaggccaacaagaagcacaagaagtacgtgatcagcgacgaggaggaggaggacgacgactag

SEQ ID NO: 86644 - DNA, 1821 bp, synthetic construct
  misc_feature 1..1821: note = Description of Artificial Sequence: Synthetic coding sequence
  source 1..1821: mol_type = other DNA
atggccgacatggaggacctgttcggcagcgacgccgacagcgaggccgagagaaaggacagcgacagcggcagcgacagcgacagcgaccaggagaacgccgccagcggcagcaacgccagcggcagcgagagcgaccaggacgagagaggcgacagcggccagcccagcaacaaggagctgttcggcgacgacagcgaggacgagggcgccagccaccacagcggcagcgacaaccacagcgagagaagcgacaacagaagcgaggccagcgagagaagcgaccacgaggacaacgaccccagcgacgtggaccagcacagcggcagcgaggcccccaacgacgacgaggacgagggccacagaagcgacggcggcagccaccacagcgaggccgagggcagcgagaaggcccacagcgacgacgagaagtggggcagagaggacaagagcgaccagagcgacgacgagaagatccagaacagcgacgacgaggagagagcccagggcagcgacgaggacaagctgcagaacagcgacgacgacgagaagatgcagaacaccgacgacgaggagagaccccagctgagcgacgacgagagacagcagctgagcgaggaggagaaggccaacagcgacgacgagagacccgtggccagcgacaacgacgacgagaagcagaacagcgacgacgaggagcagccccagctgagcgacgaggagaagatgcagaacagcgacgacgagagaccccaggccagcgacgaggagcacagacacagcgacgacgaggaggagcaggaccacaagagcgagagcgccagaggcagcgacagcgaggacgaggtgctgagaatgaagagaaagaacgccatcgccagcgacagcgaggccgacagcgacaccgaggtgcccaaggacaacagcggcaccatggacctgttcggcggcgccgacgacatcagcagcggcagcgacggcgaggacaagccccccacccccggccagcccgtggacgagaacggcctgccccaggaccagcaggaggaggagcccatccccgagaccagaatcgaggtggagatccccaaggtgaacaccgacctgggcaacgacctgtacttcgtgaagctgcccaacttcctgagcgtggagcccagcatgagcctgcacctgggcaacgaggtgttcgacgtgtacaaggcccccctgcagggcgaccacaaccacctgttcatcagacagggcaccggcctgcagggccaggccgtgttcaagaccaagctgaccttcagaccccacagcaccgacagcgccacccacagaaagatgaccctgagcctggccgacagatgcagcaagacccagaagatcagaatcctgcccatggccggcagagaccccgagtgccagagaaccgagatgatcaagaaggaggaggagagactgagagccagcatcagaagagagagccagcagagaagaatgagagagaagcagcaccagagaggcctgagcgccagctacctggagcccgacagatacgacgaggaggaggagggcgaggagagcatcagcctggccgccatcaagaacagatacaagggcggcatcagagaggagagagccagaatctacagcagcgacagcgacgagggcagcgaggaggacaaggcccagagactgctgaaggccaagaagctgaccagcgacgaggagggcgagcccagcggcaagagaaaggccgaggacgacgacaaggccaacaagaagcacaagaagtacgtgatcagcgacgaggaggaggaggacgacgactag

SEQ ID NO: 86645 - DNA, 1935 bp, synthetic construct
  misc_feature 1..1935: note = Description of Artificial Sequence: Synthetic coding sequence
  source 1..1935: mol_type = other DNA
atggccgacatggaggacctgttcggcagcgacgccgacagcgaggccgagagaaaggacagcgacagcggcagcgacagcgacagcgaccaggagaacgccgccagcggcagcaacgccagcggcagcgagagcgaccaggacgagagaggcgacagcggccagcccagcaacaaggagctgttcggcgacgacagcgaggacgagggcgccagccaccacagcggcagcgacaaccacagcgagagaagcgacaacagaagcgaggccagcgagagaagcgaccacgaggacaacgaccccagcgacgtggaccagcacagcggcagcgaggcccccaacgacgacgaggacgagggccacagaagcgacggcggcagccaccacagcgaggccgagggcagcgagaaggcccacagcgacgacgagaagtggggcagagaggacaagagcgaccagagcgacgacgagaagatccagaacagcgacgacgaggagagagcccagggcagcgacgaggacaagctgcagaacagcgacgacgacgagaagatgcagaacaccgacgacgaggagagaccccagctgagcgacgacgagagacagcagctgagcgaggaggagaaggccaacagcgacgacgagagacccgtggccagcgacaacgacgacgacgacgagagaccccaggccagcgacgaggagcacagacacagcgacgacgaggaggagcaggaccacaagagcgagagcgccagaggcagcgacagcgaggacgaggtgctgagaatgaagagaaagaacgccatcgccagcgacagcgaggccgacagcgacaccgaggtgcccaaggacaacagcggcaccatggacctgttcggcggcgccgacgacatcagcagcggcagcgacggcgaggacaagccccccacccccggccagcccgtggacgagaacggcctgccccaggaccagcaggaggaggagcccatccccgagaccagaatcgaggtggagatccccaaggtgaacaccgacctgggcaacgacctgtacttcgtgaagctgcccaacttcctgagcgtggagcccagacccttcgacccccagtactacgaggacgagttcgaggacgaggagatgctggacgaggagggcagaaccagactgaagctgaaggtggagaacaccatcagatggagaatcagaagagacgaggagggcaacgagatcaaggagagcaacgccagaatcgtgaagtggagcgacggcagcatgagcctgcacctgggcaacgaggtgttcgacgtgtacaaggcccccctgcagggcgaccacaaccacctgttcatcagacagggcaccggcctgcagggccaggccgtgttcaagaccaagctgaccttcagaccccacagcaccgacagcgccacccacagaaagatgaccctgagcctggccgacagatgcagcaagacccagaagatcagaatcctgcccatggccggcagagaccccgagtgccagagaaccgagatgatcaagaaggaggaggagagactgagagccagcatcagaagagagagccagcagagaagaatgagagagaagcagcaccagagaggcctgagcgccagctacctggagcccgacagatacgacgaggaggaggagggcgaggagagcatcagcctggccgccatcaagaacagatacaagggcggcatcagagaggagagagccagaatctacagcagcgacagcgacgagggcagcgaggaggacaaggcccagagactgctgaaggccaagaagctgaccagcgacgaggagggcgagcccagcggcaagagaaaggccgaggacgacgacaaggccaacaagaagcacaagaagtacgtgatcagcgacgaggaggaggaggacgacgactag

SEQ ID NO: 86646 - DNA, 2127 bp, synthetic construct
  misc_feature 1..2127: note = Description of Artificial Sequence: Synthetic coding sequence
  source 1..2127: mol_type = other DNA
atgagagagagaatctgggccccccccctgctgctgctgctgcccctgctgctgcccccccccctgtggggcggcccccccgacagccccagaagagagctggagctggagcccggccccctgcagcccttcgacctgctgtacgccagcggcgccgccgcctactacagcggcgactacgagagagccgtgagagacctggaggccgccctgagaagccacagaagactgagagagatcagaaccagatgcgccagacactgcgccgccagacaccccctgcccccccccccccccggcgagggccccggcgccgagctgcccctgttcagaagcctgctgggcagagccagatgctacagaagctgcgagacccagagactgggcggccccgccagcagacacagagtgagcgaggacgtgagaagcgacttccagagaagagtgccctacaactacctgcagagagcctacatcaagctgaaccagctggagaaggccgtggaggccgcccacaccttcttcgtggccaaccccgagcacatggagatgcagcagaacatcgagaactacagagccaccgccggcgtggaggccctgcagctggtggacagagaggccaagccccacatggagagctacaacgccggcgtgaagcactacgaggccgacgacttcgagatggccatcagacacttcgagcaggccctgagagagtacttcgtggaggacaccgagtgcagaaccctgtgcgagggcccccagagattcgaggagtacgagtacctgggctacaaggccggcctgtacgaggccatcgccgaccactacatgcaggtgctggtgtgccagcacgagtgcgtgagagagctggccaccagacccggcagactgagccccatcgagaacttcctgcccctgcactacgactacctgcagttcgcctactacagagtgggcgagtacgtgaaggccctggagtgcgccaaggcctacctgctgtgccaccccgacgacgaggacgtgctggacaacgtggactactacgagagcctgctggacgacagcatcgaccccgccagcatcgaggccagagaggacctgaccatgttcgtgaagagacacaagctggagagcgagctgatcaagagcgccgccgagggcctgggcttcagctacaccgagcccaactactggatcagatacggcggcagacaggacgagaacagagtgcccagcggcgtgaacgtggagggcgccgaggtgcacggcttcagcatgggcaagaagctgagccccaagatcgacagagacctgagagagggcggccccctgctgtacgagaacatcaccttcgtgtacaacagcgagcagctgaacggcacccagagagtgctgctggacaacgtgctgagcgaggagcagtgcagagagctgcacagcgtggccagcggcatcatgctggtgggcgacggctacagaggcaagaccagcccccacacccccaacgagaagttcgagggcgccaccgtgctgaaggccctgaagagcggctacgagggcagagtgcccctgaagagcgccagactgttctacgacatcagcgagaaggccagaagaatcgtggagagctacttcatgctgaacagcaccctgtacttcagctacacccacatggtgtgcagaaccgccctgagcggccagcaggacagaagaaacgacctgagccaccccatccacgccgacaactgcctgctggaccccgaggccaacgagtgctggaaggagccccccgcctacaccttcagagactacagcgccctgctgtacatgaacgacgacttcgagggcggcgagttcatcttcaccgagatggacgccaagaccgtgaccgccagcatcaagcccaagtgcggcagaatgatcagcttcagcagcggcggcgagaacccccacggcgtgaaggccgtgaccaagggcaagagatgcgccgtggccctgtggttcaccctggaccccctgtacagagagctggagagaatccaggccgacgaggtgatcgccatcctggaccaggagcagcagggcaagcacgagctgaacatcaaccccaaggacgagctgtag

SEQ ID NO: 86647 - DNA, 1584 bp, synthetic construct
  misc_feature 1..1584: note = Description of Artificial Sequence: Synthetic coding sequence
  source 1..1584: mol_type = other DNA
atggagatgcagcagaacatcgagaactacagagccaccgccggcgtggaggccctgcagctggtggacagagaggccaagccccacatggagagctacaacgccggcgtgaagcactacgaggccgacgacttcgagatggccatcagacacttcgagcaggccctgagagagtacttcgtggaggacaccgagtgcagaaccctgtgcgagggcccccagagattcgaggagtacgagtacctgggctacaaggccggcctgtacgaggccatcgccgaccactacatgcaggtgctggtgtgccagcacgagtgcgtgagagagctggccaccagacccggcagactgagccccatcgagaacttcctgcccctgcactacgactacctgcagttcgcctactacagagtgggcgagtacgtgaaggccctggagtgcgccaaggcctacctgctgtgccaccccgacgacgaggacgtgctggacaacgtggactactacgagagcctgctggacgacagcatcgaccccgccagcatcgaggccagagaggacctgaccatgttcgtgaagagacacaagctggagagcgagctgatcaagagcgccgccgagggcctgggcttcagctacaccgagcccaactactggatcagatacggcggcagacaggacgagaacagagtgcccagcggcgtgaacgtggagggcgccgaggtgcacggcttcagcatgggcaagaagctgagccccaagatcgacagagacctgagagagggcggccccctgctgtacgagaacatcaccttcgtgtacaacagcgagcagctgaacggcacccagagagtgctgctggacaacgtgctgagcgaggagcagtgcagagagctgcacagcgtggccagcggcatcatgctggtgggcgacggctacagaggcaagaccagcccccacacccccaacgagaagttcgagggcgccaccgtgctgaaggccctgaagagcggctacgagggcagagtgcccctgaagagcgccagactgttctacgacatcagcgagaaggccagaagaatcgtggagagctacttcatgctgaacagcaccctgtacttcagctacacccacatggtgtgcagaaccgccctgagcggccagcaggacagaagaaacgacctgagccaccccatccacgccgacaactgcctgctggaccccgaggccaacgagtgctggaaggagccccccgcctacaccttcagagactacagcgccctgctgtacatgaacgacgacttcgagggcggcgagttcatcttcaccgagatggacgccaagaccgtgaccgccagcatcaagcccaagtgcggcagaatgatcagcttcagcagcggcggcgagaacccccacggcgtgaaggccgtgaccaagggcaagagatgcgccgtggccctgtggttcaccctggaccccctgtacagagagctggagagaatccaggccgacgaggtgatcgccatcctggaccaggagcagcagggcaagcacgagctgaacatcaaccccaaggacgagctgtag

SEQ ID NO: 86648 - DNA, 2721 bp, synthetic construct
  misc_feature 1..2721: note = Description of Artificial Sequence: Synthetic coding sequence
  source 1..2721: mol_type = other DNA
atgatctgccagaagttctgcgtggtgctgctgcactgggagttcatctacgtgatcaccgccttcaacctgagctaccccatcaccccctggagattcaagctgagctgcatgccccccaacagcacctacgactacttcctgctgcccgccggcctgagcaagaacaccagcaacagcaacggccactacgagaccgccgtggagcccaagttcaacagcagcggcacccacttcagcaacctgagcaagaccaccttccactgctgcttcagaagcgagcaggacagaaactgcagcctgtgcgccgacaacatcgagggcaagaccttcgtgagcaccgtgaacagcctggtgttccagcagatcgacgccaactggaacatccagtgctggctgaagggcgacctgaagctgttcatctgctacgtggagagcctgttcaagaacctgttcagaaactacaactacaaggtgcacctgctgtacgtgctgcccgaggtgctggaggacagccccctggtgccccagaagggcagcttccagatggtgcactgcaactgcagcgtgcacgagtgctgcgagtgcctggtgcccgtgcccaccgccaagctgaacgacaccctgctgatgtgcctgaagatcaccagcggcggcgtgatcttccagagccccctgatgagcgtgcagcccatcaacatggtgaagcccgacccccccctgggcctgcacatggagatcaccgacgacggcaacctgaagatcagctggagcagcccccccctggtgcccttccccctgcagtaccaggtgaagtacagcgagaacagcaccaccgtgatcagagaggccgacaagatcgtgagcgccaccagcctgctggtggacagcatcctgcccggcagcagctacgaggtgcaggtgagaggcaagagactggacggccccggcatctggagcgactggagcacccccagagtgttcaccacccaggacgtgatctacttcccccccaagatcctgaccagcgtgggcagcaacgtgagcttccactgcatctacaagaaggagaacaagatcgtgcccagcaaggagatcgtgtggtggatgaacctggccgagaagatcccccagagccagtacgacgtggtgagcgaccacgtgagcaaggtgaccttcttcaacctgaacgagaccaagcccagaggcaagttcacctacgacgccgtgtactgctgcaacgagcacgagtgccaccacagatacgccgagctgtacgtgatcgacgtgaacatcaacatcagctgcgagaccgacggctacctgaccaagatgacctgcagatggagcaccagcaccatccagagcctggccgagagcaccctgcagctgagataccacagaagcagcctgtactgcagcgacatccccagcatccaccccatcagcgagcccaaggactgctacctgcagagcgacggcttctacgagtgcatcttccagcccatcttcctgctgagcggctacaccatgtggatcagaatcaaccacagcctgggcagcctggacagcccccccacctgcgtgctgcccgacagcgtggtgaagcccctgccccccagcagcgtgaaggccgagatcaccatcaacatcggcctgctgaagatcagctgggagaagcccgtgttccccgagaacaacctgcagttccagatcagatacggcctgagcggcaaggaggtgcagtggaagatgtacgaggtgtacgacgccaagagcaagagcgtgagcctgcccgtgcccgacctgtgcgccgtgtacgccgtgcaggtgagatgcaagagactggacggcctgggctactggagcaactggagcaaccccgcctacaccgtggtgatggacatcaaggtgcccatgagaggccccgagttctggagaatcatcaacggcgacaccatgaagaaggagaagaacgtgaccctgctgtggaagcccctgatgaagaacgacagcctgtgcagcgtgcagagatacgtgatcaaccaccacaccagctgcaacggcacctggagcgaggacgtgggcaaccacaccaagttcaccttcctgtggaccgagcaggcccacaccgtgaccgtgctggccatcaacagcatcggcgccagcgtggccaacttcaacctgaccttcagctggcccatgagcaaggtgaacatcgtgcagagcctgagcgcctaccccctgaacagcagctgcgtgatcgtgagctggatcctgagccccagcgactacaagctgatgtacttcatcatcgagtggaagaacctgaacgaggacggcgagatcaagtggctgagaatcagcagcagcgtgaagaagtactacatccacgaccacttcatccccatcgagaagtaccagttcagcctgtaccccatcttcatggagggcgtgggcaagcccaagatcatcaacagcttcacccaggacgacatcgagaagcaccagagcgacgccggcctgtacgtgatcgtgcccgtgatcatcagcagcagcatcctgctgctgggcaccctgctgatcagccaccagagaatgaagaagctgttctgggaggacgtgcccaaccccaagaactgcagctgggcccagggcctgaacttccagaagaagatgcccggcaccaaggagctgctgggcggcggctggctgacctag

SEQ ID NO: 86649 - DNA, 3498 bp, synthetic construct
  misc_feature 1..3498: note = Description of Artificial Sequence: Synthetic coding sequence
  source 1..3498: mol_type = other DNA
atgatctgccagaagttctgcgtggtgctgctgcactgggagttcatctacgtgatcaccgccttcaacctgagctaccccatcaccccctggagattcaagctgagctgcatgccccccaacagcacctacgactacttcctgctgcccgccggcctgagcaagaacaccagcaacagcaacggccactacgagaccgccgtggagcccaagttcaacagcagcggcacccacttcagcaacctgagcaagaccaccttccactgctgcttcagaagcgagcaggacagaaactgcagcctgtgcgccgacaacatcgagggcaagaccttcgtgagcaccgtgaacagcctggtgttccagcagatcgacgccaactggaacatccagtgctggctgaagggcgacctgaagctgttcatctgctacgtggagagcctgttcaagaacctgttcagaaactacaactacaaggtgcacctgctgtacgtgctgcccgaggtgctggaggacagccccctggtgccccagaagggcagcttccagatggtgcactgcaactgcagcgtgcacgagtgctgcgagtgcctggtgcccgtgcccaccgccaagctgaacgacaccctgctgatgtgcctgaagatcaccagcggcggcgtgatcttccagagccccctgatgagcgtgcagcccatcaacatggtgaagcccgacccccccctgggcctgcacatggagatcaccgacgacggcaacctgaagatcagctggagcagcccccccctggtgcccttccccctgcagtaccaggtgaagtacagcgagaacagcaccaccgtgatcagagaggccgacaagatcgtgagcgccaccagcctgctggtggacagcatcctgcccggcagcagctacgaggtgcaggtgagaggcaagagactggacggccccggcatctggagcgactggagcacccccagagtgttcaccacccaggacgtgatctacttcccccccaagatcctgaccagcgtgggcagcaacgtgagcttccactgcatctacaagaaggagaacaagatcgtgcccagcaaggagatcgtgtggtggatgaacctggccgagaagatcccccagagccagtacgacgtggtgagcgaccacgtgagcaaggtgaccttcttcaacctgaacgagaccaagcccagaggcaagttcacctacgacgccgtgtactgctgcaacgagcacgagtgccaccacagatacgccgagctgtacgtgatcgacgtgaacatcaacatcagctgcgagaccgacggctacctgaccaagatgacctgcagatggagcaccagcaccatccagagcctggccgagagcaccctgcagctgagataccacagaagcagcctgtactgcagcgacatccccagcatccaccccatcagcgagcccaaggactgctacctgcagagcgacggcttctacgagtgcatcttccagcccatcttcctgctgagcggctacaccatgtggatcagaatcaaccacagcctgggcagcctggacagcccccccacctgcgtgctgcccgacagcgtggtgaagcccctgccccccagcagcgtgaaggccgagatcaccatcaacatcggcctgctgaagatcagctgggagaagcccgtgttccccgagaacaacctgcagttccagatcagatacggcctgagcggcaaggaggtgcagtggaagatgtacgaggtgtacgacgccaagagcaagagcgtgagcctgcccgtgcccgacctgtgcgccgtgtacgccgtgcaggtgagatgcaagagactggacggcctgggctactggagcaactggagcaaccccgcctacaccgtggtgatggacatcaaggtgcccatgagaggccccgagttctggagaatcatcaacggcgacaccatgaagaaggagaagaacgtgaccctgctgtggaagcccctgatgaagaacgacagcctgtgcagcgtgcagagatacgtgatcaaccaccacaccagctgcaacggcacctggagcgaggacgtgggcaaccacaccaagttcaccttcctgtggaccgagcaggcccacaccgtgaccgtgctggccatcaacagcatcggcgccagcgtggccaacttcaacctgaccttcagctggcccatgagcaaggtgaacatcgtgcagagcctgagcgcctaccccctgaacagcagctgcgtgatcgtgagctggatcctgagccccagcgactacaagctgatgtacttcatcatcgagtggaagaacctgaacgaggacggcgagatcaagtggctgagaatcagcagcagcgtgaagaagtactacatccacgaccacttcatccccatcgagaagtaccagttcagcctgtaccccatcttcatggagggcgtgggcaagcccaagatcatcaacagcttcacccaggacgacatcgagaagcaccagagcgacgccggcctgtacgtgatcgtgcccgtgatcatcagcagcagcatcctgctgctgggcaccctgctgatcagccaccagagaatgaagaagctgttctgggaggacgtgcccaaccccaagaactgcagctgggcccagggcctgaacttccagaagcccgagaccttcgagcacctgttcatcaagcacaccgccagcgtgacctgcggccccctgctgctggagcccgagaccatcagcgaggacatcagcgtggacaccagctggaagaacaaggacgagatgatgcccaccaccgtggtgagcctgctgagcaccaccgacctggagaagggcagcgtgtgcatcagcgaccagttcaacagcgtgaacttcagcgaggccgagggcaccgaggtgacctacgaggacgagagccagagacagcccttcgtgaagtacgccaccctgatcagcaacagcaagcccagcgagaccggcgaggagcagggcctgatcaacagcagcgtgaccaagtgcttcagcagcaagaacagccccctgaaggacagcttcagcaacagcagctgggagatcgaggcccaggccttcttcatcctgagcgaccagcaccccaacatcatcagcccccacctgaccttcagcgagggcctggacgagctgctgaagctggagggcaacttccccgaggagaacaacgacaagaagagcatctactacctgggcgtgaccagcatcaagaagagagagagcggcgtgctgctgaccgacaagagcagagtgagctgccccttccccgccccctgcctgttcaccgacatcagagtgctgcaggacagctgcagccacttcgtggagaacaacatcaacctgggcaccagcagcaagaagaccttcgccagctacatgccccagttccagacctgcagcacccagacccacaagatcatggagaacaagatgtgcgacctgaccgtgtag

SEQ ID NO: 86650 - DNA, 2721 bp, synthetic construct; identical to SEQ ID NO: 86648
  misc_feature 1..2721: note = Description of Artificial Sequence: Synthetic coding sequence
  source 1..2721: mol_type = other DNA

SEQ ID NO: 86651 - DNA, 2877 bp, synthetic construct
  misc_feature 1..2877: note = Description of Artificial Sequence: Synthetic coding sequence
  source 1..2877: mol_type = other DNA
atgatctgccagaagttctgcgtggtgctgctgcactgggagttcatctacgtgatcaccgccttcaacctgagctaccccatcaccccctggagattcaagctgagctgcatgccccccaacagcacctacgactacttcctgctgcccgccggcctgagcaagaacaccagcaacagcaacggccactacgagaccgccgtggagcccaagttcaacagcagcggcacccacttcagcaacctgagcaagaccaccttccactgctgcttcagaagcgagcaggacagaaactgcagcctgtgcgccgacaacatcgagggcaagaccttcgtgagcaccgtgaacagcctggtgttccagcagatcgacgccaactggaacatccagtgctggctgaagggcgacctgaagctgttcatctgctacgtggagagcctgttcaagaacctgttcagaaactacaactacaaggtgcacctgctgtacgtgctgcccgaggtgctggaggacagccccctggtgccccagaagggcagcttccagatggtgcactgcaactgcagcgtgcacgagtgctgcgagtgcctggtgcccgtgcccaccgccaagctgaacgacaccctgctgatgtgcctgaagatcaccagcggcggcgtgatcttccagagccccctgatgagcgtgcagcccatcaacatggtgaagcccgacccccccctgggcctgcacatggagatcaccgacgacggcaacctgaagatcagctggagcagcccccccctggtgcccttccccctgcagtaccaggtgaagtacagcgagaacagcaccaccgtgatcagagaggccgacaagatcgtgagcgccaccagcctgctggtggacagcatcctgcccggcagcagctacgaggtgcaggtgagaggcaagagactggacggccccggcatctggagcgactggagcacccccagagtgttcaccacccaggacgtgatctacttcccccccaagatcctgaccagcgtgggcagcaacgtgagcttccactgcatctacaagaaggagaacaagatcgtgcccagcaaggagatcgtgtggtggatgaacctggccgagaagatcccccagagccagtacgacgtggtgagcgaccacgtgagcaaggtgaccttcttcaacctgaacgagaccaagcccagaggcaagttcacctacgacgccgtgtactgctgcaacgagcacgagtgccaccacagatacgccgagctgtacgtgatcgacgtgaacatcaacatcagctgcgagaccgacggctacctgaccaagatgacctgcagatggagcaccagcaccatccagagcctggccgagagcaccctgcagctgagataccacagaagcagcctgtactgcagcgacatccccagcatccaccccatcagcgagcccaaggactgctacctgcagagcgacggcttctacgagtgcatcttccagcccatcttcctgctgagcggctacaccatgtggatcagaatcaaccacagcctgggcagcctggacagcccccccacctgcgtgctgcccgacagcgtggtgaagcccctgccccccagcagcgtgaaggccgagatcaccatcaacatcggcctgctgaagatcagctgggagaagcccgtgttccccgagaacaacctgcagttccagatcagatacggcctgagcggcaaggaggtgcagtggaagatgtacgaggtgtacgacgccaagagcaagagcgtgagcctgcccgtgcccgacctgtgcgccgtgtacgccgtgcaggtgagatgcaagagactggacggcctgggctactggagcaactggagcaaccccgcctacaccgtggtgatggacatcaaggtgcccatgagaggccccgagttctggagaatcatcaacggcgacaccatgaagaaggagaagaacgtgaccctgctgtggaagcccctgatgaagaacgacagcctgtgcagcgtgcagagatacgtgatcaaccaccacaccagctgcaacggcacctggagcgaggacgtgggcaaccacaccaagttcaccttcctgtggaccgagcaggcccacaccgtgaccgtgctggccatcaacagcatcggcgccagcgtggccaacttcaacctgaccttcagctggcccatgagcaaggtgaacatcgtgcagagcctgagcgcctaccccctgaacagcagctgcgtgatcgtgagctggatcctgagccccagcgactacaagctgatgtacttcatcatcgagtggaagaacctgaacgaggacggcgagatcaagtggctgagaatcagcagcagcgtgaagaagtactacatccacgaccacttcatccccatcgagaagtaccagttcagcctgtaccccatcttcatggagggcgtgggcaagcccaagatcatcaacagcttcacccaggacgacatcgagaagcaccagagcgacgccggcctgtacgtgatcgtgcccgtgatcatcagcagcagcatcctgctgctgggcaccctgctgatcagccaccagagaatgaagaagctgttctgggaggacgtgcccaaccccaagaactgcagctgggcccagggcctgaacttccagaagatgctggagggcagcatgttcgtgaagagccaccaccacagcctgatcagcagcacccagggccacaagcactgcggcagaccccagggccccctgcacagaaagaccagagacctgtgcagcctggtgtacctgctgaccctgccccccctgctgagctacgaccccgccaagagccccagcgtgagaaacacccaggagtag

SEQ ID NO: 86652 - DNA, 2691 bp, synthetic construct
  misc_feature 1..2691: note = Description of Artificial Sequence: Synthetic coding sequence
  source 1..2691: mol_type = other DNA
atgatctgccagaagttctgcgtggtgctgctgcactgggagttcatctacgtgatcaccgccttcaacctgagctaccccatcaccccctggagattcaagctgagctgcatgccccccaacagcacctacgactacttcctgctgcccgccggcctgagcaagaacaccagcaacagcaacggccactacgagaccgccgtggagcccaagttcaacagcagcggcacccacttcagcaacctgagcaagaccaccttccactgctgcttcagaagcgagcaggacagaaactgcagcctgtgcgccgacaacatcgagggcaagaccttcgtgagcaccgtgaacagcctggtgttccagcagatcgacgccaactggaacatccagtgctggctgaagggcgacctgaagctgttcatctgctacgtggagagcctgttcaagaacctgttcagaaactacaactacaaggtgcacctgctgtacgtgctgcccgaggtgctggaggacagccccctggtgccccagaagggcagcttccagatggtgcactgcaactgcagcgtgcacgagtgctgcgagtgcctggtgcccgtgcccaccgccaagctgaacgacaccctgctgatgtgcctgaagatcaccagcggcggcgtgatcttccagagccccctgatgagcgtgcagcccatcaacatggtgaagcccgacccccccctgggcctgcacatggagatcaccgacgacggcaacctgaagatcagctggagcagcccccccctggtgcccttccccctgcagtaccaggtgaagtacagcgagaacagcaccaccgtgatcagagaggccgacaagatcgtgagcgccaccagcctgctggtggacagcatcctgcccggcagcagctacgaggtgcaggtgagaggcaagagactggacggccccggcatctggagcgactggagcacccccagagtgttcaccacccaggacgtgatctacttcccccccaagatcctgaccagcgtgggcagcaacgtgagcttccactgcatctacaagaaggagaacaagatcgtgcccagcaaggagatcgtgtggtggatgaacctggccgagaagatcccccagagccagtacgacgtggtgagcgaccacgtgagcaaggtgaccttcttcaacctgaacgagaccaagcccagaggcaagttcacctacgacgccgtgtactgctgcaacgagcacgagtgccaccacagatacgccgagctgtacgtgatcgacgtgaacatcaacatcagctgcgagaccgacggctacctgaccaagatgacctgcagatggagcaccagcaccatccagagcctggccgagagcaccctgcagctgagataccacagaagcagcctgtactgcagcgacatccccagcatccaccccatcagcgagcccaaggactgctacctgcagagcgacggcttctacgagtgcatcttccagcccatcttcctgctgagcggctacaccatgtggatcagaatcaaccacagcctgggcagcctggacagcccccccacctgcgtgctgcccgacagcgtggtgaagcccctgccccccagcagcgtgaaggccgagatcaccatcaacatcggcctgctgaagatcagctgggagaagcccgtgttccccgagaacaacctgcagttccagatcagatacggcctgagcggcaaggaggtgcagtggaagatgtacgaggtgtacgacgccaagagcaagagcgtgagcctgcccgtgcccgacctgtgcgccgtgtacgccgtgcaggtgagatgcaagagactggacggcctgggctactggagcaactggagcaaccccgcctacaccgtggtgatggacatcaaggtgcccatgagaggccccgagttctggagaatcatcaacggcgacaccatgaagaaggagaagaacgtgaccctgctgtggaagcccctgatgaagaacgacagcctgtgcagcgtgcagagatacgtgatcaaccaccacaccagctgcaacggcacctggagcgaggacgtgggcaaccacaccaagttcaccttcctgtggaccgagcaggcccacaccgtgaccgtgctggccatcaacagcatcggcgccagcgtggccaacttcaacctgaccttcagctggcccatgagcaaggtgaacatcgtgcagagcctgagcgcctaccccctgaacagcagctgcgtgatcgtgagctggatcctgagccccagcgactacaagctgatgtacttcatcatcgagtggaagaacctgaacgaggacggcgagatcaagtggctgagaatcagcagcagcgtgaagaagtactacatccacgaccacttcatccccatcgagaagtaccagttcagcctgtaccccatcttcatggagggcgtgggcaagcccaagatcatcaacagcttcacccaggacgacatcgagaagcaccagagcgacgccggcctgtacgtgatcgtgcccgtgatcatcagcagcagcatcctgctgctgggcaccctgctgatcagccaccagagaatgaagaagctgttctgggaggacgtgcccaaccccaagaactgcagctgggcccagggcctgaacttccagaagagaaccgacatcctgtag

SEQ ID NO: 86653 - DNA, 699 bp, synthetic construct
  misc_feature 1..699: note = Description of Artificial Sequence: Synthetic coding sequence
  source 1..699: mol_type = other DNA
atgatgcccaccaccgtggtgagcctgctgagcaccaccgacctggagaagggcagcgtgtgcatcagcgaccagttcaacagcgtgaacttcagcgaggccgagggcaccgaggtgacctacgaggacgagagccagagacagcccttcgtgaagtacgccaccctgatcagcaacagcaagcccagcgagaccggcgaggagcagggcctgatcaacagcagcgtgaccaagtgcttcagcagcaagaacagccccctgaaggacagcttcagcaacagcagctgggagatcgaggcccaggccttcttcatcctgagcgaccagcaccccaacatcatcagcccccacctgaccttcagcgagggcctggacgagctgctgaagctggagggcaacttccccgaggagaacaacgacaagaagagcatctactacctgggcgtgaccagcatcaagaagagagagagcggcgtgctgctgaccgacaagagcagagtgagctgccccttccccgccccctgcctgttcaccgacatcagagtgctgcaggacagctgcagccacttcgtggagaacaacatcaacctgggcaccagcagcaagaagaccttcgccagctacatgccccagttccagacctgcagcacccagacccacaagatcatggagaacaagatgtgcgacctgaccgtgtag

SEQ ID NO: 86654 - DNA, 396 bp, synthetic construct
  misc_feature 1..396: note = Description of Artificial Sequence: Synthetic coding sequence
  source 1..396: mol_type = other DNA
atggccggcgtgaaggccctggtggccctgagcttcagcggcgccatcggcctgaccttcctgatgctgggctgcgccctggaggactacggcgtgtactggcccctgttcgtgctgatcttccacgccatcagccccatcccccacttcatcgccaagagagtgacctacgacagcgacgccaccagcagcgcctgcagagagctggcctacttcttcaccaccggcatcgtggtgagcgccttcggcttccccgtgatcctggccagagtggccgtgatcaagtggggcgcctgcggcctggtgctggccggcaacgccgtgatcttcctgaccatccagggcttcttcctgatcttcggcagaggcgacgacttcagctgggagcagtggtag

SEQ ID NO: 86655 - DNA, 396 bp, synthetic construct
  misc_feature 1..396: note = Description of Artificial Sequence: Synthetic coding sequence
  source 1..396: mol_type = other DNA
atggccggcatcaaggccctgatcagcctgagcttcggcggcgccatcggcctgatgttcctgatgctgggctgcgccctgcccatctacaacaagtactggcccctgttcgtgctgttcttctacatcctgagccccatcccctactgcatcgccagaagactggtggacgacaccgacgccatgagcaacgcctgcaaggagctggccatcttcctgaccaccggcatcgtggtgagcgccttcggcctgcccatcgtgttcgccagagcccacctgatcgagtggggcgcctgcgccctggtgctgaccggcaacaccgtgatcttcgccaccatcctgggcttcttcctggtgttcggcagcaacgacgacttcagctggcagcagtggtag

SEQ ID NO: 86656 - DNA, 510 bp, synthetic construct
  misc_feature 1..510: note = Description of Artificial Sequence: Synthetic coding sequence
  source 1..510: mol_type = other DNA
atggccggcatcaaggccctgatcagcctgagcttcggcggcgccatcggcctgatgttcctgatgctgggctgcgccctgcccatctacaacaagtactggcccctgttcgtgctgttcttctacatcctgagccccatcccctactgcatcgccagaagactggtggacgacaccgacgccatgagcaacgcctgcaaggagctggccatcttcctgaccaccggcatcgtggtgagcgccttcggcctgcccatcgtgttcgccagagcccacctgatgggcagactgcccttcttcagcaagatgggcaccgccgagagcgagggcagagagaccctgacccagcagctgcccctgcccgccgccgccatgagaagactgctgcccgccagcagagtgagcacccagcccgtgctgagactggccgacagcgccgagagcctgctgggcagacccgccctgtgggccctgggcttcctgctgtgcccccccagccaggcccagtag

SEQ ID NO: 86657 - DNA, 3195 bp, synthetic construct
  misc_feature 1..3195: note = Description of Artificial Sequence: Synthetic coding sequence
  source 1..3195: mol_type = other DNA
atgatgaagttcagattcagaagacagggcgccgacccccagagagagaagctgaagcaggagctgttcgccttcaacaagaccgtggagcacggcttccccaaccagcccagcgccctggccttcgaccccgagctgagaatcatggccatcggcaccagaagcggcgccgtgaagatctacggcgcccccggcgtggagttcaccggcctgcacagagacgccgccaccgtgacccagatgcacttcctgaccggccagggcagactgctgagcctgctggacgacagcagcctgcacctgtgggagatcgtgcaccacaacggctgcgcccacctggaggaggccctgagcttccagctgcccagcagacccggcttcgacggcgccagcgcccccctgagcctgaccagagtgaccgtggtgctgctggtggccgccagcgacatcgccgccctgggcaccgagggcagcagcgtgttcttcctggacgtgaccaccctgaccctgctggagggccagaccctggcccccggcgaggtgctgagaagcgtgcccgacgactacagatgcggcaaggccctgggccccgtggagagcctgcagggccacctgagagaccccaccaagatcctgatcggctacagcagaggcctgctggtgatctggaaccaggccagccagtgcgtggaccacatcttcctgggcaaccagcagctggagagcctgtgctggggcagagacagcagcaccgtggtgagcagccacagcgacggcagctacgccgtgtggagcgtggacgccggcagcttccccaccctgcagcccaccgtggccaccaccccctacggccccttcccctgcaaggccatcaacaagatcctgtggagaaactgcgagagcggcggccacttcatcatcttcagcggcggcatgcccagagccagctacggcgacagacactgcgtgagcgtgctgagagccgagaccctggtgaccctggacttcaccagcagaatcatcgacttcttcaccgtgcacagcaccagacccgaggacgagttcgacgacccccaggccctggccgtgctgctggaggaggagctggtggtgctggacctgcagacccccggctggcccgccgtgcccgccccctacctggcccccctgcacagcagcgccatcacctgcagcgcccacgtggccagcgtgcccgccaagctgtgggccagaatcgtgagcgccggcgagcagcagagcccccagcccgtgagcagcgccctgagctggcccatcaccggcggcagaaacctggcccaggagcccagccagagaggcctgctgctgaccggccacgaggacggcaccgtgagattctgggacgccagcggcgtggccctgagacccctgtacaagctgagcaccgccggcctgttccagaccgactgcgagcacgccgacagcctggcccaggccgccgaggacgactggccccccttcagaaaggtgggctgcttcgacccctacagcgacgaccccagactgggcgtgcagaaggtggccctgtgcaagtacaccgcccagatggtggtggccggcaccgccggccaggtgctggtgctggagctgagcgacgtgcccgtggagcaggccgtgagcgtggccatcatcgacctgctgcaggacagagagggcttcacctggaagggccacgagagactgagccccagaaccggccccctgccctggcccgccggcttccagcccagagtgctggtgcagtgcctgccccccgccgccgtgaccgccgtgaccctgcacaccgagtggagcctggtggccttcggcaccagccacggcttcggcctgttcgactaccagagaaagagccccgtgctggccagatgcaccctgcaccccaacgacagcctggccatggagggccccctgagcagagtgaagagcctgaagaagagcctgagacagagcttcagaagaatcagaaagagcagagtgagcggcaagaagagagccgccaacgccagcagcaagctgcaggaggccaacgcccagctggccgagcaggcctgcccccacgacgtggagatgacccccgtgcagagaagaatcgagcccagaagcgccgacgacagcctgagcggcgtggtgagatgcctgtacttcgccgacaccttcctgagagacggcgcccaccacggccccaccatgtgggccggcaccaacagcggcagcgtgttcgcctacgccctggaggtgcccgccgccgccgtgggcggcgagaagagacccgagcaggccgtggaggccgtgctgggcaaggaggtgcagctgatgcacagagcccccgtggtggccatcgccgtgctggacggcagaggcagacccctgcccgagccctacgaggccagcagagacctggcccaggcccccgacatgcagggcggccacgccgtgctgatcgccagcgaggagcagttcaaggtgttcaccctgcccaaggtgagcgccaagaccaagttcaagctgaccgcccacgagggctgcagagtgagaaaggtggccctggccaccttcgccagcgtggcctgcgaggactacgccgagacctgcctggcctgcctgaccaacctgggcgacgtgcacgtgttcagcgtgcccggcctgagaccccaggtgcactacagctgcatcagaaaggaggacatcagcggcatcgccagctgcgtgttcaccagacacggccagggcttctacctgatcagccccagcgagttcgagagattcagcctgagcgccagaaacatcaccgagcccctgtgcagcctggacatcaactggcccagagacgccacccaggccagctacagaatcagagagagccccaagctgagccaggccaacggcacccccagcatcctgctggccccccagagcctggacggcagccccgaccccgcccacagcatgggccccgacacccccgagccccccgaggccgccctgagccccatgagcatcgacagcgccaccagcgccgacaccaccctggacaccaccggcgacgtgaccgtggaggacgtgaaggacttcctgggcagcagcgaggagagcgagaagaacctgagaaacctggccgaggacgaggcccacgcctgcgccatcctgatcaagtag

SEQ ID NO: 86658 - DNA, 1056 bp, synthetic construct
  misc_feature 1..1056: note = Description of Artificial Sequence: Synthetic coding sequence
  source 1..1056: mol_type = other DNA
gagctgcccagcgccgcccccgacagcaccctgctgctgaccgcccagcactgggtggccaacctgttcatcctggccaccctgatcggctggaccgtgagaagcttcttcctgggcagaatggagacctgctgcagccacctgggcctgagaagcggcagaagattcgccgtgagcatcggctactggcacgacccctacatccagcacttcgtgagactgagcaaggagagaaaggcccccgagatcaacagaggctacttcgccagagtgcacggcgtgagccagctgatcaaggccttcctgagaaagaccgagtgccactgccagatcgtgaacctgggcgccggcatggacaccaccttctggagactgaaggacgaggacctgctgcccagcaagtacttcgaggtggacttccccatgatcgtgaccagaaagctgcacagcatcaagtgcaagccccccctgagcagccccatcctggagctgcacagcgaggacaccctgcagatggacggccacatcctggacagcaagagatacgccgtgatcggcgccgacctgagagacctgagcgagctggaggagaagctgaagaagtgcaacatgaacacccagctgcccaccctgctgatcgccgagtgcgtgctggtgtacatgacccccgagcagagcgccaacctgctgaagtgggccgccaacagcttcgagagagccatgttcatcaactacgagcaggtgaacatgggcgacagattcggccagatcatgatcgagaacctgagaagaagacagtgcgacctggccggcgtggagacctgcaagagcctggagagccagaaggagagactgctgagcaacggctgggagaccgccagcgccgtggacatgatggagctgtacaacagactgcccagagccgaggtgagcagaatcgagagcctggagttcctggacgagatggagctgctggagcagctgatgagacactactgcctgtgctgggccaccaagggcggcaacgagctgggcctgaaggagatcacctactag

SEQ ID NO: 86659 - DNA, 840 bp, synthetic construct
  misc_feature 1..840: note = Description of Artificial Sequence: Synthetic coding sequence
  source 1..840: mol_type = other DNA
atggccaccagacagagagagagcagcatcaccagctgctgcagcaccagcagctgcgacgccgacgacgagggcgtgagaggcacctgcgaggacgccagcctgtgcaagagattcgccgtgagcatcggctactggcacgacccctacatccagcacttcgtgagactgagcaaggagagaaaggcccccgagatcaacagaggctacttcgccagagtgcacggcgtgagccagctgatcaaggccttcctgagaaagaccgagtgccactgccagatcgtgaacctgggcgccggcatggacaccaccttctggagactgaaggacgaggacctgctgcccagcaagtacttcgaggtggacttccccatgatcgtgaccagaaagctgcacagcatcaagctgcccaccctgctgatcgccgagtgcgtgctggtgtacatgacccccgagcagagcgccaacctgctgaagtgggccgccaacagcttcgagagagccatgttcatcaactacgagcaggtgaacatgggcgacagattcggccagatcatgatcgagaacctgagaagaagacagtgcgacctggccggcgtggagacctgcaagagcctggagagccagaaggagagactgctgagcaacggctgggagaccgccagcgccgtggacatgatggagctgtacaacagactgcccagagccgaggtgagcagaatcgagagcctggagttcctggacgagatggagctgctggagcagctgatgagacactactgcctgtgctgggccaccaagggcggcaacgagctgggcctgaaggagatcacctactag

SEQ ID NO: 86660 - DNA, 1005 bp, synthetic construct
  misc_feature 1..1005: note = Description of Artificial Sequence: Synthetic coding sequence
  source 1..1005: mol_type = other DNA
atggccaccagacagagagagagcagcatcaccagctgctgcagcaccagcagctgcgacgccgacgacgagggcgtgagaggcacctgcgaggacgccagcctgtgcaagagattcgccgtgagcatcggctactggcacgacccctacatccagcacttcgtgagactgagcaaggagagaaaggcccccgagatcaacagaggctacttcgccagagtgcacggcgtgagccagctgatcaaggccttcctgagaaagaccgagtgccactgccagatcgtgaacctgggcgccggcatggacaccaccttctggagactgaaggacgaggacctgctgcccagcaagtacttcgaggtggacttccccatgatcgtgaccagaaagctgcacagcatcaagtgcaagccccccctgagcagccccatcctggagctgcacagcgaggacaccctgcagatggacggccacatcctggacagcaagagatacgccgtgatcggcgccgacctgagagacctgagcgagctggaggagaagctgaagaagtgcaacatgaacacccagctgcccaccctgctgatcgccgagtgcgtgctggtgtacatgacccccgagcagagcgccaacctgctgaagtgggccgccaacagcttcgagagagccatgttcatcaactacgagcaggtgaacatgggcgacagattcggccagatcatgatcgagaacctgagaagaagacagtgcgacctggccggcgtggagacctgcaagagcctggagagccagaaggagagactgctgagcaacggctgggagaccgccagcgccgtggacatgatggagctgtacaacagactgcccagagccgaggtgagcagaatcgagagcctggagttcctggacgagatggagctgctggagcagctgatgagacactactgcctgtgctgggccaccaagggcggcaacgagctgggcctgaaggagatcacctactag

SEQ ID NO: 86661 - DNA, 2415 bp, synthetic construct
  misc_feature 1..2415: note = Description of Artificial Sequence: Synthetic coding sequence
  source 1..2415: mol_type = other DNA
atggccgtgagagccctgaagctgctgaccaccctgctggccgtggtggccgccgccagccaggccgaggtggagagcgaggccggctggggcatggtgacccccgacctgctgttcgccgagggcaccgccgcctacgccagaggcgactggcccggcgtggtgctgagcatggagagagccctgagaagcagagccgccctgagagccctgagactgagatgcagaacccagtgcgccgccgacttcccctgggagctggaccccgactggagccccagccccgcccaggccagcggcgccgccgccctgagagacctgagcttcttcggcggcctgctgagaagagccgcctgcctgagaagatgcctgggcccccccgccgcccacagcctgagcgaggagatggagctggagttcagaaagagaagcccctacaactacctgcaggtggcctacttcaagatcaacaagctggagaaggccgtggccgccgcccacaccttcttcgtgggcaaccccgagcacatggagatgcagcagaacctggactactaccagaccatgagcggcgtgaaggaggccgacttcaaggacctggagacccagccccacatgcaggagttcagactgggcgtgagactgtacagcgaggagcagccccaggaggccgtgccccacctggaggccgccctgcaggagtacttcgtggcctacgaggagtgcagagccctgtgcgagggcccctacgactacgacggctacaactacctggagtacaacgccgacctgttccaggccatcaccgaccactacatccaggtgctgaactgcaagcagaactgcgtgaccgagctggccagccaccccagcagagagaagcccttcgaggacttcctgcccagccactacaactacctgcagttcgcctactacaacatcggcaactacacccaggccgtggagtgcgccaagacctacctgctgttcttccccaacgacgaggtgatgaaccagaacctggcctactacgccgccatgctgggcgaggagcacaccagaagcatcggccccagagagagcgccaaggagtacagacagagaagcctgctggagaaggagctgctgttcttcgcctacgacgtgttcggcatccccttcgtggaccccgacagctggacccccgaggaggtgatccccaagagactgcaggagaagcagaagagcgagagagagaccgccgtgagaatcagccaggagatcggcaacctgatgaaggagatcgagaccctggtggaggagaagaccaaggagagcctggacgtgagcagactgaccagagagggcggccccctgctgtacgagggcatcagcctgaccatgaacagcaagctgctgaacggcagccagagagtggtgatggacggcgtgatcagcgaccacgagtgccaggagctgcagagactgaccaacgtggccgccaccagcggcgacggctacagaggccagaccagcccccacacccccaacgagaagttctacggcgtgaccgtgttcaaggccctgaagctgggccaggagggcaaggtgcccctgcagagcgcccacctgtactacaacgtgaccgagaaggtgagaagaatcatggagagctacttcagactggacacccccctgtacttcagctacagccacctggtgtgcagaaccgccatcgaggaggtgcaggccgagagaaaggacgacagccaccccgtgcacgtggacaactgcatcctgaacgccgagaccctggtgtgcgtgaaggagccccccgcctacaccttcagagactacagcgccatcctgtacctgaacggcgacttcgacggcggcaacttctacttcaccgagctggacgccaagaccgtgaccgccgaggtgcagccccagtgcggcagagccgtgggcttcagcagcggcaccgagaacccccacggcgtgaaggccgtgaccagaggccagagatgcgccatcgccctgtggttcaccctggaccccagacacagcgagagagtgagagccgccagagccggcgagagcagctggtgctgcggcgaccccttccccgagagaccctggttcgccttcctgttccccaagagccactgccagtggctgagacacgagagaagcacctgggacaccagcagcaacgccctgagcctgtggagccactgcctggtgctgcccggccccgccgtgaacggcatccaggtgggcaaggaggtgaagaccggcagcgacgccgagttcctggtgcccagcctgggccccaccagcgccgtgctgttccagagagtgggccccgccggcaaggagatgagcctgggccccctgagaaacctgccctgccccctgggcagcagcagctag

SEQ ID NO: 86662 - DNA, 2211 bp, synthetic construct
  misc_feature 1..2211: note = Description of Artificial Sequence: Synthetic coding sequence
  source 1..2211: mol_type = other DNA
atggccgtgagagccctgaagctgctgaccaccctgctggccgtggtggccgccgccagccaggccgaggtggagagcgaggccggctggggcatggtgacccccgacctgctgttcgccgagggcaccgccgcctacgccagaggcgactggcccggcgtggtgctgagcatggagagagccctgagaagcagagccgccctgagagccctgagactgagatgcagaacccagtgcgccgccgacttcccctgggagctggaccccgactggagccccagccccgcccaggccagcggcgccgccgccctgagagacctgagcttcttcggcggcctgctgagaagagccgcctgcctgagaagatgcctgggcccccccgccgcccacagcctgagcgaggagatggagctggagttcagaaagagaagcccctacaactacctgcaggtggcctacttcaagatcaacaagctggagaaggccgtggccgccgcccacaccttcttcgtgggcaaccccgagcacatggagatgcagcagaacctggactactaccagaccatgagcggcgtgaaggaggccgacttcaaggacctggagacccagccccacatgcaggagttcagactgggcgtgagactgtacagcgaggagcagccccaggaggccgtgccccacctggaggccgccctgcaggagtacttcgtggcctacgaggagtgcagagccctgtgcgagggcccctacgactacgacggctacaactacctggagtacaacgccgacctgttccaggccatcaccgaccactacatccaggtgctgaactgcaagcagaactgcgtgaccgagctggccagccaccccagcagagagaagcccttcgaggacttcctgcccagccactacaactacctgcagttcgcctactacaacatcggcaactacacccaggccgtggagtgcgccaagacctacctgctgttcttccccaacgacgaggtgatgaaccagaacctggcctactacgccgccatgctgggcgaggagcacaccagaagcatcggccccagagagagcgccaaggagtacagacagagaagcctgctggagaaggagctgctgttcttcgcctacgacgtgttcggcatccccttcgtggaccccgacagctggacccccgaggaggtgatccccaagagactgcaggagaagcagaagagcgagagagagaccgccgtgagaatcagccaggagatcggcaacctgatgaaggagatcgagaccctggtggaggagaagaccaaggagagcctggacgtgagcagactgaccagagagggcggccccctgctgtacgagggcatcagcctgaccatgaacagcaagctgctgaacggcagccagagagtggtgatggacggcgtgatcagcgaccacgagtgccaggagctgcagagactgaccaacgtggccgccaccagcggcgacggctacagaggccagaccagcccccacacccccaacgagaagttctacggcgtgaccgtgttcaaggccctgaagctgggccaggagggcaaggtgcccctgcagagcgcccacctgtactacaacgtgaccgagaaggtgagaagaatcatggagagctacttcagactggacacccccctgtacttcagctacagccacctggtgtgcagaaccgccatcgaggaggtgcaggccgagagaaaggacgacagccaccccgtgcacgtggacaactgcatcctgaacgccgagaccctggtgtgcgtgaaggagccccccgcctacaccttcagagactacagcgccatcctgtacctgaacggcgacttcgacggcggcaacttctacttcaccgagctggacgccaagaccgtgaccgccgaggtgcagccccagtgcggcagagccgtgggcttcagcagcggcaccgagaacccccacggcgtgaaggccgtgaccagaggccagagatgcgccatcgccctgtggttcaccctggaccccagacacagcgagagagacagagtgcaggccgacgacctggtgaagatgctgttcagccccgaggagatggacctgagccaggagcagcccctggacgcccagcagggcccccccgagcccgcccaggagagcctgagcggcagcgagagcaagcccaaggacgagctgtag

SEQ ID NO: 86663 - DNA, 2094 bp, synthetic construct
  misc_feature 1..2094: note = Description of Artificial Sequence: Synthetic coding sequence
  source 1..2094: mol_type = other DNA
atggccgtgagagccctgaagctgctgaccaccctgctggccgtggtggccgccgccagccaggccgaggtggagagcgaggccggctggggcatggtgacccccgacctgctgttcgccgagggcaccgccgcctacgccagaggcgactggcccggcgtggtgctgagcatggagagagccctgagaagcagagccgccctgagagccctgagactgagatgcagaacccagtgcgccgccgacttcccctgggagctggaccccgactggagccccagccccgcccaggccagcggcgccgccgccctgagagacctgagcttcttcggcggcctgctgagaagagccgcctgcctgagaagatgcctgggcccccccgccgcccacagcctgagcgaggagatggagctggagttcagaaagagaagcccctacaactacctgcaggtggcctacttcaagatcaacaagctggagaaggccgtggccgccgcccacaccttcttcgtgggcaaccccgagcacatggagatgcagcagaacctggactactaccagaccatgagcggcgtgaaggaggccgacttcaaggacctggagacccagccccacatgcaggagttcagactgggcgtgagactgtacagcgaggagcagccccaggaggccgtgccccacctggaggccgccctgcaggagtacttcgtggcctacgaggagtgcagagccctgtgcgagggcccctacgactacgacggctacaactacctggagtacaacgccgacctgttccaggccatcaccgaccactacatccaggtgctgaactgcaagcagaactgcgtgaccgagctggccagccaccccagcagagagaagcccttcgaggacttcctgcccagccactacaactacctgcagttcgcctactacaacatcggcaactacacccaggccgtggagtgcgccaagacctacctgctgttcttccccaacgacgaggtgatgaaccagaacctggcctactacgccgccatgctgggcgaggagcacaccagaagcatcggccccagagagagcgccaaggagtacagacagagaagcctgctggagaaggagctgctgttcttcgcctacgacgtgttcggcatccccttcgtggaccccgacagctggacccccgaggaggtgatccccaagagactgcaggagaagcagaagagcgagagagagaccgccgtgagaatcagccaggagatcggcaacctgatgaaggagatcgagaccctggtggaggagaagaccaaggagagcctggacgtgagcagactgaccagagagggcggccccctgctgtacgagggcatcagcctgaccatgaacagcaagctgctgaacggcagccagagagtggtgatggacggcgtgatcagcgaccacgagtgccaggagctgcagagactgaccaacgtggccgccaccagcggcgacggctacagaggccagaccagcccccacacccccaacgagaagttctacggcgtgaccgtgttcaaggccctgaagctgggccaggagggcaaggtgcccctgcagagcgcccacctgtactacaacgtgaccgagaaggtgagaagaatcatggagagctacttcagactggacacccccctgtacttcagctacagccacctggtgtgcagaaccgccatcgaggaggtgcaggccgagagaaaggacgacagccaccccgtgcacgtggacaactgcatcctgaacgccgagaccctggtgtgcgtgaaggagccccccgcctacaccttcagagactacagcgccatcctgtacctgaacggcgacttcgacggcggcaacttctacttcaccgagctggacgccaagaccgtgaccgccgaggtgcagccccagtgcggcagagccgtgggcttcagcagcggcaccgagaacccccacggcgtgaaggccgtgaccagaggccagagatgcgccatcgccctgtggttcaccctggaccccagacacagcgagagagtgagagccgccagagccggccagggcgccggcagatag

SEQ ID NO: 86664 - DNA, 459 bp, synthetic construct
  misc_feature 1..459: note = Description of Artificial Sequence: Synthetic coding sequence
  source 1..459: mol_type = other DNA
tgagagagagagaccgccgtgagaatcagccaggagatcggcaacctgatgaaggagatcgagaccctggtggaggagaagaccaaggagagcctggacgtgagcagactgaccagagagggcggccccctgctgtacgagggcatcagcctgaccatgaacagcaagctgctgaacggcagccagagagtggtgatggacggcgtgatcagcgaccacgagtgccaggagctgcagagactgaccaacgtggccgccaccagcggcgacggctacagaggccagaccagcccccacacccccaacgagaagttctacggcgtgaccgtgttcaaggccctgaagagaggcgtggtgctggtgagattccacaccgccgacaaggacgtgcccgagaccggccagttcaccaaggagagaggcctgctgggcctgaccgtgccctgcggctggggctag

SEQ ID NO: 86665 - DNA, 1806 bp, synthetic construct
  misc_feature 1..1806: note = Description of Artificial Sequence: Synthetic coding sequence
  source 1..1806: mol_type = other DNA
atggagctggagttcagaaagagaagcccctacaactacctgcaggtggcctacttcaagatcaacaagctggagaaggccgtggccgccgcccacaccttcttcgtgggcaaccccgagcacatggagatgcagcagaacctggactactaccagaccatgagcggcgtgaaggaggccgacttcaaggacctggagacccagccccacatgcaggagttcagactgggcgtgagactgtacagcgaggagcagccccaggaggccgtgccccacctggaggccgccctgcaggagtacttcgtggcctacgaggagtgcagagccctgtgcgagggcccctacgactacgacggctacaactacctggagtacaacgccgacctgttccaggccatcaccgaccactacatccaggtgctgaactgcaagcagaactgcgtgaccgagctggccagccaccccagcagagagaagcccttcgaggacttcctgcccagccactacaactacctgcagttcgcctactacaacatcggcaactacacccaggccgtggagtgcgccaagacctacctgctgttcttccccaacgacgaggtgatgaaccagaacctggcctactacgccgccatgctgggcgaggagcacaccagaagcatcggccccagagagagcgccaaggagtacagacagagaagcctgctggagaaggagctgctgttcttcgcctacgacgtgttcggcatccccttcgtggaccccgacagctggacccccgaggaggtgatccccaagagactgcaggagaagcagaagagcgagagagagaccgccgtgagaatcagccaggagatcggcaacctgatgaaggagatcgagaccctggtggaggagaagaccaaggagagcctggacgtgagcagactgaccagagagggcggccccctgctgtacgagggcatcagcctgaccatgaacagcaagctgctgaacggcagccagagagtggtgatggacggcgtgatcagcgaccacgagtgccaggagctgcagagactgaccaacgtggccgccaccagcggcgacggctacagaggccagaccagcccccacacccccaacgagaagttctacggcgtgaccgtgttcaaggccctgaagctgggccaggagggcaaggtgcccctgcagagcgcccacctgtactacaacgtgaccgagaaggtgagaagaatcatggagagctacttcagactggacacccccctgtacttcagctacagccacctggtgtgcagaaccgccatcgaggaggtgcaggccgagagaaaggacgacagccaccccgtgcacgtggacaactgcatcctgaacgccgagaccctggtgtgcgtgaaggagccccccgcctacaccttcagagactacagcgccatcctgtacctgaacggcgacttcgacggcggcaacttctacttcaccgagctggacgccaagaccgtgaccgccgaggtgcagccccagtgcggcagagccgtgggcttcagcagcggcaccgagaacccccacggcgtgaaggccgtgaccagaggccagagatgcgccatcgccctgtggttcaccctggaccccagacacagcgagagagacagagtgcaggccgacgacctggtgaagatgctgttcagccccgaggagatggacctgagccaggagcagcccctggacgcccagcagggcccccccgagcccgcccaggagagcctgagcggcagcgagagcaagcccaaggacgagctgtag

SEQ ID NO: 86666 - DNA, 2355 bp, synthetic construct
  misc_feature 1..2355: note = Description of Artificial Sequence: Synthetic coding sequence
  source 1..2355: mol_type = other DNA
atgaccagccccgccgccgcccagagcagagagatcgactgcctgagccccgaggcccagaagctggccgaggccagactggccgccaagagagccgccagagccgaggccagagagatcagaatgaaggagctggagagacagcagaaggaggaggacagcgagagatacagcagaagaagcagaagaaacaccagcgccagcgacgaggacgagagaatgagcgtgggcagcagaggcagcctgagagtggaggagagacccgagaaggacttcaccgagaagggcagcagaaacatgcccggcctgagcgccgccaccctggccagcctgggcggcaccagcagcagaagaggcagcggcgacaccagcatcagcatcgacaccgaggccagcatcagagagatcaaggacagcctggccgaggtggaggagaagtacaagaaggccatggtgagcaacgcccagctggacaacgagaagaccaacttcatgtaccaggtggacaccctgaaggacatgctgctggagctggaggagcagctggccgagagcagaagacagtacgaggagaagaacaaggagttcgagagagagaagcacgcccacagcatcctgcagttccagttcgccgaggtgaaggaggccctgaagcagagagaggagatgctggagaagcacggcatcatcctgaacagcgagatcgccaccaacggcgagaccagcgacaccctgaacaacgtgggctaccagggccccaccaagatgaccaaggaggagctgaacgccctgaagagcaccggcgacggcaccctgggcagagccagcgaggtggaggtgaagaacgagatcgtggccaacgtgggcaagagagagatcctgcacaacaccgagaaggagcagcacaccgaggacaccgtgaaggactgcgtggacatcgaggtgttccccgccggcgagaacaccgaggaccagaagagcagcgaggacaccgcccccttcctgggcaccctggccggcgccacctacgaggagcaggtgcagagccagatcctggagagcagcagcctgcccgagaacaccgtgcaggtggagagcaacgaggtgatgggcgcccccgacgacagaaccagaacccccctggagcccagcaactgctggagcgacctggacggcggcaaccacaccgagaacgtgggcgaggccgccgtgacccaggtggaggagcaggccggcaccgtggccagctgccccctgggccacagcgacgacaccgtgtaccacgacgacaagtgcatggtggaggtgccccaggagctggagaccagcaccggccacagcctggagaaggagttcaccaaccaggaggccgccgagcccaaggaggtgcccgcccacagcaccgaggtgggcagagaccacaacgaggaggagggcgaggagaccggcctgagagacgagaagcccatcaagaccgaggtgcccggcagccccgccggcaccgagggcaactgccaggaggccaccggccccagcaccgtggacacccagaacgagcccctggacatgaaggagcccgacgaggagaagagcgaccagcagggcgaggccctggacagcagccagaagaagaccaagaacaagaagaagaagaacaagaagaagaagagccccgtgcccgtggagaccctgaaggacgtgaagaaggagctgacctaccagaacaccgacctgagcgagatcaaggaggaggagcaggtgaagagcaccgacagaaagagcgccgtggaggcccagaacgaggtgaccgagaaccccaagcagaagatcgccgccgagagcagcgagaacgtggactgccccgagaaccccaagatcaagctggacggcaagctggaccaggagggcgacgacgtgcagaccgccgccgaggaggtgctggccgacggcgacaccctggacttcgaggacgacaccgtgcagagcagcggccccagagccggcggcgaggagctggacgagggcgtggccaaggacaacgccaagatcgacggcgccacccagagcagccccgccgagcccaagagcgaggacgccgacagatgcaccctgcccgagcacgagagccccagccaggacatcagcgacgcctgcgaggccgagagcaccgagagatgcgagatgagcgagcaccccagccagaccgtgagaaaggccctggacagcaacagcctggagaacgacgacctgagcgcccccggcagagagcccggccacttcaaccccgagagcagagaggacaccagaggcggcaacgagaagggcaagagcaaggaggactgcaccatgagctag

SEQ ID NO: 86667 - DNA, 2259 bp, synthetic construct
  misc_feature 1..2259: note = Description of Artificial Sequence: Synthetic coding sequence
  source 1..2259: mol_type = other DNA
atgaccagccccgccgccgcccagagcagagagatcgactgcctgagccccgaggcccagaagctggccgaggccagactggccgccaagagagccgccagagccgaggccagagagatcagaatgaaggagctggagagacagcagaaggaggtggaggagagacccgagaaggacttcaccgagaagggcagcagaaacatgcccggcctgagcgccgccaccctggccagcctgggcggcaccagcagcagaagaggcagcggcgacaccagcatcagcatcgacaccgaggccagcatcagagagatcaaggacagcctggccgaggtggaggagaagtacaagaaggccatggtgagcaacgcccagctggacaacgagaagaccaacttcatgtaccaggtggacaccctgaaggacatgctgctggagctggaggagcagctggccgagagcagaagacagtacgaggagaagaacaaggagttcgagagagagaagcacgcccacagcatcctgcagttccagttcgccgaggtgaaggaggccctgaagcagagagaggagatgctggagaagcacggcatcatcctgaacagcgagatcgccaccaacggcgagaccagcgacaccctgaacaacgtgggctaccagggccccaccaagatgaccaaggaggagctgaacgccctgaagagcaccggcgacggcaccctgggcagagccagcgaggtggaggtgaagaacgagatcgtggccaacgtgggcaagagagagatcctgcacaacaccgagaaggagcagcacaccgaggacaccgtgaaggactgcgtggacatcgaggtgttccccgccggcgagaacaccgaggaccagaagagcagcgaggacaccgcccccttcctgggcaccctggccggcgccacctacgaggagcaggtgcagagccagatcctggagagcagcagcctgcccgagaacaccgtgcaggtggagagcaacgaggtgatgggcgcccccgacgacagaaccagaacccccctggagcccagcaactgctggagcgacctggacggcggcaaccacaccgagaacgtgggcgaggccgccgtgacccaggtggaggagcaggccggcaccgtggccagctgccccctgggccacagcgacgacaccgtgtaccacgacgacaagtgcatggtggaggtgccccaggagctggagaccagcaccggccacagcctggagaaggagttcaccaaccaggaggccgccgagcccaaggaggtgcccgcccacagcaccgaggtgggcagagaccacaacgaggaggagggcgaggagaccggcctgagagacgagaagcccatcaagaccgaggtgcccggcagccccgccggcaccgagggcaactgccaggaggccaccggccccagcaccgtggacacccagaacgagcccctggacatgaaggagcccgacgaggagaagagcgaccagcagggcgaggccctggacagcagccagaagaagaccaagaacaagaagaagaagaacaagaagaagaagagccccgtgcccgtggagaccctgaaggacgtgaagaaggagctgacctaccagaacaccgacctgagcgagatcaaggaggaggagcaggtgaagagcaccgacagaaagagcgccgtggaggcccagaacgaggtgaccgagaaccccaagcagaagatcgccgccgagagcagcgagaacgtggactgccccgagaaccccaagatcaagctggacggcaagctggaccaggagggcgacgacgtgcagaccgccgccgaggaggtgctggccgacggcgacaccctggacttcgaggacgacaccgtgcagagcagcggccccagagccggcggcgaggagctggacgagggcgtggccaaggacaacgccaagatcgacggcgccacccagagcagccccgccgagcccaagagcgaggacgccgacagatgcaccctgcccgagcacgagagccccagccaggacatcagcgacgcctgcgaggccgagagcaccgagagatgcgagatgagcgagcaccccagccagaccgtgagaaaggccctggacagcaacagcctggagaacgacgacctgagcgcccccggcagagagcccggccacttcaaccccgagagcagagaggacaccagaggcggcaacgagaagggcaagagcaaggaggactgcaccatgagctag

SEQ ID NO: 86668 - DNA, 1893 bp, synthetic construct
  misc_feature 1..1893: note = Description of Artificial Sequence: Synthetic coding sequence
  source 1..1893: mol_type = other DNA
atgaccagccccgccgccgcccagagcagagagatcgactgcctgagccccgaggcccagaagctggccgaggccagactggccgccaagagagccgccagagccgaggccagagagatcagaatgaaggagctggagagacagcagaaggaggtgaccagcgcccaggagaagtactacggcctggacaccaagtggggcgacatcgagcagtggatggaggacagcgagagatacagcagaagaagcagaagaaacaccagcgccagcgacgaggacgagagaatgagcgtgggcagcagaggcagcctgagaagccagcccgacctggagtacggcggcccctacgcctggaccaacggctacgacggcgagctgtacggcagccagagcctgaacagaagaagcggcagacccagctgcctgtacagcgccgccagacccagcggcagctacagagccagcgtgctggacgagggcagcttcggcggcaccagaagaggcagcaccagcggcagcagagcccccagcgagtacagcggccacctgaacagcagcagcagagccagcagcagagccagcagcgccagagccagccccgtggtggaggagagacccgagaaggacttcaccgagaagggcagcagaaacatgcccggcctgagcgccgccaccctggccagcctgggcggcaccagcagcagaagaggcagcggcgacaccagcatcagcatcgacaccgaggccagcatcagagagatcaaggagctgaacgagctgaaggaccagatccaggacgtggagggcaagtacatgcagggcctgaaggagatgaaggacagcctggccgaggtggaggagaagtacaagaaggccatggtgagcaacgcccagctggacaacgagaagaccaacttcatgtaccaggtggacaccctgaaggacatgctgctggagctggaggagcagctggccgagagcagaagacagtacgaggagaagaacaaggagttcgagagagagaagcacgcccacagcatcctgcagttccagttcgccgaggtgaaggaggccctgaagcagagagaggagatgctggaggagatcagacagctgcagcagaagcaggccagcagcatcagagagatcagcgacctgcaggagaccatcgagtggaaggacaagaagatcggcgccctggagagacagaaggagttcttcgacagcgtgagaagcgagagagacgacctgagagaggaggtggtgatgctgaaggaggagctgaagaagcacggcatcatcctgaacagcgagatcgccaccaacggcgagaccagcgacaccctgaacaacgtgggctaccagggccccaccaagatgaccaaggaggagctgaacgccctgaagagcaccggcgacggcaccctggacatcagactgaagaagctggtggacgagagagagtgcctgctggagcagatcaagaagctgaagggccagctggaggagagacagaagatcggcaagctggacaacctgagaagcgaggacgacgtgctggagaacggcaccgacatgcacgtgatggacctgcagagagacgccaacagacagatcagcgacctgaagttcaagctggccaagagcgagcaggagatcaccgccctggagcagaacgtgatcagactggagagccaggtgagcagatacaagagcgccgccgagaacgccgagaagatcgaggacgagctgaaggccgagaagagaaagctgcagagagagctgagaagcgccctggacaagaccgaggagctggaggtgagcaacggccacctggtgaagagactggagaagatgaaggccaacagaagcgccctgctgagccagcagtag

SEQ ID NO: 86669 - DNA, 2427 bp, synthetic construct
  misc_feature 1..2427: note = Description of Artificial Sequence: Synthetic coding sequence
  source 1..2427: mol_type = other DNA
atgaccagccccgccgccgcccagagcagagagatcgactgcctgagccccgaggcccagaagctggccgaggccagactggccgccaagagagccgccagagccgaggccagagagatcagaatgaaggagctggagagacagcagaaggaggaggacagcgagagatacagcagaagaagcagaagaaacaccagcgccagcgacgaggacgagagaatgagcgtgggcagcagaggcagcctgagagtggaggagagacccgagaaggacttcaccgagaagggcagcagaaacatgcccggcctgagcgccgccaccctggccagcctgggcggcaccagcagcagaagaggcagcggcgacaccagcatcagcatcgacaccgaggccagcatcagagagatcaaggagctgaacgagctgaaggaccagatccaggacgtggagggcaagtacatgcagggcctgaaggagatgaaggacagcctggccgaggtggaggagaagtacaagaaggccatggtgagcaacgcccagctggacaacgagaagaccaacttcatgtaccaggtggacaccctgaaggacatgctgctggagctggaggagcagctggccgagagcagaagacagtacgaggagaagaacaaggagttcgagagagagaagcacgcccacagcatcctgcagttccagttcgccgaggtgaaggaggccctgaagcagagagaggagatgctggagaagcacggcatcatcctgaacagcgagatcgccaccaacggcgagaccagcgacaccctgaacaacgtgggctaccagggccccaccaagatgaccaaggaggagctgaacgccctgaagagcaccggcgacggcaccctgggcagagccagcgaggtggaggtgaagaacgagatcgtggccaacgtgggcaagagagagatcctgcacaacaccgagaaggagcagcacaccgaggacaccgtgaaggactgcgtggacatcgaggtgttccccgccggcgagaacaccgaggaccagaagagcagcgaggacaccgcccccttcctgggcaccctggccggcgccacctacgaggagcaggtgcagagccagatcctggagagcagcagcctgcccgagaacaccgtgcaggtggagagcaacgaggtgatgggcgcccccgacgacagaaccagaacccccctggagcccagcaactgctggagcgacctggacggcggcaaccacaccgagaacgtgggcgaggccgccgtgacccaggtggaggagcaggccggcaccgtggccagctgccccctgggccacagcgacgacaccgtgtaccacgacgacaagtgcatggtggaggtgccccaggagctggagaccagcaccggccacagcctggagaaggagttcaccaaccaggaggccgccgagcccaaggaggtgcccgcccacagcaccgaggtgggcagagaccacaacgaggaggagggcgaggagaccggcctgagagacgagaagcccatcaagaccgaggtgcccggcagccccgccggcaccgagggcaactgccaggaggccaccggccccagcaccgtggacacccagaacgagcccctggacatgaaggagcccgacgaggagaagagcgaccagcagggcgaggccctggacagcagccagaagaagaccaagaacaagaagaagaagaacaagaagaagaagagccccgtgcccgtggagaccctgaaggacgtgaagaaggagctgacctaccagaacaccgacctgagcgagatcaaggaggaggagcaggtgaagagcaccgacagaaagagcgccgtggaggcccagaacgaggtgaccgagaaccccaagcagaagatcgccgccgagagcagcgagaacgtggactgccccgagaaccccaagatcaagctggacggcaagctggaccaggagggcgacgacgtgcagaccgccgccgaggaggtgctggccgacggcgacaccctggacttcgaggacgacaccgtgcagagcagcggccccagagccggcggcgaggagctggacgagggcgtggccaaggacaacgccaagatcgacggcgccacccagagcagccccgccgagcccaagagcgaggacgccgacagatgcaccctgcccgagcacgagagccccagccaggacatcagcgacgcctgcgaggccgagagcaccgagagatgcgagatgagcgagcaccccagccagaccgtgagaaaggccctggacagcaacagcctggagaacgacgacctgagcgcccccggcagagagcccggccacttcaaccccgagagcagagaggacaccagaggcggcaacgagaagggcaagagcaaggaggactgcaccatgagctag

SEQ ID NO: 86670 - DNA, 1923 bp, synthetic construct
  misc_feature 1..1923: note = Description of Artificial Sequence: Synthetic coding sequence
  source 1..1923: mol_type = other DNA
atggacatgggcacccagggcagcggcagaaagagactgcccaacagagagagactgaccgccgaggacgacgccctgaaccagatcgccagagaggccgaggccagactggccgccaagagagccgccagagccgaggccagagagatcagaatgaaggagctggagagacagcagaaggagatctaccaggtgcagaagaagtactacggcctggacaccaagtggggcgacatcgagcagtggatggaggacagcgagagatacagcagaagaagcagaagaaacaccagcgccagcgacgaggacgagagaatgagcgtgggcagcagaggcagcctgagaagccagcccgacctggagtacggcggcccctacgcctggaccaacggctacgacggcgagctgtacggcagccagagcctgaacagaagaagcggcagacccagctgcctgtacagcgccgccagacccagcggcagctacagagccagcgtgctggacgagggcagcttcggcggcaccagaagaggcagcaccagcggcagcagagcccccagcgagtacagcggccacctgaacagcagcagcagagccagcagcagagccagcagcgccagagccagccccgtggtggaggagagacccgagaaggacttcaccgagaagggcagcagaaacatgcccggcctgagcgccgccaccctggccagcctgggcggcaccagcagcagaagaggcagcggcgacaccagcatcagcatcgacaccgaggccagcatcagagagatcaaggagctgaacgagctgaaggaccagatccaggacgtggagggcaagtacatgcagggcctgaaggagatgaaggacagcctggccgaggtggaggagaagtacaagaaggccatggtgagcaacgcccagctggacaacgagaagaccaacttcatgtaccaggtggacaccctgaaggacatgctgctggagctggaggagcagctggccgagagcagaagacagtacgaggagaagaacaaggagttcgagagagagaagcacgcccacagcatcctgcagttccagttcgccgaggtgaaggaggccctgaagcagagagaggagatgctggaggagatcagacagctgcagcagaagcaggccagcagcatcagagagatcagcgacctgcaggagaccatcgagtggaaggacaagaagatcggcgccctggagagacagaaggagttcttcgacagcgtgagaagcgagagagacgacctgagagaggaggtggtgatgctgaaggaggagctgaagaagcacggcatcatcctgaacagcgagatcgccaccaacggcgagaccagcgacaccctgaacaacgtgggctaccagggccccaccaagatgaccaaggaggagctgaacgccctgaagagcaccggcgacggcaccctggacatcagactgaagaagctggtggacgagagagagtgcctgctggagcagatcaagaagctgaagggccagctggaggagagacagaagatcggcaagctggacaacctgagaagcgaggacgacgtgctggagaacggcaccgacatgcacgtgatggacctgcagagagacgccaacagacagatcagcgacctgaagttcaagctggccaagagcgagcaggagatcaccgccctggagcagaacgtgatcagactggagagccaggtgagcagatacaagagcgccgccgagaacgccgagaagatcgaggacgagctgaaggccgagaagagaaagctgcagagagagctgagaagcgccctggacaagaccgaggagctggaggtgagcaacggccacctggtgaagagactggagaagatgaaggccaacagaagcgccctgctgagccagcagtag

SEQ ID NO: 86671 - DNA, 2166 bp, synthetic construct
  misc_feature 1..2166: note = Description of Artificial Sequence: Synthetic coding sequence
  source 1..2166: mol_type = other DNA
atgggcacccccgccagcggcagaaagagaacccccgtgaaggacagattcagcgccgaggacgaggccctgagcaacatcgccagagaggccgaggccagactggccgccaagagagccgccagagccgaggccagagacatcagaatgagagagctggagagacagcagaaggagtacagcctgcacagcttcgacagaaagtggggccagatccagaagtggctggaggacagcgagagagccagatacagccacagaagcagccaccacagaccctacctgggcgtggaggacgccctgagcatcagaagcgtgggcagccacagatacgacatgttcaaggacagaagcagcagactgagcagcctgaaccacagctacagccacagccacggcatgaagaagagaagcagcgacagccacaaggacctgctgagcggcctgtacttcgaccagagaaactacagcagcctgagacacagcaagcccaccagcgcctactacaccagacagagcagcagcctgtacagcgaccccctggccacctacaagagcgacagagccagccccaccgccaacagcggcctgctgagaagcgccagcctggccagcctgtacaacggcggcctgtacaacccctacggccccagaacccccagcgagtgcagctactacagcagcagaatcagcagcgccagaagcagccccggcttcaccaacgacgacaccgccagcatcgtgagcagcgacagagccagcagaggcagaagagagagcgtggtgagcgccgccgactacttcagcagaagcaacagaagaggcagcgtggtgagcgaggtggacgacatcagcatccccgacctgagcagcctggacgagaagagcgacaagcagtacgccgagaactacaccagacccagcagcagaaacagcgccagcgccaccacccccctgagcggcaacagcagcagaagaggcagcggcgacaccagcagcctgatcgaccccgacaccagcctgagcgagctgagagacatctacgacctgaaggaccagatccaggacgtggagggcagatacatgcagggcctgaaggagctgaaggagagcctgagcgaggtggaggagaagtacaagaaggccatggtgagcaacgcccagctggacaacgagaagaacaacctgatctaccaggtggacaccctgaaggacgtgatcgaggagcaggaggagcagatggccgagttctacagagagaacgaggagaagagcaaggagctggagagacagaagcacatgtgcagcgtgctgcagcacaagatggaggagctgaaggagggcctgagacagagagacgagctgatcgaggagaagcagagaatgcagcagaagatcgacaccatgaccaaggaggtgttcgacctgcaggagaccctgctgtggaaggacaagaagatcggcgccctggagaagcagaaggagtacatcgcctgcctgagaaacgagagagacatgctgagagaggagctggccgacctgcaggagaccgtgaagaccggcgagaagcacggcctggtgatcatccccgacggcacccccaacggcgacgtgagccacgagcccgtggccggcgccatcaccgtggtgagccaggaggccgcccaggtgctggagagcgccggcgagggccccctggacgtgagactgagaaagctggccggcgagaaggaggagctgctgagccagatcagaaagctgaagctgcagctggaggaggagagacagaagtgcagcagaaacgacggcaccgtgggcgacctggccggcctgcagaacggcagcgacctgcagttcatcgagatgcagagagacgccaacagacagatcagcgagtacaagttcaagctgagcaaggccgagcaggacatcaccaccctggagcagagcatcagcagactggagggccaggtgctgagatacaagaccgccgccgagaacgccgagaaggtggaggacgagctgaaggccgagaagagaaagctgcagagagagctgagaaccgccctggacaagatcgaggagatggagatgaccaacagccacctggccaagagactggagaagatgaaggccaacagaaccgccctgctggcccagcagtag

SEQ ID NO: 86672 - DNA, 1203 bp, synthetic construct
  misc_feature 1..1203: note = Description of Artificial Sequence: Synthetic coding sequence
  source 1..1203: mol_type = other DNA
atgggcacccccgccagcggcagaaagagaacccccgtgaaggacagattcagcgccgaggacgaggccctgagcaacatcgccagagaggccgaggccagactggccgccaagagagccgccagagccgaggccagagacatcagaatgagagagctggagagacagcagaaggagctggacgagaagagcgacaagcagtacgccgagaactacaccagacccagcagcagaaacagcgccagcgccaccacccccctgagcggcaacagcagcagaagaggcagcggcgacaccagcagcctgatcgaccccgacaccagcctgagcgagctgagagagagcctgagcgaggtggaggagaagtacaagaaggccatggtgagcaacgcccagctggacaacgagaagaacaacctgatctaccaggtggacaccctgaaggacgtgatcgaggagcaggaggagcagatggccgagttctacagagagaacgaggagaagagcaaggagctggagagacagaagcacatgtgcagcgtgctgcagcacaagatggaggagctgaaggagggcctgagacagagagacgagctgatcgagaagcacggcctggtgatcatccccgacggcacccccaacggcgacgtgagccacgagcccgtggccggcgccatcaccgtggtgagccaggaggccgcccaggtgctggagagcgccggcgagggccccctggacgtgagactgagaaagctggccggcgagaaggaggagctgctgagccagatcagaaagctgaagctgcagctggaggaggagagacagaagtgcagcagaaacgacggcaccgtgggcgacctggccggcctgcagaacggcagcgacctgcagttcatcgagatgcagagagacgccaacagacagatcagcgagtacaagttcaagctgagcaaggccgagcaggacatcaccaccctggagcagagcatcagcagactggagggccaggtgctgagatacaagaccgccgccgagaacgccgagaaggtggaggacgagctgaaggccgagaagagaaagctgcagagagagctgagaaccgccctggacaagatcgaggagatggagatgaccaacagccacctggccaagagactggagaagatgaaggccaacagaaccgccctgctggcccagcagtag

SEQ ID NO: 86673 - DNA, 2166 bp, synthetic construct; identical to SEQ ID NO: 86671
  misc_feature 1..2166: note = Description of Artificial Sequence: Synthetic coding sequence
  source 1..2166: mol_type = other DNA

SEQ ID NO: 86674 - DNA, 180 bp, synthetic construct
  misc_feature 1..180: note = Description of Artificial Sequence: Synthetic coding sequence
  source 1..180: mol_type = other DNA
atgggcacccccgccagcggcagaaagagaacccccgtgaaggacagattcagcgccgaggacgaggccctgagcaacatcgccagagaggccgaggccagactggccgccaagagagccgccagagccgaggccagagacatcagaatgagagagctggagagacagcagaaggagtag

SEQ ID NO: 86675 - DNA, 180 bp, synthetic construct; identical to SEQ ID NO: 86674
  misc_feature 1..180: note = Description of Artificial Sequence: Synthetic coding sequence
  source 1..180: mol_type = other DNA

SEQ ID NO: 86676 - DNA, 180 bp, synthetic construct; identical to SEQ ID NO: 86674
  misc_feature 1..180: note = Description of Artificial Sequence: Synthetic coding sequence
  source 1..180: mol_type = other DNA

SEQ ID NO: 86677 - DNA, 1275 bp, synthetic construct
  misc_feature 1..1275: note = Description of Artificial Sequence: Synthetic coding sequence
  source 1..1275: mol_type = other DNA
atgggcacccccgccagcggcagaaagagaacccccgtgaaggacagattcagcgccgaggacgaggccctgagcaacatcgccagagaggccgaggccagactggccgccaagagagccgccagagccgaggccagagacatcagaatgagagagctggagagacagcagaaggagctggacgagaagagcgacaagcagtacgccgagaactacaccagacccagcagcagaaacagcgccagcgccaccacccccctgagcggcaacagcagcagaagaggcagcggcgacaccagcagcctgatcgaccccgacaccagcctgagcgagctgagagacatctacgacctgaaggaccagatccaggacgtggagggcagatacatgcagggcctgaaggagctgaaggagagcctgagcgaggtggaggagaagtacaagaaggccatggtgagcaacgcccagctggacaacgagaagaacaacctgatctaccaggtggacaccctgaaggacgtgatcgaggagcaggaggagcagatggccgagttctacagagagaacgaggagaagagcaaggagctggagagacagaagcacatgtgcagcgtgctgcagcacaagatggaggagctgaaggagggcctgagacagagagacgagctgatcgagaagcacggcctggtgatcatccccgacggcacccccaacggcgacgtgagccacgagcccgtggccggcgccatcaccgtggtgagccaggaggccgcccaggtgctggagagcgccggcgagggccccctggacgtgagactgagaaagctggccggcgagaaggaggagctgctgagccagatcagaaagctgaagctgcagctggaggaggagagacagaagtgcagcagaaacgacggcaccgtgggcgacctggccggcctgcagaacggcagcgacctgcagttcatcgagatgcagagagacgccaacagacagatcagcgagtacaagttcaagctgagcaaggccgagcaggacatcaccaccctggagcagagcatcagcagactggagggccaggtgctgagatacaagaccgccgccgagaacgccgagaaggtggaggacgagctgaaggccgagaagagaaagctgcagagagagctgagaaccgccctggacaagatcgaggagatggagatgaccaacagccacctggccaagagactggagaagatgaaggccaacagaaccgccctgctggcccagcagtag

SEQ ID NO: 86678 - DNA, 2316 bp, synthetic construct
  misc_feature 1..2316: note = Description of Artificial Sequence: Synthetic coding sequence
  source 1..2316: mol_type = other DNA
atggcccccggccccttcagcagcgccctgctgagccccccccccgccgccctgcccttcctgctgctgctgtgggccggcgccagcagaggccagccctgccccggcagatgcatctgccagaacgtggcccccaccctgaccatgctgtgcgccaagaccggcctgctgttcgtgccccccgccatcgacagaagagtggtggagctgagactgaccgacaacttcatcgccgccgtgagaagaagagacttcgccaacatgaccagcctggtgcacctgaccctgagcagaaacaccatcggccaggtggccgccggcgccttcgccgacctgagagccctgagagccctgcacctggacagcaacagactggccgaggtgagaggcgaccagctgagaggcctgggcaacctgagacacctgatcctgggcaacaaccagatcagaagagtggagagcgccgccttcgacgccttcctgagcaccgtggaggacctggacctgagctacaacaacctggaggccctgccctgggaggccgtgggccagatggtgaacctgaacaccctgaccctggaccacaacctgatcgaccacatcgccgagggcaccttcgtgcagctgcacaagctggtgagactggacatgaccagcaacagactgcacaagctgccccccgacggcctgttcctgagaagccagggcaccggccccaagccccccacccccctgaccgtgagcttcggcggcaaccccctgcactgcaactgcgagctgctgtggctgagaagactgaccagagaggacgacctggagacctgcgccacccccgagcacctgaccgacagatacttctggagcatccccgaggaggagttcctgtgcgagccccccctgatcaccagacaggccggcggcagagccctggtggtggagggccaggccgtgagcctgagatgcagagccgtgggcgaccccgagcccgtggtgcactgggtggcccccgacggcagactgctgggcaacagcagcagaaccagagtgagaggcgacggcaccctggacgtgaccatcaccaccctgagagacagcggcaccttcacctgcatcgccagcaacgccgccggcgaggccaccgcccccgtggaggtgtgcgtggtgcccctgcccctgatggcccccccccccgccgcccccccccccctgaccgagcccggcagcagcgacatcgccacccccggcagacccggcgccaacgacagcgccgccgagagaagactggtggccgccgagctgaccagcaacagcgtgctgatcagatggcccgcccagagacccgtgcccggcatcagaatgtaccaggtgcagtacaacagcagcgtggacgacagcctggtgtacagaatgatccccagcaccagccagaccttcctggtgaacgacctggccgccggcagagcctacgacctgtgcgtgctggccgtgtacgacgacggcgccaccgccctgcccgccaccagagtggtgggctgcgtgcagttcaccaccgccggcgaccccgccccctgcagacccctgagagcccacttcctgggcggcaccatgatcatcgccatcggcggcgtgatcgtggccagcgtgctggtgttcatcgtgctgctgatgatcagatacaaggtgtacggcgacggcgacagcagaagagtgaagggcagcagaagcctgcccagagtgagccacgtgtgcagccagaccaacggcgccggcaccggcgccgcccaggcccccgccctgcccgcccaggaccactacgaggccctgagagaggtggagagccaggccgcccccgccgtggccgtggaggccaaggccatggaggccgagaccgccagcgccgagcccgaggtggtgctgggcagaagcctgggcggcagcgccaccagcctgtgcctgctgcccagcgaggagaccagcggcgaggagagcagagccgccgtgggccccagaagaagcagaagcggcgccctggagccccccaccagcgccccccccaccctggccctggtgcccggcggcgccgccgccagacccagaccccagcagagatacagcttcgacggcgactacggcgccctgttccagagccacagctaccccagaagagccagaagaaccaagagacacagaagcaccccccacctggacggcgccggcggcggcgccgccggcgaggacggcgacctgggcctgggcagcgccagagcctgcctggccttcaccagcaccgagtggatgctggagagcaccgtgtag

SEQ ID NO: 86679 - DNA, 2370 bp, synthetic construct
  misc_feature 1..2370: note = Description of Artificial Sequence: Synthetic coding sequence
  source 1..2370: mol_type = other DNA
atggagaccctgctgggcggcctgctggccttcggcatggccttcgccgtggtggacgcctgccccaagtactgcgtgtgccagaacctgagcgagagcctgggcaccctgtgccccagcaagggcctgctgttcgtgccccccgacatcgacagaagaaccgtggagctgagactgggcggcaacttcatcatccacatcagcagacaggacttcgccaacatgaccggcctggtggacctgaccctgagcagaaacaccatcagccacatccagcccttcagcttcctggacctggagagcctgagaagcctgcacctggacagcaacagactgcccagcctgggcgaggacaccctgagaggcctggtgaacctgcagcacctgatcgtgaacaacaaccagctgggcggcatcgccgacgaggccttcgaggacttcctgctgaccctggaggacctggacctgagctacaacaacctgcacggcctgccctgggacagcgtgagaagaatggtgaacctgcaccagctgagcctggaccacaacctgctggaccacatcgccgagggcaccttcgccgacctgcagaagctggccagactggacctgaccagcaacagactgcagaagctgccccccgaccccatcttcgccagaagccaggccagcgccctgaccgccacccccttcgccccccccctgagcttcagcttcggcggcaaccccctgcactgcaactgcgagctgctgtggctgagaagactggagagagacgacgacctggagacctgcggcagccccggcggcctgaagggcagatacttctggcacgtgagagaggaggagttcgtgtgcgagccccccctgatcacccagcacacccacaagctgctggtgctggagggccaggccgccaccctgaagtgcaaggccatcggcgaccccagccccctgatccactgggtggcccccgacgacagactggtgggcaacagcagcagaaccgccgtgtacgacaacggcaccctggacatcttcatcaccaccagccaggacagcggcgccttcacctgcatcgccgccaacgccgccggcgaggccaccgccatggtggaggtgagcatcgtgcagctgccccacctgagcaacagcaccagcagaaccgccccccccaagagcagactgagcgacatcaccggcagcagcaagaccagcagaggcggcggcggcagcggcggcggcgagccccccaagagcccccccgagagagccgtgctggtgagcgaggtgaccaccaccagcgccctggtgaagtggagcgtgagcaagagcgcccccagagtgaagatgtaccagctgcagtacaactgcagcgacgacgaggtgctgatctacagaatgatccccgccagcaacaaggccttcgtggtgaacaacctggtgagcggcaccggctacgacctgtgcgtgctggccatgtgggacgacaccgccaccaccctgaccgccaccaacatcgtgggctgcgcccagttcttcaccaaggccgactacccccagtgccagagcatgcacagccagatcctgggcggcaccatgatcctggtgatcggcggcatcatcgtggccaccctgctggtgttcatcgtgatcctgatggtgagatacaaggtgtgcaaccacgaggcccccagcaagatggccgccgccgtgagcaacgtgtacagccagaccaacggcgcccagccccccccccccagcagcgcccccgccggcgcccccccccagggcccccccaaggtggtggtgagaaacgagctgctggacttcaccgccagcctggccagagccagcgacagcagcagcagcagcagcctgggcagcggcgaggccgccggcctgggcagagccccctggagaatcccccccagcgcccccagacccaagcccagcctggacagactgatgggcgccttcgccagcctggacctgaagagccagagaaaggaggagctgctggacagcagaacccccgccggcagaggcgccggcaccagcgccagaggccaccacagcgacagagagcccctgctgggcccccccgccgccagagccagaagcctgctgcccctgcccctggagggcaaggccaagagaagccacagcttcgacatgggcgacttcgccgccgccgccgccggcggcgtggtgcccggcggctacagcccccccagaaaggtgagcaacatctggaccaagagaagcctgagcgtgaacggcatgctgctgcccttcgaggagagcgacctggtgggcgccagaggcaccttcggcagcagcgagtgggtgatggagagcaccgtgtag

SEQ ID NO: 86680 - DNA, 1887 bp, synthetic construct
  misc_feature 1..1887: note = Description of Artificial Sequence: Synthetic coding sequence
  source 1..1887: mol_type = other DNA
atggccatcctgcccctgctgctgtgcctgctgcccctggcccccgccagcagccccccccagagcgccacccccagcccctgccccagaagatgcagatgccagacccagagcctgcccctgagcgtgctgtgccccggcgccggcctgctgttcgtgccccccagcctggacagaagagccgccgagctgagactggccgacaacttcatcgccagcgtgagaagaagagacctggccaacatgaccggcctgctgcacctgagcctgagcagaaacaccatcagacacgtggccgccggcgccttcgccgacctgagagccctgagagccctgcacctggacggcaacagactgaccagcctgggcgagggccagctgagaggcctggtgaacctgagacacctgatcctgagcaacaaccagctggccgccctggccgccggcgccctggacgactgcgccgagaccctggaggacctggacctgagctacaacaacctggagcagctgccctgggaggccctgggcagactgggcaacgtgaacaccctgggcctggaccacaacctgctggccagcgtgcccgccggcgccttcagcagactgcacaagctggccagactggacatgaccagcaacagactgaccaccatcccccccgaccccctgttcagcagactgcccctgctggccagacccagaggcagccccgccagcgccctggtgctggccttcggcggcaaccccctgcactgcaactgcgagctggtgtggctgagaagactggccagagaggacgacctggaggcctgcgccagcccccccgccctgggcggcagatacttctgggccgtgggcgaggaggagttcgtgtgcgagccccccgtggtgacccacagaagcccccccctggccgtgcccgccggcagacccgccgccctgagatgcagagccgtgggcgaccccgagcccagagtgagatgggtgagcccccagggcagactgctgggcaacagcagcagagccagagccttccccaacggcaccctggagctgctggtgaccgagcccggcgacggcggcatcttcacctgcatcgccgccaacgccgccggcgaggccaccgccgccgtggagctgaccgtgggcccccccccccccccccagctggccaacagcaccagctgcgacccccccagagacggcgaccccgacgccctgaccccccccagcgccgccagcgccagcgccaaggtggccgacaccggcccccccaccgacagaggcgtgcaggtgaccgagcacggcgccaccgccgccctggtgcagtggcccgaccagagacccatccccggcatcagaatgtaccagatccagtacaacagcagcgccgacgacatcctggtgtacagaatgatccccgccgagagcagaagcttcctgctgaccgacctggccagcggcagaacctacgacctgtgcgtgctggccgtgtacgaggacagcgccaccggcctgaccgccaccagacccgtgggctgcgccagattcagcaccgagcccgccctgagaccctgcggcgccccccacgcccccttcctgggcggcaccatgatcatcgccctgggcggcgtgatcgtggccagcgtgctggtgttcatcttcgtgctgctgatgagatacaaggtgcacggcggccagccccccggcaaggccaagatccccgcccccgtgagcagcgtgtgcagccagaccaacggcgccctgggccccacccccacccccgccccccccgcccccgagcccgccgccctgagagcccacaccgtggtgcagctggactgcgagccctggggccccggccacgagcccgtgggcccctag

SEQ ID NO: 86681 - DNA, 1887 bp, synthetic construct; identical to SEQ ID NO: 86680
  misc_feature 1..1887: note = Description of Artificial Sequence: Synthetic coding sequence
  source 1..1887: mol_type = other DNA

SEQ ID NO: 86682 - DNA, 1908 bp, synthetic construct
  misc_feature 1..1908: note = Description of Artificial Sequence: Synthetic coding sequence
  source 1..1908: mol_type = other DNA
atggccccccccctgctgctgctgctgctggccagcggcgccgccgcctgccccctgccctgcgtgtgccagaacctgagcgagagcctgagcaccctgtgcgcccacagaggcctgctgttcgtgccccccaacgtggacagaagaaccgtggagctgagactggccgacaacttcatccaggccctgggcccccccgacttcagaaacatgaccggcctggtggacctgaccctgagcagaaacgccatcaccagaatcggcgccagagccttcggcgacctggagagcctgagaagcctgcacctggacggcaacagactggtggagctgggcaccggcagcctgagaggccccgtgaacctgcagcacctgatcctgagcggcaaccagctgggcagaatcgcccccggcgccttcgacgacttcctggagagcctggaggacctggacctgagctacaacaacctgagacaggtgccctgggccggcatcggcgccatgcccgccctgcacaccctgaacctggaccacaacctgatcgacgccctgccccccggcgccttcgcccagctgggccagctgagcagactggacctgaccagcaacagactggccaccctggcccccgaccccctgttcagcagaggcagagacgccgaggccagccccgcccccctggtgctgagcttcagcggcaaccccctgcactgcaactgcgagctgctgtggctgagaagactggccagacccgacgacctggagacctgcgccagcccccccggcctggccggcagatacttctgggccgtgcccgagggcgagttcagctgcgagccccccctgatcgccagacacacccagagactgtgggtgctggagggccagagagccaccctgagatgcagagccctgggcgaccccgcccccaccatgcactgggtgggccccgacgacagactggtgggcaacagcagcagagccagagccttccccaacggcaccctggagatcggcgtgaccggcgccggcgacgccggcggctacacctgcatcgccaccaaccccgccggcgaggccaccgccagagtggagctgagagtgctggccctgccccacggcggcaacagcagcgccgagggcggcagacccggccccagcgacatcgccgccagcgccagaaccgccgccgagggcgagggcaccctggagagcgagcccgccgtgcaggtgaccgaggtgaccgccaccagcggcctggtgagctggggccccggcagacccgccgaccccgtgtggatgttccagatccagtacaacagcagcgaggacgagaccctgatctacagaatcgtgcccgccagcagccaccacttcctgctgaagcacctggtgcccggcgccgactacgacctgtgcctgctggccctgagccccgccgccggccccagcgacctgaccgccaccagactgctgggctgcgcccacttcagcaccctgcccgccagccccctgtgccacgccctgcaggcccacgtgctgggcggcaccctgaccgtggccgtgggcggcgtgctggtggccgccctgctggtgttcaccgtggccctgctggtgagaggcagaggcgccggcaacggcagactgcccctgaagctgagccacgtgcagagccagaccaacggcggccccagccccacccccaaggcccacccccccagaagccccccccccagaccccagagaagctgcagcctggacctgggcgacgccggctgctacggctacgccagaagactgggcggcgcctgggccagaagaagccacagcgtgcacggcggcctgctgggcgccggctgcagaggcgtgggcggcagcgccgagagactggaggagagcgtggtgtag

SEQ ID NO: 86683 - DNA, 2160 bp, synthetic construct
  misc_feature 1..2160: note = Description of Artificial Sequence: Synthetic coding sequence
  source 1..2160: mol_type = other DNA
atggagaagatcctgttctacctgttcctgatcggcatcgccgtgaaggcccagatctgccccaagagatgcgtgtgccagatcctgagccccaacctggccaccctgtgcgccaagaagggcctgctgttcgtgccccccaacatcgacagaagaaccgtggagctgagactggccgacaacttcgtgaccaacatcaagagaaaggacttcgccaacatgaccagcctggtggacctgaccctgagcagaaacaccatcagcttcatcaccccccacgccttcgccgacctgagaaacctgagagccctgcacctgaacagcaacagactgaccaagatcaccaacgacatgttcagcggcctgagcaacctgcaccacctgatcctgaacaacaaccagctgaccctgatcagcagcaccgccttcgacgacgtgttcgccctggaggagctggacctgagctacaacaacctggagaccatcccctgggacgccgtggagaagatggtgagcctgcacaccctgagcctggaccacaacatgatcgacaacatccccaagggcaccttcagccacctgcacaagatgaccagactggacgtgaccagcaacaagctgcagaagctgccccccgaccccctgttccagagagcccaggtgctggccaccagcggcatcatcagccccagcaccttcgccctgagcttcggcggcaaccccctgcactgcaactgcgagctgctgtggctgagaagactgagcagagaggacgacctggagacctgcgccagcccccccctgctgaccggcagatacttctggagcatccccgaggaggagttcctgtgcgagccccccctgatcaccagacacacccacgagatgagagtgctggagggccagagagccaccctgagatgcaaggccagaggcgaccccgagcccgccatccactggatcagccccgagggcaagctgatcagcaacgccaccagaagcctggtgtacgacaacggcaccctggacatcctgatcaccaccgtgaaggacaccggcgccttcacctgcatcgccagcaaccccgccggcgaggccacccagatcgtggacctgcacatcatcaagctgccccacctgctgaacagcaccaaccacatccacgagcccgaccccggcagcagcgacatcagcaccagcaccaagagcggcagcaacaccagcagcagcaacggcgacaccaagctgagccaggacaagatcgtggtggccgaggccaccagcagcaccgccctgctgaagttcaacttccagagaaacatccccggcatcagaatgttccagatccagtacaacggcacctacgacgacaccctggtgtacagaatgatcccccccaccagcaagaccttcctggtgaacaacctggccgccggcaccatgtacgacctgtgcgtgctggccatctacgacgacggcatcaccagcctgaccgccaccagagtggtgggctgcatccagttcaccaccgagcaggactacgtgagatgccacttcatgcagagccagttcctgggcggcaccatgatcatcatcatcggcggcatcatcgtggccagcgtgctggtgttcatcatcatcctgatgatcagatacaaggtgtgcaacaacaacggccagcacaaggtgaccaaggtgagcaacgtgtacagccagaccaacggcgcccagatccagggctgcagcgtgaccctgccccagagcgtgagcaagcaggccgtgggccacgaggagaacgcccagtgctgcaaggccaccagcgacaacgtgatccagagcagcgagacctgcagcagccaggacagcagcaccaccaccagcgccctgccccccagctggaccagcagcaccagcgtgagccagaagcagaagagaaagaccggcaccaagcccagcaccgagccccagaacgaggccgtgaccaacgtggagagccagaacaccaacagaaacaacagcaccgccctgcagctggccagcagaccccccgacagcgtgaccgagggccccaccagcaagagagcccacatcaagcccaacgccctgctgaccaacgtggaccagatcgtgcaggagacccagagactggagctgatctag

SEQ ID NO: 86684 - DNA, 1863 bp, synthetic construct
  misc_feature 1..1863: note = Description of Artificial Sequence: Synthetic coding sequence
  source 1..1863: mol_type = other DNA
atgcaggtgagcaagagaatgctggccggcggcgtgagaagcatgcccagccccctgctggcctgctggcagcccatcctgctgctggtgctgggcagcgtgctgagcggcagcgccaccggctgcccccccagatgcgagtgcagcgcccaggacagagccgtgctgtgccacagaaagagattcgtggccgtgcccgagggcatccccaccgagaccagactgctggacctgggcaagaacagaatcaagaccctgaaccaggacgagttcgccagcttcccccacctggaggagctggagctgaacgagaacatcgtgagcgccgtggagcccggcgccttcaacaacctgttcaacctgagaaccctgggcctgagaagcaacagactgaagctgatccccctgggcgtgttcaccggcctgagcaacctgaccaagctggacatcagcgagaacaagatcgtgatcctgctggactacatgttccaggacctgtacaacctgaagagcctggaggtgggcgacaacgacctggtgtacatcagccacagagccttcagcggcctgaacagcctggagcagctgaccctggagaagtgcaacctgaccagcatccccaccgaggccctgagccacctgcacggcctgatcgtgctgagactgagacacctgaacatcaacgccatcagagactacagcttcaagagactgtacagactgaaggtgctggagatcagccactggccctacctggacaccatgacccccaactgcctgtacggcctgaacctgaccagcctgagcatcacccactgcaacctgaccgccgtgccctacctggccgtgagacacctggtgtacctgagattcctgaacctgagctacaaccccatcagcaccatcgagggcagcatgctgcacgagctgctgagactgcaggagatccagctggtgggcggccagctggccgtggtggagccctacgccttcagaggcctgaactacctgagagtgctgaacgtgagcggcaaccagctgaccaccctggaggagagcgtgttccacagcgtgggcaacctggagaccctgatcctggacagcaaccccctggcctgcgactgcagactgctgtgggtgttcagaagaagatggagactgaacttcaacagacagcagcccacctgcgccacccccgagttcgtgcagggcaaggagttcaaggacttccccgacgtgctgctgcccaactacttcacctgcagaagagccagaatcagagacagaaaggcccagcaggtgttcgtggacgagggccacaccgtgcagttcgtgtgcagagccgacggcgaccccccccccgccatcctgtggctgagccccagaaagcacctggtgagcgccaagagcaacggcagactgaccgtgttccccgacggcaccctggaggtgagatacgcccaggtgcaggacaacggcacctacctgtgcatcgccgccaacgccggcggcaacgacagcatgcccgcccacctgcacgtgagaagctacagccccgactggccccaccagcccaacaagaccttcgccttcatcagcaaccagcccggcgagggcgaggccaacagcaccagagccaccgtgcccttccccttcgacatcaagaccctgatcatcgccaccaccatgggcttcatcagcttcctgggcgtggtgctgttctgcctggtgctgctgttcctgtggagcagaggcaagggcaacaccaagcacaacatcgagatcgagtacgtgcccagaaagagcgacgccggcatcagcagcgccgacgcccccagaaagttcaacatgaagatgatctag

SEQ ID NO: 86685 - DNA, 168 bp, synthetic construct
  misc_feature 1..168: note = Description of Artificial Sequence: Synthetic coding sequence
  source 1..168: mol_type = other DNA
atgctggccggcggcgtgagaagcatgcccagccccctgctggcctgctggcagcccatcctgctgctggtgctgggcagcgtgctgagcggcagcgccaccggctgcccccccagatgcgagtgcagcgcccaggacagagccgtgctgtgccacagaaagagatag

SEQ ID NO: 86686 - DNA, 1845 bp, synthetic construct
  misc_feature 1..1845: note = Description of Artificial Sequence: Synthetic coding sequence
  source 1..1845: mol_type = other DNA
atgctggccggcggcgtgagaagcatgcccagccccctgctggcctgctggcagcccatcctgctgctggtgctgggcagcgtgctgagcggcagcgccaccggctgcccccccagatgcgagtgcagcgcccaggacagagccgtgctgtgccacagaaagagattcgtggccgtgcccgagggcatccccaccgagaccagactgctggacctgggcaagaacagaatcaagaccctgaaccaggacgagttcgccagcttcccccacctggaggagctggagctgaacgagaacatcgtgagcgccgtggagcccggcgccttcaacaacctgttcaacctgagaaccctgggcctgagaagcaacagactgaagctgatccccctgggcgtgttcaccggcctgagcaacctgaccaagctggacatcagcgagaacaagatcgtgatcctgctggactacatgttccaggacctgtacaacctgaagagcctggaggtgggcgacaacgacctggtgtacatcagccacagagccttcagcggcctgaacagcctggagcagctgaccctggagaagtgcaacctgaccagcatccccaccgaggccctgagccacctgcacggcctgatcgtgctgagactgagacacctgaacatcaacgccatcagagactacagcttcaagagactgtacagactgaaggtgctggagatcagccactggccctacctggacaccatgacccccaactgcctgtacggcctgaacctgaccagcctgagcatcacccactgcaacctgaccgccgtgccctacctggccgtgagacacctggtgtacctgagattcctgaacctgagctacaaccccatcagcaccatcgagggcagcatgctgcacgagctgctgagactgcaggagatccagctggtgggcggccagctggccgtggtggagccctacgccttcagaggcctgaactacctgagagtgctgaacgtgagcggcaaccagctgaccaccctggaggagagcgtgttccacagcgtgggcaacctggagaccctgatcctggacagcaaccccctggcctgcgactgcagactgctgtgggtgttcagaagaagatggagactgaacttcaacagacagcagcccacctgcgccacccccgagttcgtgcagggcaaggagttcaaggacttccccgacgtgctgctgcccaactacttcacctgcagaagagccagaatcagagacagaaaggcccagcaggtgttcgtggacgagggccacaccgtgcagttcgtgtgcagagccgacggcgaccccccccccgccatcctgtggctgagccccagaaagcacctggtgagcgccaagagcaacggcagactgaccgtgttccccgacggcaccctggaggtgagatacgcccaggtgcaggacaacggcacctacctgtgcatcgccgccaacgccggcggcaacgacagcatgcccgcccacctgcacgtgagaagctacagccccgactggccccaccagcccaacaagaccttcgccttcatcagcaaccagcccggcgagggcgaggccaacagcaccagagccaccgtgcccttccccttcgacatcaagaccctgatcatcgccaccaccatgggcttcatcagcttcctgggcgtggtgctgttctgcctggtgctgctgttcctgtggagcagaggcaagggcaacaccaagcacaacatcgagatcgagtacgtgcccagaaagagcgacgccggcatcagcagcgccgacgcccccagaaagttcaacatgaagatgatctag

SEQ ID NO: 86687 - DNA, 1821 bp, synthetic construct
  misc_feature 1..1821: note = Description of Artificial Sequence: Synthetic coding sequence
  source 1..1821: mol_type = other DNA
atgctgcacaccgccatcagctgctggcagcccttcctgggcctggccgtggtgctgatcttcatgggcagcaccatcggctgccccgccagatgcgagtgcagcgcccagaacaagagcgtgagctgccacagaagaagactgatcgccatccccgagggcatccccatcgagaccaagatcctggacctgagcaagaacagactgaagagcgtgaaccccgaggagttcatcagctaccccctgctggaggagatcgacctgagcgacaacatcatcgccaacgtggagcccggcgccttcaacaacctgttcaacctgagaagcctgagactgaagggcaacagactgaagctggtgcccctgggcgtgttcaccggcctgagcaacctgaccaagctggacatcagcgagaacaagatcgtgatcctgctggactacatgttccaggacctgcacaacctgaagagcctggaggtgggcgacaacgacctggtgtacatcagccacagagccttcagcggcctgctgagcctggagcagctgaccctggagaagtgcaacctgaccgccgtgcccaccgaggccctgagccacctgagaagcctgatcagcctgcacctgaagcacctgaacatcaacaacatgcccgtgtacgccttcaagagactgttccacctgaagcacctggagatcgactactggcccctgctggacatgatgcccgccaacagcctgtacggcctgaacctgaccagcctgagcgtgaccaacaccaacctgagcaccgtgcccttcctggccttcaagcacctggtgtacctgacccacctgaacctgagctacaaccccatcagcaccatcgaggccggcatgttcagcgacctgatcagactgcaggagctgcacatcgtgggcgcccagctgagaaccatcgagccccacagcttccagggcctgagattcctgagagtgctgaacgtgagccagaacctgctggagaccctggaggagaacgtgttcagcagccccagagccctggaggtgctgagcatcaacaacaaccccctggcctgcgactgcagactgctgtggatcctgcagagacagcccaccctgcagttcggcggccagcagcccatgtgcgccggccccgacaccatcagagagagaagcttcaaggacttccacagcaccgccctgagcttctacttcacctgcaagaagcccaagatcagagagaagaagctgcagcacctgctggtggacgagggccagaccgtgcagctggagtgcagcgccgacggcgacccccagcccgtgatcagctgggtgacccccagaagaagattcatcaccaccaagagcaacggcagagccaccgtgctgggcgacggcaccctggagatcagattcgcccaggaccaggacagcggcatgtacgtgtgcatcgccagcaacgccgccggcaacgacaccttcaccgccagcctgaccgtgaagggcttcgccagcgacagattcctgtacgccaacagaacccccatgtacatgaccgacagcaacgacaccatcagcaacggcaccaacgccaacaccttcagcctggacctgaagaccatcctggtgagcaccgccatgggctgcttcaccttcctgggcgtggtgctgttctgcttcctgctgctgttcgtgtggagcagaggcaagggcaagcacaagaacagcatcgacctggagtacgtgcccagaaagaacaacggcgccgtggtggagggcgaggtggccggccccagaagattcaacatgaagatgatctag

SEQ ID NO: 86688 - DNA, 1821 bp, synthetic construct; identical to SEQ ID NO: 86687
  misc_feature 1..1821: note = Description of Artificial Sequence: Synthetic coding sequence
  source 1..1821: mol_type = other DNA

SEQ ID NO: 86689 - DNA, 1779 bp, synthetic construct
  misc_feature 1..1779: note = Description of Artificial Sequence: Synthetic coding sequence
  source 1..1779: mol_type = other DNA
atgacctgctggctgtgcgtgctgagcctgcccctgctgctgctgcccgccgcccccccccccgccggcggctgccccgccagatgcgagtgcaccgtgcagaccagagccgtggcctgcaccagaagaagactgaccgccgtgcccgacggcatccccgccgagaccagactgctggagctgagcagaaacagaatcagatgcctgaaccccggcgacctggccgccctgcccgccctggaggagctggacctgagcgagaacgccatcgcccacgtggagcccggcgccttcgccaacctgcccagactgagagtgctgagactgagaggcaaccagctgaagctgatcccccccggcgtgttcaccagactggacaacctgaccctgctggacctgagcgagaacaagctggtgatcctgctggactacaccttccaggacctgcacagcctgagaagactggaggtgggcgacaacgacctggtgttcgtgagcagaagagccttcgccggcctgctggccctggaggagctgaccctggagagatgcaacctgaccgccctgagcggcgagagcctgggccacctgagaagcctgggcgccctgagactgagacacctggccatcgccagcctggaggaccagaacttcagaagactgcccggcctgctgcacctggagatcgacaactggcccctgctggaggaggtggccgccggcagcctgagaggcctgaacctgaccagcctgagcgtgacccacaccaacatcaccgccgtgcccgccgccgccctgagacaccaggcccacctgacctgcctgaacctgagccacaaccccatcagcaccgtgcccagaggcagcttcagagacctggtgagactgagagagctgcacctggccggcgccctgctggccgtggtggagccccaggccttcctgggcctgagacagatcagactgctgaacctgagcaacaacctgctgagcaccctggaggagagcaccttccacagcgtgaacaccctggagaccctgagagtggacggcaaccccctggcctgcgactgcagactgctgtggatcgtgcagagaagaaagaccctgaacttcgacggcagactgcccgcctgcgccacccccgccgaggtgagaggcgacgccctgagaaacctgcccgacagcgtgctgttcgagtacttcgtgtgcagaaagcccaagatcagagagagaagactgcagagagtgaccgccaccgccggcgaggacgtgagattcctgtgcagagccgagggcgagcccgcccccaccgtggcctgggtgaccccccagcacagacccgtgaccgccaccagcgccggcagagccagagtgctgcccggcggcaccctggagatccaggacgccagaccccaggacagcggcacctacacctgcgtggccagcaacgccggcggcaacgacacctacttcgccaccctgaccgtgagacccgagcccgccgccaacagaacccccggcgaggcccacaacgagaccctggccgccctgagagcccccctggacctgaccaccatcctggtgagcaccgccatgggctgcatcaccttcctgggcgtggtgctgttctgcttcgtgctgctgttcgtgtggagcagaggcagaggccagcacaagaacaacttcagcgtggagtacagcttcagaaaggtggacggccccgccgccgccgccggccagggcggcgccagaaagttcaacatgaagatgatctag

SEQ ID NO: 86690 - DNA, 2172 bp, synthetic construct
  misc_feature 1..2172: note = Description of Artificial Sequence: Synthetic coding sequence
  source 1..2172: mol_type = other DNA
atgcccctgttcttcagaaagagaaagcccagcgaggaggccagaaagagactggagtaccagatgtgcctggccaaggaggccggcgccgacgacatcctggacatcagcaagtgcgagctgagcgagatccccttcggcgccttcgccacctgcaaggtgctgcagaagaaggtgctgatcgtgcacaccaaccacctgaccagcctgctgcccaagagctgcagcctgctgagcctggccaccatcaaggtgctggacctgcacgacaaccagctgaccgccctgcccgacgacctgggccagctgaccgccctgcaggtgctgaacgtggagagaaaccagctgatgcagctgcccagaagcatcggcaacctgacccagctgcagaccctgaacgtgaaggacaacaagctgaaggagctgcccgacaccgtgggcgagctgagaagcctgagaaccctgaacatcagcggcaacgagatccagagactgccccagatgctggcccacgtgagaaccctggagatgctgagcctggacgccagcgccatggtgtacccccccagagaggtgtgcggcgccggcaccgccgccatcctgcagttcctgtgcaaggagagcggcctggagtactacccccccagccagtacctgctgcccatcctggagcaggacggcatcgagaacagcagagacagccccgacggccccaccgacagattcagcagagaggagctggagtggcagaacagattcagcgactacgagaagagaaaggagcagaagatgctggagaagctggagttcgagagaagactggagctgggccagagagagcacacccagctgctgcagcagagcagcagccagaaggacgagatcctgcagaccgtgaaggaggagcagagcagactggagcagggcctgagcgagcaccagagacacctgaacgccgagagacagagactgcaggagcagctgaagcagaccgagcagaacatcagcagcagaatccagaagctgctgcaggacaaccagagacagaagaagagcagcgagatcctgaagagcctggagaacgagagaatcagaatggagcagctgatgagcatcacccaggaggagaccgagagcctgagaagaagagacgtggccagcgccatgcagcagatgctgaccgagagctgcaagaacagactgatccagatggcctacgagagccagagacagaacctggtgcagcaggcctgcagcagcatggccgagatggacgagagattccagcagatcctgagctggcagcagatggaccagaacaaggccatcagccagatcctgcaggagagcgccatgcagaaggccgccttcgaggccctgcaggtgaagaaggacctgatgcacagacagatcagaagccagatcaagctgatcgagaccgagctgctgcagctgacccagctggagctgaagagaaagagcctggacaccgagagcctgcaggagatgatcagcgagcagagatgggccctgagcagcctgctgcagcagctgctgaaggagaagcagcagagagaggaggagctgagagagatcctgaccgagctggaggccaagagcgagaccagacaggagaactactggctgatccagtaccagagactgctgaaccagaagcccctgagcctgaagctgcaggaggagggcatggagagacagctggtggccctgctggaggagctgagcgccgagcactacctgcccatcttcgcccaccacagactgagcctggacctgctgagccagatgagccccggcgacctggccaaggtgggcgtgagcgaggccggcctgcagcacgagatcctgagaagagtgcaggagctgctggacgccgccagaatccagcccgagctgaagccccccatgggcgaggtggtgacccccaccgccccccaggagccccccgagagcgtgagacccagcgccccccccgccgagctggaggtgcaggccagcgagtgcgtggtgtgcctggagagagaggcccagatgatcttcctgaactgcggccacgtgtgctgctgccagcagtgctgccagcccctgagaacctgccccctgtgcagacaggacatcgcccagagactgagaatctaccacagcagctag

SEQ ID NO: 86691 - DNA, 2172 bp, synthetic construct; identical to SEQ ID NO: 86690
  misc_feature 1..2172: note = Description of Artificial Sequence: Synthetic coding sequence
  source 1..2172: mol_type = other DNA

SEQ ID NO: 86692 - DNA, 2172 bp, synthetic construct; identical to SEQ ID NO: 86690
  misc_feature 1..2172: note = Description of Artificial Sequence: Synthetic coding sequence
  source 1..2172: mol_type = other DNA

SEQ ID NO: 86693 - DNA, 2091 bp, synthetic construct
  misc_feature 1..2091: note = Description of Artificial Sequence: Synthetic coding sequence
  source 1..2091: mol_type = other DNA
atgcccctgttcttcagaaagagaaagcccagcgaggaggccagaaagagactggagtaccagatgtgcctggccaaggaggccggcgccgacgacatcctggacatcagcaagtgcgagctgagcgagatccccttcggcgccttcgccacctgcaaggtgctgcagaagaaggtgctgatcgtgcacaccaaccacctgaccagcctgctgcccaagagctgcagcctgctgagcctggccaccatcaaggtgctggacctgcacgacaaccagctgaccgccctgcccgacgacctgggccagctgaccgccctgcaggtgctgaacgtggagagaaaccagctgatgcagctgcccagaagcatcggcaacctgacccagctgcagaccctgaacgtgaaggacaacaagctgaaggagctgcccgacaccgtgggcgagctgagaagcctgagaaccctgaacatcagcggcaacgagatccagagactgccccagatgctggcccacgtgagaaccctggagatgctgagcctggacgccagcgccatggtgtacccccccagagaggtgtgcggcgccggcaccgccgccatcctgcagttcctgtgcaaggagagcggcctggagtactacccccccagccagtacctgctgcccatcctggagcaggacggcatcgagaacagcagagacagccccgacggccccaccgacagattcagcagagaggagctggagtggcagaacagattcagcgactacgagaagagaaaggagcagaagatgctggagaagctggagttcgagagaagactggagctgggccagagagagcacacccagctgctgcagcagagcagcagccagaaggacgagatcctgcagaccgtgaaggaggagcagagcagactggagcagggcctgagcgagcaccagagacacctgaacgccgagagacagagactgcaggagcagctgaagcagaccgagcagaacatcagcagcagaatccagaagctgctgcaggacaaccagagacagaagaagagcagcgagatcctgaagagcctggagaacgagagaatcagaatggagcagctgatgagcatcacccaggaggagaccgagagcctgagaagaagagacgtggccagcgccatgcagcagatgctgaccgagagctgcaagaacagactgatccagatggcctacgagagccagagacagaacctggtgcagcaggcctgcagcagcatggccgagatggacgagagattccagcagatcctgagctggcagcagatggaccagaacaaggccatcagccagatcctgcaggagagcgccatgcagaaggccgccttcgaggccctgcaggtgaagaaggacctgatgcacagacagatcagaagccaggagatgatcagcgagcagagatgggccctgagcagcctgctgcagcagctgctgaaggagaagcagcagagagaggaggagctgagagagatcctgaccgagctggaggccaagagcgagaccagacaggagaactactggctgatccagtaccagagactgctgaaccagaagcccctgagcctgaagctgcaggaggagggcatggagagacagctggtggccctgctggaggagctgagcgccgagcactacctgcccatcttcgcccaccacagactgagcctggacctgctgagccagatgagccccggcgacctggccaaggtgggcgtgagcgaggccggcctgcagcacgagatcctgagaagagtgcaggagctgctggacgccgccagaatccagcccgagctgaagccccccatgggcgaggtggtgacccccaccgccccccaggagccccccgagagcgtgagacccagcgccccccccgccgagctggaggtgcaggccagcgagtgcgtggtgtgcctggagagagaggcccagatgatcttcctgaactgcggccacgtgtgctgctgccagcagtgctgccagcccctgagaacctgccccctgtgcagacaggacatcgcccagagactgagaatctaccacagcagctag

SEQ ID NO: 86694 - DNA, 465 bp, synthetic construct
  misc_feature 1..465: note = Description of Artificial Sequence: Synthetic coding sequence
  source 1..465: mol_type = other DNA
atgttccactgcatccccctgtggagatgcaacagacacgtggagagcatcgacaagagacactgcagcctggtgtacgtgcccgaggagatctacagatacgccagaagcctggaggagctgctgctggacgccaaccagctgagagagctgcccgagcagttcttccagctggtgaagctgagaaagctgggcctgagcgacaacgagatccagagactgccccccgagatcgccaacttcatgcagctggtggagctggacgtgagcagaaacgagatccccgagatccccgagagcatcagcttctgcaaggccctgcaggtggccgacttcagcggcaaccccctgaccagactgcccgagagcttccccgagctgcagaacctgacctgcctgagcgtgaacgacatcagcctgcagagcctgcccgagaacatcggcaagcagaagaccaccagctag

SEQ ID NO: 86695 - DNA, 1575 bp, synthetic construct
  misc_feature 1..1575: note = Description of Artificial Sequence: Synthetic coding sequence
  source 1..1575: mol_type = other DNA
atgttccactgcatccccctgtggagatgcaacagacacgtggagagcatcgacaagagacactgcagcctggtgtacgtgcccgaggagatctacagatacgccagaagcctggaggagctgctgctggacgccaaccagctgagagagctgcccgagcagttcttccagctggtgaagctgagaaagctgggcctgagcgacaacgagatccagagactgccccccgagatcgccaacttcatgcagctggtggagctggacgtgagcagaaacgagatccccgagatccccgagagcatcagcttctgcaaggccctgcaggtggccgacttcagcggcaaccccctgaccagactgcccgagagcttccccgagctgcagaacctgacctgcctgagcgtgaacgacatcagcctgcagagcctgcccgagaacatcggcaacctgtacaacctggccagcctggagctgagagagaacctgctgacctacctgcccgacagcctgacccagctgagaagactggaggagctggacctgggcaacaacgagatctacaacctgcccgagagcatcggcgccctgctgcacctgaaggacctgtggctggacggcaaccagctgagcgagctgccccaggagatcggcaacctgaagaacctgctgtgcctggacgtgagcgagaacagactggagagactgcccgaggagatcagcggcctgaccagcctgaccgacctggtgatcagccagaacctgctggagaccatccccgacggcatcggcaagctgaagaagctgagcatcctgaaggtggaccagaacagactgacccagctgcccgaggccgtgggcgagtgcgagagcctgaccgagctggtgctgaccgagaaccagctgctgaccctgcccaagagcatcggcaagctgaagaagctgagcaacctgaacgccgacagaaacaagctggtgagcctgcccaaggagatcggcggctgctgcagcctgaccgtgttctgcgtgagagacaacagactgaccagaatccccgccgaggtgagccaggccaccgagctgcacgtgctggacgtggccggcaacagactgctgcacctgcccctgagcctgaccgccctgaagctgaaggccctgtggctgagcgacaaccagagccagcccctgctgaccttccagaccgacaccgactacaccaccggcgagaagatcctgacctgcgtgctgctgccccagctgcccagcgagcccacctgccaggagaacctgcccagatgcggcgccctggagaacctggtgaacgacgtgagcgacgaggcctggaacgagagagccgtgaacagagtgagcgccatcagattcgtggaggacgagaaggacgaggaggacaacgagaccagaaccctgctgagaagagccaccccccaccccggcgagctgaagcacatgaagaagaccgtggagaacctgagaaacgacatgaacgccgccaagggcctggacagcaacaagaacgaggtgaaccacgccatcgacagagtgaccaccagcgtgtag

SEQ ID NO: 86696 - DNA, 834 bp, synthetic construct
  misc_feature 1..834: note = Description of Artificial Sequence: Synthetic coding sequence
  source 1..834: mol_type = other DNA
atgggcaacaccatcagagccctggtggccttcatccccgccgacagatgccagaactacgtggtgagagacctgagagagatgcccctggacaagatggtggacctgagcggcagccagctgagaagattccccctgcacgtgtgcagcttcagagagctggtgaagctgtacctgagcgacaaccacctgaacagcctgccccccgagctgggccagctgcagaacctgcagatcctggccctggacttcaacaacttcaaggccctgccccaggtggtgtgcaccctgaagcagctgtgcatcctgtacctgggcaacaacaagctgtgcgacctgcccagcgagctgagcctgctgcagaacctgagaaccctgtggatcgaggccaactgcctgacccagctgcccgacgtggtgtgcgagctgagcctgctgaagaccctgcacgccggcagcaacgccctgagactgctgcccggccagctgagaagactgcaggagctgagaaccatctggctgagcggcaacagactgaccgacttccccaccgtgctgctgcacatgcccttcctggaggtgatcgacgtggactggaacagcatcagatacttccccagcctggcccacctgagcagcctgaagctggtgatctacgaccacaacccctgcagaaacgcccccaaggtggccaagggcgtgagaagagtgggcagatgggccgaggagacccccgagcccgaccccagaaaggccagaagatacgccctggtgagagaggagagccaggagctgcaggcccccgtgcccctgctgccccccaccaacagctag

SEQ ID NO: 86697 - DNA, 4116 bp, synthetic construct
  misc_feature 1..4116: note = Description of Artificial Sequence: Synthetic coding sequence
  source 1..4116: mol_type = other DNA
atgaccgaggagagcagcgacgtgcccagagagctgatcgagagcatcaaggacgtgatcggcagaaagatcaagatcagcgtgaagaagaaggtgaagctggaggtgaagggcgacaaggtggagaacaaggtgctggtgctgaccagctgcagagccttcctggtgaccgccagaatccccaccaagctggagctgaccttcagctacctggagatccacggcgtggtgtgcagcaagagcgcccagatgatcgtggagaccgagaagtgcagcatcagcatgaagatggccagccccgaggacgtgagcgaggtgctggcccacatcggcacctgcctgagaaagatcttccccggcctgagccccgtgagaatcatgaagaaggtgagcatggagcccagcgagagactggccagcctgcaggccctgtgggacagccagaccgtggccgagcagggcccctgcggcggcttcagccagatgtacgcctgcgtgtgcgactggctgggcttcagctacagagaggaggtgcagtgggacgtggacaccatctacctgacccaggacaccagagagctgaacctgcaggacttcagccacctggaccacagagacctgatccccatcatcgccgccctggagtacaaccagtggttcaccaagctgagcagcaaggacctgaagctgagcaccgacgtgtgcgagcagatcctgagagtggtgagcagaagcaacagactggaggagctggtgctggagaacgccggcctgagaaccgacttcgcccagaagctggccagcgccctggcccacaaccccaacagcggcctgcacaccatcaacctggccggcaaccccctggaggacagaggcgtgagcagcctgagcatccagttcgccaagctgcccaagggcctgaagcacctgaacctgagcaagaccagcctgagccccaagggcgtgaacagcctgagccagagcctgagcgccaaccccctgaccgccagcaccctggtgcacctggacctgagcggcaacgtgctgagaggcgacgacctgagccacatgtacaacttcctggcccagcccaacgccatcgtgcacctggacctgagcaacaccgagtgcagcctggacatggtgtgcggcgccctgctgagaggctgcctgcagtacctggccgtgctgaacctgagcagaaccgtgttcagccacagaaagggcaaggaggtgccccccagcttcaagcagttcttcagcagcagcctggccctgatgcacatcaacctgagcggcaccaagctgagccccgagcccctgaaggccctgctgctgggcctggcctgcaaccacaacctgaagggcgtgagcctggacctgagcaactgcgagctgagaagcggcggcgcccaggtgctggagggctgcatcgccgagatccacaacatcaccagcctggacatcagcgacaacggcctggagagcgacctgagcaccctgatcgtgtggctgagcaagaacagaagcatccagcacctggccctgggcaagaacttcaacaacatgaagagcaagaacctgacccccgtgctggacaacctggtgcagatgatccaggacgaggagagccccctgcagagcctgagcctggccgacagcaagctgaagaccgaggtgaccatcatcatcaacgccctgggcagcaacaccagcctgaccaaggtggacatcagcggcaacggcatgggcgacatgggcgccaagatgctggccaaggccctgcagatcaacaccaagctgagaaccgtgatctgggacaagaacaacatcaccgcccagggcttccaggacatcgccgtggccatggagaagaactacaccctgagattcatgcccatccccatgtacgacgccagccaggccctgaagaccaaccccgagaagaccgaggacgccctgcagaagatcgagaactacctgctgagaaaccacgagaccagaaagtacctgcaggagcaggcctacagactgcagcagggcatcgtgaccagcaccacccagcagatgatcgacagaatctgcgtgaaggtgcaggaccacctgaacagcctgagaaactgcggcggcgacgccatccaggaggacctgaagagcgccgagagactgatgagagacgccaagaacagcaagaccctgctgcccaacctgtaccacgtgggcggcgccagctgggccggcgccagcggcctgctgagcagccccatccaggagaccctggagagcatggccggcgaggtgaccagagtggtggacgagcagctgaaggccctgctggagagcatggtggacgccgccgagaacctgtgccccaacgtgatgaagaaggcccacatcagacaggacctgatccacgccagcaccgagaagatcagcatccccagaaccttcgtgaagaacgtgctgctggagcagagcggcatcgacatcctgaacaagatcagcgaggtgaagctgaccgtggccagcttcctgagcgacagaatcgtggacgagatcctggacgccctgagccactgccaccacaagctggccgaccacttcagcagaagaggcaagaccctgccccagcaggagagcctggagatcgagctggccgaggagaagcccgtgaagagaagcatcatcaccgtggaggagctgaccgagatcgagagactggaggacctggacacctgcatgatgacccccaagagcaagagaaagagcatccacagcagaatgctgagacccgtgagcagagccttcgagatggagttcgacctggacaaggccctggaggaggtgcccatccacatcgaggacccccccttccccagcctgagacaggagaagagaagcagcggcttcatcagcgagctgcccagcgaggagggcaagaagctggagcacttcaccaagctgagacccaagagaaacaagaagcagcagcccacccaggccgccgtgtgcgccgccaacatcgtgagccaggacggcgagcagaacggcctgatgggcagagtggacgagggcgtggacgagttcttcaccaagaaggtgaccaagatggacagcaagaagtggagcaccagaggcagcgagagccacgagctgaacgagggcggcgacgagaagaagaagagagacagcagaaagagcagcggcttcctgaacctgatcaagagcagaagcaagagcgagagaccccccaccatcctgatgaccgaggagcccagcagccccaagggcgccgtgagaagcccccccgtggactgccccagaaaggacaccaaggccgccgagcacaacggcaacagcgagagaatcgaggagatcaagacccccgacagcttcgaggagagccagggcgaggagatcggcaaggtggagagaagcgacagcaagagcagcccccaggccggcagaagatacggcgtgcaggtgatgggcagcggcctgctggccgagatgaaggccaagcaggagaagagagccgcctgcgcccagaagaagctgggcaacgacgccgtgagccaggacagcagcagccccgccctgagcggcgtggagagaagcgacggcggcggcgccgtgcccaagctgcaccccggcctgcccgagaacagattcggcctgggcacccccgagaagaacaccaaggccgagcccaaggccgaggccggcagcagaagcagaagcagcagcagcacccccaccagccccaagcccctgctgcagagccccaagcccagcctggccgccagacccgtgatcccccagaagcccagaaccgccagcagacccgacgacatccccgacagccccagcagccccaaggtggccctgctgccccccgtgctgaagaaggtgcccagcgacaaggagagagacggccagagcagcccccagcccagccccagaaccttcagccaggaggtgagcagaagaagctggggccagcaggcccaggagtaccaggagcagaagcagagaagcagcagcaaggacggccaccagggcagcaagagcaacgacagcggcgaggaggccgagaaggagttcatcttcgtgtag

SEQ ID NO: 86698 - DNA, 531 bp, synthetic construct
  misc_feature 1..531: note = Description of Artificial Sequence: Synthetic coding sequence
  source 1..531: mol_type = other DNA
atgtacgcctgcgtgtgcgactggctgggcttcagctacagagaggaggtgcagtgggacgtggacaccatctacctgacccaggacaccagagagctgaacctgcaggacttcagccacctggaccacagagacctgatccccatcatcgccgccctggagtacaaccagtggttcaccaagctgagcagcaaggacctgaagctgagcaccgacgtgtgcgagcagatcctgagagtggtgagcagaagcaacagactggaggagctggtgctggagaacgccggcctgagaaccgacttcgcccagaagctggccagcgccctggcccacaaccccaacagcggcctgcacaccatcaacctggccggcaaccccctggaggacagagagaccaccaccaagatcaagagacagaacgtgcccaccgtgctgcagacctacctggtggtgtgccccagcgactaccagccctgccccctgcccctgggcaaggacaactactacagcgacttcagccacgacggctag

SEQ ID NO: 86699 - DNA, 3981 bp, synthetic construct
  misc_feature 1..3981: note = Description of Artificial Sequence: Synthetic coding sequence
  source 1..3981: mol_type = other DNA
atgaccgaggagagcagcgacgtgcccagagagctgatcgagagcatcaaggacgtgatcggcagaaagatcaagatcagcgtgaagaagaaggtgaagctggaggtgaagggcgacaaggtggagaacaaggtgctggtgctgaccagctgcagagccttcctggtgaccgccagaatccccaccaagctggagctgaccttcagctacctggagatccacggcgtggtgtgcagcaagagcgcccagatgatcgtggagaccgagaagtgcagcatcagcatgaagatggccagccccgaggacgtgagcgaggtgctggcccacatcggcacctgcctgagaaagatcttccccggcctgagccccgtgagaatcatgaagaaggtgagcatggagcccagcgagagactggccagcctgcaggccctgtgggacagccagaccgtggccgagcagggcccctgcggcggcttcagccagatgtacgcctgcgtgtgcgactggctgggcttcagctacagagaggaggtgcagtgggacgtggacaccatctacctgacccaggacaccagagagctgaacctgcaggacttcagccacctggaccacagagacctgatccccatcatcgccgccctggagtacaaccagtggttcaccaagctgagcagcaaggacctgaagctgagcaccgacgtgtgcgagcagatcctgagagtggtgagcagaagcaacagactggaggagctggtgctggagaacgccggcctgagaaccgacttcgcccagaagctggccagcgccctggcccacaaccccaacagcggcctgcacaccatcaacctggccggcaaccccctggaggacagaggcgtgagcagcctgagcatccagttcgccaagctgcccaagggcctgaagcacctgaacctgagcaagaccagcctgagccccaagggcgtgaacagcctgagccagagcctgagcgccaaccccctgaccgccagcaccctggtgcacctggacctgagcggcaacgtgctgagaggcgacgacctgagccacatgtacaacttcctggcccagcccaacgccatcgtgcacctggacctgagcaacaccgagtgcagcctggacatggtgtgcggcgccctgctgagaggctgcctgcagtacctggccgtgctgaacctgagcagaaccgtgttcagccacagaaagggcaaggaggtgccccccagcttcaagcagttcttcagcagcagcctggccctgatgcacatcaacctgagcggcaccaagctgagccccgagcccctgaaggccctgctgctgggcctggcctgcaaccacaacctgaagggcgtgagcctggacctgagcaactgcgagctgagaagcggcggcgcccaggtgctggagggctgcatcgccgagatccacaacatcaccagcctggacatcagcgacaacggcctggagagcgacctgagcaccctgatcgtgtggctgagcaagaacagaagcatccagcacctggccctgggcaagaacttcaacaacatgaagagcaagaacctgacccccgtgctggacaacctggtgcagatgatccaggacgaggagagccccctgcagagcctgagcctggccgacagcaagctgaagaccgaggtgaccatcatcatcaacgccctgggcagcaacaccagcctgaccaaggtggacatcagcggcaacggcatgggcgacatgggcgccaagatgctggccaaggccctgcagatcaacaccaagctgagaaccgtgatctgggacaagaacaacatcaccgcccagggcttccaggacatcgccgtggccatggagaagaactacaccctgagattcatgcccatccccatgtacgacgccagccaggccctgaagaccaaccccgagaagaccgaggacgccctgcagaagatcgagaactacctgctgagaaaccacgagaccagaaagtacctgcaggagcaggcctacagactgcagcagggcatcgtgaccagcaccacccagcagatgatcgacagaatctgcgtgaaggtgcaggaccacctgaacagcctgagaaactgcggcggcgacgccatccaggaggacctgaagagcgccgagagactgatgagagacgccaagaacagcaagaccctgctgcccaacctgtaccacgtgggcggcgccagctgggccggcgccagcggcctgctgagcagccccatccaggagaccctggagagcatggccggcgaggtgaccagagtggtggacgagcagctgaaggccctgctggagagcatggtggacgccgccgagaacctgtgccccaacgtgatgaagaaggcccacatcagacaggacctgatccacgccagcaccgagaagatcagcatccccagaaccttcgtgaagaacgtgctgctggagcagagcggcatcgacatcctgaacaagatcagcgaggtgaagctgaccgtggccagcttcctgagcgacagaatcgtggacgagatcctggacgccctgagccactgccaccacaagctggccgaccacttcagcagaagaggcaagaccctgccccagcaggagagcctggagatcgagctggccgaggagaagcccgtgaagagaagcatcatcaccgtggaggagctgaccgagatcgagagactggaggacctggacacctgcatgatgacccccaagagcaagagaaagagcatccacagcagaatgctgagacccgtgagcagagccttcgagatggagttcgacctggacaaggccctggaggaggtgcccatccacatcgaggacccccccttccccagcctgagacaggagaagagaagcagcggcttcatcagcgagctgcccagcgaggagggcaagaagctggagcacttcaccaagctgagacccaagagaaacaagaagcagcagcccacccaggccgccgtgtgcgccgccaacatcgtgagccaggacggcgagcagaacggcctgatgggcagagtggacgagggcgtggacgagttcttcaccaagaaggtgaccaagatggacagcaagaagtggagcaccagaggcagcgagagccacgagctgaacgagggcggcgacgagaagaagaagagagacagcagaaagagcagcggcttcctgaacctgatcaagagcagaagcaagagcgagagaccccccaccatcctgatgaccgaggagcccagcagccccaagggcgccgtgagaagcccccccgtggactgccccagaaaggacaccaaggccgccgagcacaacggcaacagcgagagaatcgaggagatcaagacccccgacagcttcgaggagagccagggcgaggagatcggcaaggtggagagaagcgacagcaagagcagcccccaggccggcagaagatacggcgtgcaggtgatgggcagcggcctgctggccgagatgaaggccaagcaggagaacagattcggcctgggcacccccgagaagaacaccaaggccgagcccaaggccgaggccggcagcagaagcagaagcagcagcagcacccccaccagccccaagcccctgctgcagagccccaagcccagcctggccgccagacccgtgatcccccagaagcccagaaccgccagcagacccgacgacatccccgacagccccagcagccccaaggtggccctgctgccccccgtgctgaagaaggtgcccagcgacaaggagagagacggccagagcagcccccagcccagccccagaaccttcagccaggaggtgagcagaagaagctggggccagcaggcccaggagtaccaggagcagaagcagagaagcagcagcaaggacggccaccagggcagcaagagcaacgacagcggcgaggaggccgagaaggagttcatcttcgtgtag

SEQ ID NO: 86700 - DNA, 1116 bp, synthetic construct
  misc_feature 1..1116: note = Description of Artificial Sequence: Synthetic coding sequence
  source 1..1116: mol_type = other DNA
atgggccacaaggtggtggtgttcgacatcagcgtgatcagagccctgtgggagaccagagtgaagaagcacaaggcctggcagaagaaggaggtggagagactggagaagagcgccctggagaagatcaaggaggagtggaacttcgtggccgagtgcagaagaaagggcatcccccaggccgtgtactgcaagaacggcttcatcgacaccagcgtgagactgctggacaagatcgagagaaacaccctgaccagacagagcagcctgcccaaggacagaggcaagagaagcagcgccttcgtgttcgagctgagcggcgagcactggaccgagctgcccgacagcctgaaggagcagacccacctgagagagtggtacatcagcaacaccctgatccagatcatccccacctacatccagctgttccaggccatgagaatcctggacctgcccaagaaccagatcagccacctgcccgccgagatcggctgcctgaagaacctgaaggagctgaacgtgggcttcaactacctgaagagcatcccccccgagctgggcgactgcgagaacctggagagactggactgcagcggcaacctggagctgatggagctgcccttcgagctgagcaacctgaagcaggtgaccttcgtggacatcagcgccaacaagttcagcagcgtgcccatctgcgtgctgagaatgagcaacctgcagtggctggacatcagcagcaacaacctgaccgacctgccccaggacatcgacagactggaggagctgcagagcttcctgctgtacaagaacaagctgacctacctgccctacagcatgctgaacctgaagaagctgaccctgctggtggtgagcggcgaccacctggtggagctgcccaccgccctgtgcgacagcagcacccccctgaagttcgtgagcctgatggacaaccccatcgacaacgcccagtgcgaggacggcaacgagatcatggagagcgagagagacagacagcacttcgacaaggaggtgatgaaggcctacatcgaggacctgaaggagagagagagcgtgcccagctacaccaccaaggtgagcttcagcctgcagctgtag

SEQ ID NO: 86701 - DNA, 1116 bp, synthetic construct; identical to SEQ ID NO: 86700
  misc_feature 1..1116: note = Description of Artificial Sequence: Synthetic coding sequence
  source 1..1116: mol_type = other DNA

SEQ ID NO: 86702 - DNA, 918 bp, synthetic construct
  misc_feature 1..918: note = Description of Artificial Sequence: Synthetic coding sequence
  source 1..918: mol_type = other DNA
atgggcggcaccctggcctggaccctgctgctgcccctgctgctgagagagagcgacagcctggagcccagctgcaccgtgagcagcgccgacgtggactggaacgccgagttcagcgccacctgcctgaacttcagcggcctgagcctgagcctgccccacaaccagagcctgagagccagcaacgtgatcctgctggacctgagcggcaacggcctgagagagctgcccgtgaccttcttcgcccacctgcagaagctggaggtgctgaacgtgctgagaaaccccctgagcagagtggacggcgccctggccgccagatgcgacctggacctgcaggccgactgcaactgcgccctggagagctggcacgacatcagaagagacaactgcagcggccagaagcccctgctgtgctgggacaccaccagcagccagcacaacctgagcgccttcctggaggtgagctgcgcccccggcctggccagcgccaccatcggcgccgtggtggtgagcggctgcctgctgctgggcctggccatcgccggccccgtgctggcctggagactgtggagatgcagagtggccagaagcagagagctgaacaagccctgggccgcccaggacggccccaagcccggcctgggcctgcagcccagatacggcagcagaagcgcccccaagccccaggtggccgtgcccagctgccccagcacccccgactacgagaacatgttcgtgggccagcccgccgccgagcaccagtgggacgagcagggcgcccaccccagcgaggacaacgacttctacatcaactacaaggacatcgacctggccagccagcccgtgtactgcaacctgcagagcctgggccaggcccccatggacgaggaggagtacgtgatccccggccactag

SEQ ID NO: 86703 - DNA, 1005 bp, synthetic construct
  misc_feature 1..1005: note = Description of Artificial Sequence: Synthetic coding sequence
  source 1..1005: mol_type = other DNA
atgagaggccccagctggagcagacccagacccctgctgctgctgctgctgctgctgagcccctggcccgtgtgggcccaggtgagcgccaccgccagccccagcggcagcctgggcgcccccgactgccccgaggtgtgcacctgcgtgcccggcggcctggccagctgcagcgccctgagcctgcccgccgtgccccccggcctgagcctgagactgagagccctgctgctggaccacaacagagtgagagccctgccccccggcgccttcgccggcgccggcgccctgcagagactggacctgagagagaacggcctgcacagcgtgcacgtgagagccttctggggcctgggcgccctgcagctgctggacctgagcgccaaccagctggaggccctggcccccggcaccttcgcccccctgagagccctgagaaacctgagcctggccggcaacagactggccagactggagcccgccgccctgggcgccctgcccctgctgagaagcctgagcctgcaggacaacgagctggccgccctggcccccggcctgctgggcagactgcccgccctggacgccctgcacctgagaggcaacccctggggctgcggctgcgccctgagacccctgtgcgcctggctgagaagacaccccctgcccgccagcgaggccgagaccgtgctgtgcgtgtggcccggcagactgaccctgagccccctgaccgccttcagcgacgccgccttcagccactgcgcccagcccctggccctgagagacctggccgtggtgtacaccctgggccccgccagcttcctggtgagcctggccagctgcctggccctgggcagcggcctgaccgcctgcagagccagaagaagaagactgagaaccgccgccctgagaccccccagaccccccgaccccaaccccgaccccgacccccacggctgcgccagccccgccgaccccggcagccccgccgccgccgcccaggcctag

SEQ ID NO: 86704 - DNA, 1923 bp, synthetic construct
  misc_feature 1..1923: note = Description of Artificial Sequence: Synthetic coding sequence
  source 1..1923: mol_type = other DNA
atgctgaacaagatgaccctgcacccccagcagatcatgatcggccccagattcaacagagccctgttcgaccccctgctggtggtgctgctggccctgcagctgctggtggtggccggcctggtgagagcccagacctgccccagcgtgtgcagctgcagcaaccagttcagcaaggtgatctgcgtgagaaagaacctgagagaggtgcccgacggcatcagcaccaacaccagactgctgaacctgcacgagaaccagatccagatcatcaaggtgaacagcttcaagcacctgagacacctggagatcctgcagctgagcagaaaccacatcagaaccatcgagatcggcgccttcaacggcctggccaacctgaacaccctggagctgttcgacaacagactgaccaccatccccaacggcgccttcgtgtacctgagcaagctgaaggagctgtggctgagaaacaaccccatcgagagcatccccagctacgccttcaacagaatccccagcctgagaagactggacctgggcgagctgaagagactgagctacatcagcgagggcgccttcgagggcctgagcaacctgagatacctgaacctggccatgtgcaacctgagagagatccccaacctgacccccctgatcaagctggacgagctggacctgagcggcaaccacctgagcgccatcagacccggcagcttccagggcctgatgcacctgcagaagctgtggatgatccagagccagatccaggtgatcgagagaaacgccttcgacaacctgcagagcctggtggagatcaacctggcccacaacaacctgaccctgctgccccacgacctgttcacccccctgcaccacctggagagaatccacctgcaccacaacccctggaactgcaactgcgacatcctgtggctgagctggtggatcaaggacatggcccccagcaacaccgcctgctgcgccagatgcaacaccccccccaacctgaagggcagatacatcggcgagctggaccagaactacttcacctgctacgcccccgtgatcgtggagccccccgccgacctgaacgtgaccgagggcatggccgccgagctgaagtgcagagccagcaccagcctgaccagcgtgagctggatcacccccaacggcaccgtgatgacccacggcgcctacaaggtgagaatcgccgtgctgagcgacggcaccctgaacttcaccaacgtgaccgtgcaggacaccggcatgtacacctgcatggtgagcaacagcgtgggcaacaccaccgccagcgccaccctgaacgtgaccgccgccaccaccacccccttcagctacttcagcaccgtgaccgtggagaccatggagcccagccaggacgaggccagaaccaccgacaacaacgtgggccccacccccgtggtggactgggagaccaccaacgtgaccaccagcctgaccccccagagcaccagaagcaccgagaagaccttcaccatccccgtgaccgacatcaacagcggcatccccggcatcgacgaggtgatgaagaccaccaagatcatcatcggctgcttcgtggccatcaccctgatggccgccgtgatgctggtgatcttctacaagatgagaaagcagcaccacagacagaaccaccacgcccccaccagaaccgtggagatcatcaacgtggacgacgagatcaccggcgacacccccatggagagccacctgcccatgcccgccatcgagcacgagcacctgaaccactacaacagctacaagagccccttcaaccacaccaccaccgtgaacaccatcaacagcatccacagcagcgtgcacgagcccctgctgatcagaatgaacagcaaggacaacgtgcaggagacccagatctag

SEQ ID NO: 86705 - DNA, 1923 bp, synthetic construct; identical to SEQ ID NO: 86704
  misc_feature 1..1923: note = Description of Artificial Sequence: Synthetic coding sequence
  source 1..1923: mol_type = other DNA

SEQ ID NO: 86706 - DNA, 1923 bp, synthetic construct; identical to SEQ ID NO: 86704
  misc_feature 1..1923: note = Description of Artificial Sequence: Synthetic coding sequence
  source 1..1923: mol_type = other DNA

SEQ ID NO: 86707 - DNA, 1923 bp, synthetic construct; identical to SEQ ID NO: 86704
  misc_feature 1..1923: note = Description of Artificial Sequence: Synthetic coding sequence
  source 1..1923: mol_type = other DNA

SEQ ID NO: 86708 - DNA, 126 bp, synthetic construct
  misc_feature 1..126: note = Description of Artificial Sequence: Synthetic coding sequence
  source 1..126: mol_type = other DNA
atgctgaacaagatgaccctgcacccccagcagatcatgatcggccccagattcaacagagccctgttcgaccccctgctggtggtgctgctggccctgcagctgctggtggtggccggcctgtag

SEQ ID NO: 86709 - DNA, 4614 bp, synthetic construct
  misc_feature 1..4614: note = Description of Artificial Sequence: Synthetic coding sequence
  source 1..4614: mol_type = other DNA
atgaccaccaagagaaagatcatcggcagactggtgccctgcagatgcttcagaggcgaggaggagatcatcagcgtgctggactacagccactgcagcctgcagcaggtgcccaaggaggtgttcaacttcgagagaaccctggaggagctgtacctggacgccaaccagatcgaggagctgcccaagcagctgttcaactgccaggccctgagaaagctgagcatccccgacaacgacctgagcaacctgcccaccaccatcgccagcctggtgaacctgaaggagctggacatcagcaagaacggcgtgcaggagttccccgagaacatcaagtgctgcaagtgcctgaccatcatcgaggccagcgtgaaccccatcagcaagctgcccgacggcttcacccagctgctgaacctgacccagctgtacctgaacgacgccttcctggagttcctgcccgccaacttcggcagactggtgaagctgagaatcctggagctgagagagaaccacctgaagaccctgcccaagagcatgcacaagctggcccagctggagagactggacctgggcaacaacgagttcggcgagctgcccgaggtgctggaccagatccagaacctgagagagctgtggatggacaacaacgccctgcaggtgctgcccggcagcatcggcaagctgaagatgctggtgtacctggacatgagcaagaacagaatcgagaccgtggacatggacatcagcggctgcgaggccctggaggacctgctgctgagcagcaacatgctgcagcagctgcccgacagcatcggcctgctgaagaagctgaccaccctgaaggtggacgacaaccagctgaccatgctgcccaacaccatcggcaacctgagcctgctggaggagttcgactgcagctgcaacgagctggagagcctgcccagcaccatcggctacctgcacagcctgagaaccctggccgtggacgagaacttcctgcccgagctgcccagagagatcggcagctgcaagaacgtgaccgtgatgagcctgagaagcaacaagctggagttcctgcccgaggagatcggccagatgcagaagctgagagtgctgaacctgagcgacaacagactgaagaacctgcccttcagcttcaccaagctgaaggagctggccgccctgtggctgagcgacaaccagagcaaggccctgatccccctgcagaccgaggcccaccccgagaccaagcagagagtgctgaccaactacatgttcccccagcagcccagaggcgacgaggacttccagagcgacagcgacagcttcaaccccaccctgtgggaggagcagagacagcagagaatgaccgtggccttcgagttcgaggacaagaaggaggacgacgagaacgccggcaaggtgaaggacctgagctgccaggccccctgggagagaggccagagaggcatcaccctgcagcccgccagactgagcggcgactgctgcaccccctgggccagatgcgaccagcagatccaggacatgcccgtgccccagaacgacccccagctggcctggggctgcatcagcggcctgcagcaggagagaagcatgtgcacccccctgcccgtggccgcccagagcaccaccctgcccagcctgagcggcagacaggtggagatcaacctgaagagataccccaccccctaccccgaggacctgaagaacatggtgaagagcgtgcagaacctggtgggcaagcccagccacggcgtgagagtggagaacagcaaccccaccgccaacaccgagcagaccgtgaaggagaagtacgagcacaagtggcccgtggcccccaaggagatcaccgtggaggacagcttcgtgcaccccgccaacgagatgagaatcggcgagctgcaccccagcctggccgagacccccctgtacccccccaagctggtgctgctgggcaaggacaagaaggagagcaccgacgagagcgaggtggacaagacccactgcctgaacaacagcgtgagcagcggcacctacagcgactacagccccagccaggccagcagcggcagcagcaacaccagagtgaaggtgggcagcctgcagaccaccgccaaggacgccgtgcacaacagcctgtggggcaacagaatcgcccccagcttcccccagcccctggacagcaagcccctgctgagccagagagaggccgtgccccccggcaacatcccccagagacccgacagactgcccatgagcgacaccttcaccgacaactggaccgacggcagccactacgacaacaccggcttcgtggccgaggagaccaccgccgagaacgccaacagcaaccccctgctgagcagcaagagcagaagcaccagcagccacggcagaagacccctgatcagacaggacagaatcgtgggcgtgcccctggagctggagcagagcacccacagacacacccccgagaccgaggtgccccccagcaacccctggcagaactggaccagaacccccagccccttcgaggacagaaccgccttccccagcaagctggagaccacccccaccaccagccccctgcccgagagaaaggagcacatcaaggagagcaccgagatccccagccccttcagccccggcgtgccctgggagtaccacgacagcaaccccaacagaagcctgagcaacgtgttcagccagatccactgcagacccgagagcagcaagggcgtgatcagcatcagcaagagcaccgagagactgagccccctgatgaaggacatcaagagcaacaagttcaagaagagccagagcatcgacgagatcgacatcggcacctacaaggtgtacaacatccccctggagaactacgccagcggcagcgaccacctgggcagccacgagagacccgacaagatgctgggccccgagcacggcatgagcagcatgagcagaagccagagcgtgcccatgctggacgacgagatgctgacctacggcagcagcaagggcccccagcagcagaaggccagcatgaccaagaaggtgtaccagttcgaccagagcttcaacccccagggcagcgtggaggtgaaggccgagaagagaatccccccccccttccagcacaaccccgagtacgtgcagcaggccagcaagaacatcgccaaggacctgatcagccccagagcctacagaggctacccccccatggagcagatgttcagcttcagccagcccagcgtgaacgaggacgccgtggtgaacgcccagttcgccagccagggcgccagagccggcttcctgagaagagccgacagcctggtgagcgccaccgagatggccatgttcagaagagtgaacgagccccacgagctgccccccaccgacagatacggcagacccccctacagaggcggcctggacagacagagcagcgtgaccgtgaccgagagccagttcctgaagagaaacggcagatacgaggacgagcaccccagctaccaggaggtgaaggcccaggccggcagcttccccgtgaagaacctgacccagagaagacccctgagcgccagaagctacagcaccgagagctacggcgccagccagaccagacccgtgagcgccagacccaccatggccgccctgctggagaagatccccagcgactacaacctgggcaactacggcgacaagcccagcgacaacagcgacctgaagaccagacccacccccgtgaagggcgaggagagctgcggcaagatgcccgccgactggagacagcagctgctgagacacatcgaggccagaagactggacagaaacgccgcctacaagcacaacaccgtgaacctgggcatgctgccctacggcggcatcagcgccatgcacgccggcagaagcatgaccctgaacctgcagaccaagagcaagttcgaccaccaggagctgcccctgcagaagacccccagccagcagagcaacatcctggacaacggccaggaggacgtgagccccagcggccagtggaacccctaccccctgggcagaagagacgtgccccccgacaccatcaccaagaaggccggcagccacatccagaccctgatgggcagccagagcctgcagcacagaagcagagagcagcagccctacgagggcaacatcaacaaggtgaccatccagcagttccagagccccctgcccatccagatccccagcagccaggccaccagaggcccccagcccggcagatgcctgatccagaccaagggccagagaagcatggacggctaccccgagcagttctgcgtgagaatcgagaagaaccccggcctgggcttcagcatcagcggcggcatcagcggccagggcaaccccttcaagcccagcgacaagggcatcttcgtgaccagagtgcagcccgacggccccgccagcaacctgctgcagcccggcgacaagatcctgcaggccaacggccacagcttcgtgcacatggagcacgagaaggccgtgctgctgctgaagagcttccagaacaccgtggacctggtgatccagagagagctgaccgtgtag

SEQ ID NO: 86710 - DNA, 4488 bp, synthetic construct
  misc_feature 1..4488: note = Description of Artificial Sequence: Synthetic coding sequence
  source 1..4488: mol_type = other DNA
atgcagtgcctggagatgaccaccaagagaaagatcatcggcagactggtgccctgcagatgcttcagaggcgaggaggagatcatcagcgtgctggactacagccactgcagcctgcagcaggtgcccaaggaggtgttcaacttcgagagaaccctggaggagctgtacctggacgccaaccagatcgaggagctgcccaagcagctgttcaactgccaggccctgagaaagctgagcatccccgacaacgacctgagcaacctgcccaccaccatcgccagcctggtgaacctgaaggagctggacatcagcaagaacggcgtgcaggagttccccgagaacatcaagtgctgcaagtgcctgaccatcatcgaggccagcgtgaaccccatcagcaagctgcccgacggcttcacccagctgctgaacctgacccagctgtacctgaacgacgccttcctggagttcctgcccgccaacttcggcagactggtgaagctgagaatcctggagctgagagagaaccacctgaagaccctgcccaagagcatgcacaagctggcccagctggagagactggacctgggcaacaacgagttcggcgagctgcccgaggtgctggaccagatccagaacctgagagagctgtggatggacaacaacgccctgcaggtgctgcccggcagcatcggcaagctgaagatgctggtgtacctggacatgagcaagaacagaatcgagaccgtggacatggacatcagcggctgcgaggccctggaggacctgctgctgagcagcaacatgctgcagcagctgcccgacagcatcggcctgctgaagaagctgaccaccctgaaggtggacgacaaccagctgaccatgctgcccaacaccatcggcaacctgagcctgctggaggagttcgactgcagctgcaacgagctggagagcctgcccagcaccatcggctacctgcacagcctgagaaccctggccgtggacgagaacttcctgcccgagctgcccagagagatcggcagctgcaagaacgtgaccgtgatgagcctgagaagcaacaagctggagttcctgcccgaggagatcggccagatgcagaagctgagagtgctgaacctgagcgacaacagactgaagaacctgcccttcagcttcaccaagctgaaggagctggccgccctgtggctgagcgacaaccagagcaaggccctgatccccctgcagaccgaggcccaccccgagaccaagcagagagtgctgaccaactacatgttcccccagcagcccagaggcgacgaggacttccagagcgacagcgacagcttcaaccccaccctgtgggaggagcagagacagcagagaatgaccgtggccttcgagttcgaggacaagaaggaggacgacgagaacgccggcaaggtgaaggacctgagctgccaggccccctgggagagaggccagagaggcatcaccctgcagcccgccagactgagcggcgactgctgcaccccctgggccagatgcgaccagcagatccaggacatgcccgtgccccagaacgacccccagctggcctggggctgcatcagcggcctgcagcaggagagaagcatgtgcacccccctgcccgtggccgcccagagcaccaccctgcccagcctgagcggcagacaggtggagatcaacctgaagagataccccaccccctaccccgaggacctgaagaacatggtgaagagcgtgcagaacctggtgggcaagcccagccacggcgtgagagtggagaacagcaaccccaccgccaacaccgagcagaccgtgaaggagaagtacgagcacaagtggcccgtggcccccaaggagatcaccgtggaggacagcttcgtgcaccccgccaacgagatgagaatcggcgagctgcaccccagcctggccgagacccccctgtacccccccaagctggtgctgctgggcaaggacaagaaggagagcaccgacgagagcgaggtggacaagacccactgcctgaacaacagcgtgagcagcggcacctacagcgactacagccccagccaggccagcagcggcagcagcaacaccagagtgaaggtgggcagcctgcagaccaccgccaaggacgccgtgcacaacagcctgtggggcaacagaatcgcccccagcttcccccagcccctggacagcaagcccctgctgagccagagagaggccgtgccccccggcaacatcccccagagacccgacagactgcccatgagcgacaccttcaccgacaactggaccgacggcagccactacgacaacaccggcttcgtggccgaggagaccaccgccgagaacgccaacagcaaccccctgctgagcagcaagagcagaagcaccagcagccacggcagaagacccctgatcagacaggacagaatcgtgggcgtgcccctggagctggagcagagcacccacagacacacccccgagaccgaggtgccccccagcaacccctggcagaactggaccagaacccccagccccttcgaggacagaaccgccttccccagcaagctggagaccacccccaccaccagccccctgcccgagagaaaggagcacatcaaggagagcaccgagatccccagccccttcagccccggcgtgccctgggagtaccacgacagcaaccccaacagaagcctgagcaacgtgttcagccagatccactgcagacccgagagcagcaagggcgtgatcagcatcagcaagagcaccgagagactgagccccctgatgaaggacatcaagagcaacaagttcaagaagagccagagcatcgacgagatcgacatcggcacctacaaggtgtacaacatccccctggagaactacgccagcggcagcgaccacctgggcagccacgagagacccgacaagatgctgggccccgagcacggcatgagcagcatgagcagaagccagagcgtgcccatgctggacgacgagatgctgacctacggcagcagcaagggcccccagcagcagaaggccagcatgaccaagaaggtgtaccagttcgaccagagcttcaacccccagggcagcgtggaggtgaaggccgagaagagaatccccccccccttccagcacaaccccgagtacgtgcagcaggccagcaagaacatcgccaaggacctgatcagccccagagcctacagaggctacccccccatggagcagatgttcagcttcagccagcccagcgtgaacgaggacgccgtggtgaacgcccagttcgccagccagggcgccagagccggcttcctgagaagagccgacagcctggtgagcgccaccgagatggccatgttcagaagagtgaacgagccccacgagctgccccccaccgacagatacggcagacccccctacagaggcggcctggacagacagagcagcgtgaccgtgaccgagagccagttcctgaagagaaacggcagatacgaggacgagcaccccagctaccaggaggtgaaggcccaggccggcagcttccccgtgaagaacctgacccagagaagacccctgagcgccagaagctacagcaccgagagctacggcgccagccagaccagacccgtgagcgccagacccaccatggccgccctgctggagaagatccccagcgactacaacctgggcaactacggcgacaagcccagcgacaacagcgacctgaagaccagacccacccccgtgaagggcgaggagagctgcggcaagatgcccgccgactggagacagcagctgctgagacacatcgaggccagaagactggacagaacccccagccagcagagcaacatcctggacaacggccaggaggacgtgagccccagcggccagtggaacccctaccccctgggcagaagagacgtgccccccgacaccatcaccaagaaggccggcagccacatccagaccctgatgggcagccagagcctgcagcacagaagcagagagcagcagccctacgagggcaacatcaacaaggtgaccatccagcagttccagagccccctgcccatccagatccccagcagccaggccaccagaggcccccagcccggcagatgcctgatccagaccaagggccagagaagcatggacggctaccccgagcagttctgcgtgagaatcgagaagaaccccggcctgggcttcagcatcagcggcggcatcagcggccagggcaaccccttcaagcccagcgacaagggcatcttcgtgaccagagtgcagcccgacggccccgccagcaacctgctgcagcccggcgacaagatcctgcaggccaacggccacagcttcgtgcacatggagcacgagaaggccgtgctgctgctgaagagcttccagaacaccgtggacctggtgatccagagagagctgaccgtgtag

SEQ ID NO: 86711 - DNA, 540 bp, synthetic construct
  misc_feature 1..540: note = Description of Artificial Sequence: Synthetic coding sequence
  source 1..540: mol_type = other DNA
atgaccaccaagagaaagatcatcggcagactggtgccctgcagatgcttcagaggcgaggaggagatcatcagcgtgctggactacagccactgcagcctgcagcaggtgcccaaggaggtgttcaacttcgagagaaccctggaggagctgtacctggacgccaaccagatcgaggagctgcccaagcagctgttcaactgccaggccctgagaaagctgagcatccccgacaacgacctgagcaacctgcccaccaccatcgccagcctggtgaacctgaaggagctggacatcagcaagaacggcgtgcaggagttccccgagaacatcaagtgctgcaagtgcctgaccatcatcgaggccagcgtgaaccccatcagcaagctgcccgacggcttcacccagctgctgaacctgacccagctgtacctgaacgacgccttcctggagttcctgcccgccaacttcggcagactggtgaagctgagaatcctggagctgagagagaaccacctgaagaccctgcccaagatctag

SEQ ID NO: 86712 - DNA, 3942 bp, synthetic construct
  misc_feature 1..3942: note = Description of Artificial Sequence: Synthetic coding sequence
  source 1..3942: mol_type = other DNA
agaagcatgcacaagctggcccagctggagagactggacctgggcaacaacgagttcggcgagctgcccgaggtgctggaccagatccagaacctgagagagctgtggatggacaacaacgccctgcaggtgctgcccggcagcatcggcaagctgaagatgctggtgtacctggacatgagcaagaacagaatcgagaccgtggacatggacatcagcggctgcgaggccctggaggacctgctgctgagcagcaacatgctgcagcagctgcccgacagcatcggcctgctgaagaagctgaccaccctgaaggtggacgacaaccagctgaccatgctgcccaacaccatcggcaacctgagcctgctggaggagttcgactgcagctgcaacgagctggagagcctgcccagcaccatcggctacctgcacagcctgagaaccctggccgtggacgagaacttcctgcccgagctgcccagagagatcggcagctgcaagaacgtgaccgtgatgagcctgagaagcaacaagctggagttcctgcccgaggagatcggccagatgcagaagctgagagtgctgaacctgagcgacaacagactgaagaacctgcccttcagcttcaccaagctgaaggagctggccgccctgtggctgagcgacaaccagagcaaggccctgatccccctgcagaccgaggcccaccccgagaccaagcagagagtgctgaccaactacatgttcccccagcagcccagaggcgacgaggacttccagagcgacagcgacagcttcaaccccaccctgtgggaggagcagagacagcagagaatgaccgtggccttcgagttcgaggacaagaaggaggacgacgagaacgccggcaaggtgaaggacctgagctgccaggccccctgggagagaggccagagaggcatcaccctgcagcccgccagactgagcggcgactgctgcaccccctgggccagatgcgaccagcagatccaggacatgcccgtgccccagaacgacccccagctggcctggggctgcatcagcggcctgcagcaggagagaagcatgtgcacccccctgcccgtggccgcccagagcaccaccctgcccagcctgagcggcagacaggtggagatcaacctgaagagataccccaccccctaccccgaggacctgaagaacatggtgaagagcgtgcagaacctggtgggcaagcccagccacggcgtgagagtggagaacagcaaccccaccgccaacaccgagcagaccgtgaaggagaagtacgagcacaagtggcccgtggcccccaaggagatcaccgtggaggacagcttcgtgcaccccgccaacgagatgagaatcggcgagctgcaccccagcctggccgagacccccctgtacccccccaagctggtgctgctgggcaaggacaagaaggagagcaccgacgagagcgaggtggacaagacccactgcctgaacaacagcgtgagcagcggcacctacagcgactacagccccagccaggccagcagcggcagcagcaacaccagagtgaaggtgggcagcctgcagaccaccgccaaggacgccgtgcacaacagcctgtggggcaacagaatcgcccccagcttcccccagcccctggacagcaagcccctgctgagccagagagaggccgtgccccccggcaacatcccccagagacccgacagactgcccatgagcgacaccttcaccgacaactggaccgacggcagccactacgacaacaccggcttcgtggccgaggagaccaccgccgagaacgccaacagcaaccccctgctgagcagcaagagcagaagcaccagcagccacggcagaagacccctgatcagacaggacagaatcgtgggcgtgcccctggagctggagcagagcacccacagacacacccccgagaccgaggtgccccccagcaacccctggcagaactggaccagaacccccagccccttcgaggacagaaccgccttccccagcaagctggagaccacccccaccaccagccccctgcccgagagaaaggagcacatcaaggagagcaccgagatccccagccccttcagccccggcgtgccctgggagtaccacgacagcaaccccaacagaagcctgagcaacgtgttcagccagatccactgcagacccgagagcagcaagggcgtgatcagcatcagcaagagcaccgagagactgagccccctgatgaaggacatcaagagcaacaagttcaagaagagccagagcatcgacgagatcgacatcggcacctacaaggtgtacaacatccccctggagaactacgccagcggcagcgaccacctgggcagccacgagagacccgacaagatgctgggccccgagcacggcatgagcagcatgagcagaagccagagcgtgcccatgctggacgacgagatgctgacctacggcagcagcaagggcccccagcagcagaaggccagcatgaccaagaaggtgtaccagttcgaccagagcttcaacccccagggcagcgtggaggtgaaggccgagaagagaatccccccccccttccagcacaaccccgagtacgtgcagcaggccagcaagaacatcgccaaggacctgatcagccccagagcctacagaggctacccccccatggagcagatgttcagcttcagccagcccagcgtgaacgaggacgccgtggtgaacgcccagttcgccagccagggcgccagagccggcttcctgagaagagccgacagcctggtgagcgccaccgagatggccatgttcagaagagtgaacgagccccacgagctgccccccaccgacagatacggcagacccccctacagaggcggcctggacagacagagcagcgtgaccgtgaccgagagccagttcctgaagagaaacggcagatacgaggacgagcaccccagctaccaggaggtgaaggcccaggccggcagcttccccgtgaagaacctgacccagagaagacccctgagcgccagaagctacagcaccgagagctacggcgccagccagaccagacccgtgagcgccagacccaccatggccgccctgctggagaagatccccagcgactacaacctgggcaactacggcgacaagcccagcgacaacagcgacctgaagaccagacccacccccgtgaagggcgaggagagctgcggcaagatgcccgccgactggagacagcagctgctgagacacatcgaggccagaagactggacagaacccccagccagcagagcaacatcctggacaacggccaggaggacgtgagccccagcggccagtggaacccctaccccctgggcagaagagacgtgccccccgacaccatcaccaagaaggccggcagccacatccagaccctgatgggcagccagagcctgcagcacagaagcagagagcagcagccctacgagggcaacatcaacaaggtgaccatccagcagttccagagccccctgcccatccagatccccagcagccaggccaccagaggcccccagcccggcagatgcctgatccagaccaagggccagagaagcatggacggctaccccgagcagttctgcgtgagaatcgagaagaaccccggcctgggcttcagcatcagcggcggcatcagcggccagggcaaccccttcaagcccagcgacaagggcatcttcgtgaccagagtgcagcccgacggccccgccagcaacctgctgcagcccggcgacaagatcctgcaggccaacggccacagcttcgtgcacatggagcacgagaaggccgtgctgctgctgaagagcttccagaacaccgtggacctggtgatccagagagagctgaccgtgtag

SEQ ID NO: 86713 - DNA, 654 bp, synthetic construct
  misc_feature 1..654: note = Description of Artificial Sequence: Synthetic coding sequence
  source 1..654: mol_type = other DNA
atgatggagaacctgatcagaggcagaaaccccccccagtaccagagaagcccctgcaaggaggtgagagccgccctgagaaagagacccgaggaggagctgcagtgcctggagatgaccaccaagagaaagatcatcggcagactggtgccctgcagatgcttcagaggcgaggaggagatcatcagcgtgctggactacagccactgcagcctgcagcaggtgcccaaggaggtgttcaacttcgagagaaccctggaggagctgtacctggacgccaaccagatcgaggagctgcccaagcagctgttcaactgccaggccctgagaaagctgagcatccccgacaacgacctgagcaacctgcccaccaccatcgccagcctggtgaacctgaaggagctggacatcagcaagaacggcgtgcaggagttccccgagaacatcaagtgctgcaagtgcctgaccatcatcgaggccagcgtgaaccccatcagcaagctgcccgacggcttcacccagctgctgaacctgacccagctgtacctgaacgacgccttcctggagttcctgcccgccaacttcggcagactggtgaagctgagaatcctggagctgagagagaaccacctgaagaccctgcccaacatctag

SEQ ID NO: 86714 - DNA, 2466 bp, synthetic construct
  misc_feature 1..2466: note = Description of Artificial Sequence: Synthetic coding sequence
  source 1..2466: mol_type = other DNA
atgaccaagatgctgggcaagctgagaatcgcccccagcttcccccagcccctggacagcaagcccctgctgagccagagagaggccgtgccccccggcaacatcccccagagacccgacagactgcccatgagcgacaccttcaccgacaactggaccgacggcagccactacgacaacaccggcttcgtggccgaggagaccaccgccgagaacgccaacagcaaccccctgctgagcagcaagagcagaagcaccagcagccacggcagaagacccctgatcagacaggacagaatcgtgggcgtgcccctggagctggagcagagcacccacagacacacccccgagaccgaggtgccccccagcaacccctggcagaactggaccagaacccccagccccttcgaggacagaaccgccttccccagcaagctggagaccacccccaccaccagccccctgcccgagagaaaggagcacatcaaggagagcaccgagatccccagccccttcagccccggcgtgccctgggagtaccacgacagcaaccccaacagaagcctgagcaacgtgttcagccagatccactgcagacccgagagcagcaagggcgtgatcagcatcagcaagagcaccgagagactgagccccctgatgaaggacatcaagagcaacaagttcaagaagagccagagcatcgacgagatcgacatcggcacctacaaggtgtacaacatccccctggagaactacgccagcggcagcgaccacctgggcagccacgagagacccgacaagatgctgggccccgagcacggcatgagcagcatgagcagaagccagagcgtgcccatgctggacgacgagatgctgacctacggcagcagcaagggcccccagcagcagaaggccagcatgaccaagaaggtgtaccagttcgaccagagcttcaacccccagggcagcgtggaggtgaaggccgagaagagaatccccccccccttccagcacaaccccgagtacgtgcagcaggccagcaagaacatcgccaaggacctgatcagccccagagcctacagaggctacccccccatggagcagatgttcagcttcagccagcccagcgtgaacgaggacgccgtggtgaacgcccagttcgccagccagggcgccagagccggcttcctgagaagagccgacagcctggtgagcgccaccgagatggccatgttcagaagagtgaacgagccccacgagctgccccccaccgacagatacggcagacccccctacagaggcggcctggacagacagagcagcgtgaccgtgaccgagagccagttcctgaagagaaacggcagatacgaggacgagcaccccagctaccaggaggtgaaggcccaggccggcagcttccccgtgaagaacctgacccagagaagacccctgagcgccagaagctacagcaccgagagctacggcgccagccagaccagacccgtgagcgccagacccaccatggccgccctgctggagaagatccccagcgactacaacctgggcaactacggcgacaagcccagcgacaacagcgacctgaagaccagacccacccccgtgaagggcgaggagagctgcggcaagatgcccgccgactggagacagcagctgctgagacacatcgaggccagaagactggacagaaacgccgcctacaagcacaacaccgtgaacctgggcatgctgccctacggcggcatcagcgccatgcacgccggcagaagcatgaccctgaacctgcagaccaagagcaagttcgaccaccaggagctgcccctgcagaagacccccagccagcagagcaacatcctggacaacggccaggaggacgtgagccccagcggccagtggaacccctaccccctgggcagaagagacgtgccccccgacaccatcaccaagaaggccggcagccacatccagaccctgatgggcagccagagcctgcagcacagaagcagagagcagcagccctacgagggcaacatcaacaaggtgaccatccagcagttccagagccccctgcccatccagatccccagcagccaggccaccagaggcccccagcccggcagatgcctgatccagaccaagggccagagaagcatggacggctaccccgagcagttctgcgtgagaatcgagaagaaccccggcctgggcttcagcatcagcggcggcatcagcggccagggcaaccccttcaagcccagcgacaagggcatcttcgtgaccagagtgcagcccgacggccccgccagcaacctgctgcagcccggcgacaagatcctgcaggccaacggccacagcttcgtgcacatggagcacgagaaggccgtgctgctgctgaagagcttccagaacaccgtggacctggtgatccagagagagctgaccgtgtag

SEQ ID NO: 86715 - DNA, 2433 bp, synthetic construct
  misc_feature 1..2433: note = Description of Artificial Sequence: Synthetic coding sequence
  source 1..2433: mol_type = other DNA
atgatccccgtgaccgagctgagatacttcgccgacacccagcccgcctacagaatcctgaagccctggtgggacgtgttcaccgactacatcagcatcgtgatgctgatgatcgccgtgttcggcggcaccctgcaggtgacccaggacaagatgatctgcctgccctgcaagtgggtgaccaaggacagctgcaacgacagcttcagaggctgggccgcccccggccccgagcccacctaccccaacagcaccatcctgcccacccccgacaccggccccaccggcatcaagtacgacctggacagacaccagtacaactacgtggacgccgtgtgctacgagaacagactgcactggttcgccaagtacttcccctacctggtgctgctgcacaccctgatcttcctggcctgcagcaacttctggttcaagttccccagaaccagcagcaagctggagcacttcgtgagcatcctgctgaagtgcttcgacagcccctggaccaccagagccctgagcgagaccgtggtggaggagagcgaccccaagcccgccttcagcaagatgaacggcagcatggacaagaagagcagcaccgtgagcgaggacgtggaggccaccgtgcccatgctgcagagaaccaagagcagaatcgagcagggcatcgtggacagaagcgagaccggcgtgctggacaagaaggagggcgagcaggccaaggccctgttcgagaaggtgaagaagttcagaacccacgtggaggagggcgacatcgtgtacagactgtacatgagacagaccatcatcaaggtgatcaagttcatcctgatcatctgctacaccgtgtactacgtgcacaacatcaagttcgacgtggactgcaccgtggacatcgagagcctgaccggctacagaacctacagatgcgcccaccccctggccaccctgttcaagatcctggccagcttctacatcagcctggtgatcttctacggcctgatctgcatgtacaccctgtggtggatgctgagaagaagcctgaagaagtacagcttcgagagcatcagagaggagagcagctacagcgacatccccgacgtgaagaacgacttcgccttcatgctgcacctgatcgaccagtacgaccccctgtacagcaagagattcgccgtgttcctgagcgaggtgagcgagaacaagctgagacagctgaacctgaacaacgagtggaccctggacaagctgagacagagactgaccaagaacgcccaggacaagctggagctgcacctgttcatgctgagcggcatccccgacaccgtgttcgacctggtggagctggaggtgctgaagctggagctgatccccgacgtgaccatcccccccagcatcgcccagctgaccggcctgaaggagctgtggctgtaccacaccgccgccaagatcgaggcccccgccctggccttcctgagagagaacctgagagccctgcacatcaagttcaccgacatcaaggagatccccctgtggatctacagcctgaagaccctggaggagctgcacctgaccggcaacctgagcgccgagaacaacagatacatcgtgatcgacggcctgagagagctgaagagactgaaggtgctgagactgaagagcaacctgagcaagctgccccaggtggtgaccgacgtgggcgtgcacctgcagaagctgagcatcaacaacgagggcaccaagctgatcgtgctgaacagcctgaagaagatggccaacctgaccgagctggagctgatcagatgcgacctggagagaatcccccacagcatcttcagcctgcacaacctgcaggagatcgacctgaaggacaacaacctgaagaccatcgaggagatcatcagcttccagcacctgcacagactgacctgcctgaagctgtggtacaaccacatcgcctacatccccatccagatcggcaacctgaccaacctggagagactgtacctgaacagaaacaagatcgagaagatccccacccagctgttctactgcagaaagctgagatacctggacctgagccacaacaacctgaccttcctgcccgccgacatcggcctgctgcagaacctgcagaacctggccatcaccgccaacagaatcgagaccctgccccccgagctgttccagtgcagaaagctgagagccctgcacctgggcaacaacgtgctgcagagcctgcccagcagagtgggcgagctgaccaacctgacccagatcgagctgagaggcaacagactggagtgcctgcccgtggagctgggcgagtgccccctgctgaagagaagcggcctggtggtggaggaggacctgttcaacaccctgccccccgaggtgaaggagagactgtggagagccgacaaggagcaggcctag

SEQ ID NO: 86716 - DNA, 2433 bp, synthetic construct; identical to SEQ ID NO: 86715
  misc_feature 1..2433: note = Description of Artificial Sequence: Synthetic coding sequence
  source 1..2433: mol_type = other DNA

SEQ ID NO: 86717 - DNA, 2433 bp, synthetic construct; identical to SEQ ID NO: 86715
  misc_feature 1..2433: note = Description of Artificial Sequence: Synthetic coding sequence
  source 1..2433: mol_type = other DNA

SEQ ID NO: 86718 - DNA, 2412 bp, synthetic construct
  misc_feature 1..2412: note = Description of Artificial Sequence: Synthetic coding sequence
  source 1..2412: mol_type = other DNA
atgatcaccctgaccgagctgaagtgcctggccgacgcccagagcagctaccacatcctgaagccctggtgggacgtgttctggtactacatcaccctgatcatgctgctggtggccgtgctggccggcgccctgcagctgacccagagcagagtgctgtgctgcctgccctgcaaggtggagttcgacaaccactgcgccgtgccctgggacatcctgaaggccagcatgaacaccagcagcaaccccggcacccccctgcccctgcccctgagaatccagaacgacctgcacagacagcagtacagctacatcgacgccgtgtgctacgagaagcagctgcactggttcgccaagttcttcccctacctggtgctgctgcacaccctgatcttcgccgcctgcagcaacttctggctgcactaccccagcaccagcagcagactggagcacttcgtggccatcctgcacaagtgcttcgacagcccctggaccaccagagccctgagcgagaccgtggccgagcagagcgtgagacccctgaagctgagcaagagcaagatcctgctgagcagcagcggctgcagcgccgacatcgacagcggcaagcagagcctgccctacccccagcccggcctggagagcgccggcatcgagagccccaccagcagcgtgctggacaagaaggagggcgagcaggccaaggccatcttcgagaaggtgaagagattcagaatgcacgtggagcagaaggacatcatctacagagtgtacctgaagcagatcatcgtgaaggtgatcctgttcgtgctgatcatcacctacgtgccctacttcctgacccacatcaccctggagatcgactgcagcgtggacgtgcaggccttcaccggctacaagagataccagtgcgtgtacagcctggccgagatcttcaaggtgctggccagcttctacgtgatcctggtgatcctgtacggcctgaccagcagctacagcctgtggtggatgctgagaagcagcctgaagcagtacagcttcgaggccctgagagagaagagcaactacagcgacatccccgacgtgaagaacgacttcgccttcatcctgcacctggccgaccagtacgaccccctgtacagcaagagattcagcatcttcctgagcgaggtgagcgagaacaagctgaagcagatcaacctgaacaacgagtggaccgtggagaagctgaagagcaagctggtgaagaacgcccaggacaagatcgagctgcacctgttcatgctgaacggcctgcccgacaacgtgttcgagctgaccgagatggaggtgctgagcctggagctgatccccgaggtgaagctgcccagcgccgtgagccagctggtgaacctgaaggagctgagagtgtaccacagcagcctggtggtggaccaccccgccctggccttcctggaggagaacctgaagatcctgagactgaagttcaccgagatgggcaagatccccagatgggtgttccacctgaagaacctgaaggagctgtacctgagcggctgcgtgctgcccgagcagctgagcaccatgcagctggagggcttccaggacctgaagaacctgagaaccctgtacctgaagagcagcctgagcagaatcccccaggtggtgaccgacctgctgcccagcctgcagaagctgagcctggacaacgagggcagcaagctggtggtgctgaacaacctgaagaagatggtgaacctgaagagcctggagctgatcagctgcgacctggagagaatcccccacagcatcttcagcctgaacaacctgcacgagctggacctgagagagaacaacctgaagaccgtggaggagatcatcagcttccagcacctgcagaacctgagctgcctgaagctgtggcacaacaacatcgcctacatccccgcccagatcggcgccctgagcaacctggagcagctgagcctggaccacaacaacatcgagaacctgcccctgcagctgttcctgtgcaccaagctgcactacctggacctgagctacaaccacctgaccttcatccccgaggagatccagtacctgagcaacctgcagtacttcgccgtgaccaacaacaacatcgagatgctgcccgacggcctgttccagtgcaagaagctgcagtgcctgctgctgggcaagaacagcctgatgaacctgagcccccacgtgggcgagctgagcaacctgacccacctggagctgatcggcaactacctggagaccctgccccccgagctggagggctgccagagcctgaagagaaactgcctgatcgtggaggagaacctgctgaacaccctgcccctgcccgtgaccgagagactgcagacctgcctggacaagtgctag

SEQ ID NO: 86719 - DNA, 2412 bp, synthetic construct; identical to SEQ ID NO: 86718
  misc_feature 1..2412: note = Description of Artificial Sequence: Synthetic coding sequence
  source 1..2412: mol_type = other DNA

SEQ ID NO: 86720 - DNA, 2412 bp, synthetic construct; identical to SEQ ID NO: 86718
  misc_feature 1..2412: note = Description of Artificial Sequence: Synthetic coding sequence
  source 1..2412: mol_type = other DNA

SEQ ID NO: 86721 - DNA, 312 bp, synthetic construct
  misc_feature 1..312: note = Description of Artificial Sequence: Synthetic coding sequence
  source 1..312: mol_type = other DNA
atgatcaccctgaccgagctgaagtgcctggccgacgcccagagcagctaccacatcctgaagccctggtgggacgtgttctggtactacatcaccctgatcatgctgctggtggccgtgctggccggcgccctgcagctgacccagagcagagtgctgtgctgcctgccctgcaaggtggagttcgacaaccactgcgccgtgccctgggacatcctgaaggccagcatgaacaccagcagcaaccccggcacccccctgcccctgcccctgagaatccagaacgacctgcacagacagcagtacagctag

SEQ ID NO: 86722 - DNA, 693 bp, synthetic construct
  misc_feature 1..693: note = Description of Artificial Sequence: Synthetic coding sequence
  source 1..693: mol_type = other DNA
atgatcaccctgaccgagctgaagtgcctggccgacgcccagagcagctaccacatcctgaagccctggtgggacgtgttctggtactacatcaccctgatcatgctgctggtggccgtgctggccggcgccctgcagctgacccagagcagagtgctgtgctgcctgccctgcaaggtggagttcgacaaccactgcgccgtgccctgggacatcctgaaggccagcatgaacaccagcagcaaccccggcacccccctgcccctgcccctgagaatccagaacgacctgcacagacagcagtacagctacatcgacgccgtgtgctacgagaagcagctgcactggttcgccaagttcttcccctacctggtgctgctgcacaccctgatcttcgccgcctgcagcaacttctggctgcactaccccagcaccagcagcagactggagcacttcgtggccatcctgcacaagtgcttcgacagcccctggaccaccagagccctgagcgagaccgtggccgagcagagcgtgagacccctgaagctgagcaagagcaagatcctgctgagcagcagcggctgcagcgccgacatcgacagcggcaagcagagcctgccctacccccagcccggcctggagagcgccggcatcgagagccccaccagcagcgtgctgaccgagggcggctag

SEQ ID NO: 86723 - DNA, 2412 bp, synthetic construct
  misc_feature 1..2412: note = Description of Artificial Sequence: Synthetic coding sequence
  source 1..2412: mol_type = other DNA
atgatccccgtgaccgagttcagacagttcagcgagcagcagcccgccttcagagtgctgaagccctggtgggacgtgttcaccgactacctgagcgtggccatgctgatgatcggcgtgttcggctgcaccctgcaggtgatgcaggacaagatcatctgcctgcccaagagagtgcagcccgcccagaaccacagcagcctgagcaacgtgagccaggccgtggccagcaccacccccctgcccccccccaagcccagccccgccaaccccatcaccgtggagatgaagggcctgaagaccgacctggacctgcagcagtacagcttcatcaaccagatgtgctacgagagagccctgcactggtacgccaagtacttcccctacctggtgctgatccacaccctggtgttcatgctgtgcagcaacttctggttcaagttccccggcagcagcagcaagatcgagcacttcatcagcatcctgggcaagtgcttcgacagcccctggaccaccagagccctgagcgaggtgagcggcgaggacagcgaggagaaggacaacagaaagaacaacatgaacagaagcaacaccatccagagcggccccgaggacagcctggtgaacagccagagcctgaagagcatccccgagaagttcgtggtggacaagagcaccgccggcgccctggacaagaaggagggcgagcaggccaaggccctgttcgagaaggtgaagaagttcagactgcacgtggaggagggcgacatcctgtacgccatgtacgtgagacagaccgtgctgaaggtgatcaagttcctgatcatcatcgcctacaacagcgccctggtgagcaaggtgcagttcaccgtggactgcaacgtggacatccaggacatgaccggctacaagaacttcagctgcaaccacaccatggcccacctgttcagcaagctgagcttctgctacctgtgcttcgtgagcatctacggcctgacctgcctgtacaccctgtactggctgttctacagaagcctgagagagtacagcttcgagtacgtgagacaggagaccggcatcgacgacatccccgacgtgaagaacgacttcgccttcatgctgcacatgatcgaccagtacgaccccctgtacagcaagagattcgccgtgttcctgagcgaggtgagcgagaacaagctgaagcagctgaacctgaacaacgagtggacccccgacaagctgagacagaagctgcagaccaacgcccacaacagactggagctgcccctgatcatgctgagcggcctgcccgacaccgtgttcgagatcaccgagctgcagagcctgaagctggagatcatcaagaacgtgatgatccccgccaccatcgcccagctggacaacctgcaggagctgagcctgcaccagtgcagcgtgaagatccacagcgccgccctgagcttcctgaaggagaacctgaaggtgctgagcgtgaagttcgacgacatgagagagctgcccccctggatgtacggcctgagaaacctggaggagctgtacctggtgggcagcctgagccacgacatcagcagaaacgtgaccctggagagcctgagagacctgaagagcctgaagatcctgagcatcaagagcaacgtgagcaagatcccccaggccgtggtggacgtgagcagccacctgcagaagatgtgcatccacaacgacggcaccaagctggtgatgctgaacaacctgaagaagatgaccaacctgaccgagctggagctggtgcactgcgacctggagagaatcccccacgccgtgttcagcctgctgagcctgcaggagctggacctgaaggagaacaacctgaagagcatcgaggagatcgtgagcttccagcacctgagaaagctgaccgtgctgaagctgtggcacaacagcatcacctacatccccgagcacatcaagaagctgaccagcctggagagactgagcttcagccacaacaagatcgaggtgctgcccagccacctgttcctgtgcaacaagatcagatacctggacctgagctacaacgacatcagattcatcccccccgagatcggcgtgctgcagagcctgcagtacttcagcatcacctgcaacaaggtggagagcctgcccgacgagctgtacttctgcaagaagctgaagaccctgaagatcggcaagaacagcctgagcgtgctgagccccaagatcggcaacctgctgttcctgagctacctggacgtgaagggcaaccacttcgagatcctgccccccgagctgggcgactgcagagccctgaagagagccggcctggtggtggaggacgccctgttcgagaccctgcccagcgacgtgagagagcagatgaagaccgagtag

SEQ ID NO: 86724 - DNA, 2577 bp, synthetic construct
  misc_feature 1..2577: note = Description of Artificial Sequence: Synthetic coding sequence
  source 1..2577: mol_type = other DNA
atgttcaccctggccgaggtggccagcctgaacgacatccagcccacctacagaatcctgaagccctggtgggacgtgttcatggactacctggccgtggtgatgctgatggtggccatcttcgccggcaccatgcagctgaccaaggaccaggtggtgtgcctgcccgtgctgcccagccccgtgaacagcaaggcccacaccccccccggcaacgccgaggtgaccaccaacatccccaagatggaggccgccaccaaccaggaccaggacggcagaaccaccaacgacatcagcttcggcaccagcgccgtgacccccgacatccccctgagagccacctaccccagaaccgacttcgccctgcccaaccaggaggccaagaaggagaagaaggaccccaccggcagaaagaccaacctggacttccagcagtacgtgttcatcaaccagatgtgctaccacctggccctgccctggtacagcaagtacttcccctacctggccctgatccacaccatcatcctgatggtgagcagcaacttctggttcaagtaccccaagacctgcagcaaggtggagcacttcgtgagcatcctgggcaagtgcttcgagagcccctggaccaccaaggccctgagcgagaccgcctgcgaggacagcgaggagaacaagcagagaatcaccggcgcccagaccctgcccaagcacgtgagcaccagcagcgacgagggcagccccagcgccagcacccccatgatcaacaagaccggcttcaagttcagcgccgagaagcccgtgatcgaggtgcccagcatgaccatcctggacaagaaggacggcgagcaggccaaggccctgttcgagaaggtgagaaagttcagagcccacgtggaggacagcgacctgatctacaagctgtacgtggtgcagaccgtgatcaagaccgccaagttcatcttcatcctgtgctacaccgccaacttcgtgaacgccatcagcttcgagcacgtgtgcaagcccaaggtggagcacctgatcggctacgaggtgttcgagtgcacccacaacatggcctacatgctgaagaagctgctgatcagctacatcagcatcatctgcgtgtacggcttcatctgcctgtacaccctgttctggctgttcagaatccccctgaaggagtacagcttcgagaaggtgagagaggagagcagcttcagcgacatccccgacgtgaagaacgacttcgccttcctgctgcacatggtggaccagtacgaccagctgtacagcaagagattcggcgtgttcctgagcgaggtgagcgagaacaagctgagagagatcagcctgaaccacgagtggaccttcgagaagctgagacagcacatcagcagaaacgcccaggacaagcaggagctgcacctgttcatgctgagcggcgtgcccgacgccgtgttcgacctgaccgacctggacgtgctgaagctggagctgatccccgaggccaagatccccgccaagatcagccagatgaccaacctgcaggagctgcacctgtgccactgccccgccaaggtggagcagaccgccttcagcttcctgagagaccacctgagatgcctgcacgtgaagttcaccgacgtggccgagatccccgcctgggtgtacctgctgaagaacctgagagagctgtacctgatcggcaacctgaacagcgagaacaacaagatgatcggcctggagagcctgagagagctgagacacctgaagatcctgcacgtgaagagcaacctgaccaaggtgcccagcaacatcaccgacgtggccccccacctgaccaagctggtgatccacaacgacggcaccaagctgctggtgctgaacagcctgaagaagatgatgaacgtggccgagctggagctgcagaactgcgagctggagagaatcccccacgccatcttcagcctgagcaacctgcaggagctggacctgaagagcaacaacatcagaaccatcgaggagatcatcagcttccagcacctgaagagactgacctgcctgaagctgtggcacaacaagatcgtgaccatcccccccagcatcacccacgtgaagaacctggagagcctgtacttcagcaacaacaagctggagagcctgcccgtggccgtgttcagcctgcagaagctgagatgcctggacgtgagctacaacaacatcagcatgatccccatcgagatcggcctgctgcagaacctgcagcacctgcacatcaccggcaacaaggtggacatcctgcccaagcagctgttcaagtgcatcaagctgagaaccctgaacctgggccagaactgcatcaccagcctgcccgagaaggtgggccagctgagccagctgacccagctggagctgaagggcaactgcctggacagactgcccgcccagctgggccagtgcagaatgctgaagaagagcggcctggtggtggaggaccacctgttcgacaccctgcccctggaggtgaaggaggccctgaaccaggacatcaacatccccttcgccaacggcatctag

SEQ ID NO: 86725 - DNA, 2577 bp, synthetic construct; identical to SEQ ID NO: 86724
  misc_feature 1..2577: note = Description of Artificial Sequence: Synthetic coding sequence
  source 1..2577: mol_type = other DNA

SEQ ID NO: 86726 - DNA, 354 bp, synthetic construct
  misc_feature 1..354: note = Description of Artificial Sequence: Synthetic coding sequence
  source 1..354: mol_type = other DNA
atgttcaccctggccgaggtggccagcctgaacgacatccagcccacctacagaatcctgaagccctggtgggacgtgttcatggactacctggccgtggtgatgctgatggtggccatcttcgccggcaccatgcagctgaccaaggaccaggtggtgtgcctgcccgtgctgcccagccccgtgaacagcaaggcccacaccccccccggcaacgccgaggtgaccaccaacatccccaagatggaggccgccaccaaccaggaccaggacggcagaaccaccaacgacatcagcttcggcaccagcgccgtgacccccgacatccccctgagagccacctaccccagatag

SEQ ID NO: 86727 - DNA, 825 bp, synthetic construct
  misc_feature 1..825: note = Description of Artificial Sequence: Synthetic coding sequence
  source 1..825: mol_type = other DNA
atgttcaccctggccgaggtggccagcctgaacgacatccagcccacctacagaatcctgaagccctggtgggacgtgttcatggactacctggccgtggtgatgctgatggtggccatcttcgccggcaccatgcagctgaccaaggaccaggtggtgtgcctgcccgtgctgcccagccccgtgaacagcaaggcccacaccccccccggcaacgccgaggtgaccaccaacatccccaagatggaggccgccaccaaccaggaccaggacggcagaaccaccaacgacatcagcttcggcaccagcgccgtgacccccgacatccccctgagagccacctaccccagaaccgacttcgccctgcccaaccaggaggccaagaaggagaagaaggaccccaccggcagaaagaccaacctggacttccagcagtacgtgttcatcaaccagatgtgctaccacctggccctgccctggtacagcaagtacttcccctacctggccctgatccacaccatcatcctgatggtgagcagcaacttctggttcaagtaccccaagacctgcagcaaggtggagcacttcgtgagcatcctgggcaagtgcttcgagagcccctggaccaccaaggccctgagcgagaccgcctgcgaggacagcgaggagaacaagcagagaatcaccggcgcccagaccctgcccaagcacgtgagcaccagcagcgacgagggcagccccagcgccagcacccccatgatcaacaagaccggcttcaagttcagcgccgagaagcccgtgatcgaggtgcccagcatgacctag

SEQ ID NO: 86728 - DNA, 96 bp, synthetic construct
  misc_feature 1..96: note = Description of Artificial Sequence: Synthetic coding sequence
  source 1..96: mol_type = other DNA
atgttcaccctggccgaggtggccagcctgaacgacatccagcccacctacagaatcctgaagccctggtgggacgtgttcatggactacctgtag

SEQ ID NO: 86729 - DNA, 564 bp, synthetic construct
  misc_feature 1..564: note = Description of Artificial Sequence: Synthetic coding sequence
  source 1..564: mol_type = other DNA
atgttcaccctggccgaggtggccagcctgaacgacatccagcccacctacagaatcctgaagccctggtgggacgtgttcatggactacctggccgtggtgatgctgatggtggccatcttcgccggcaccatgcagctgaccaaggaccaggtggtgtgcctgcccgtgctgcccagccccgtgaacagcaaggcccacaccccccccggcaacgccgaggtgaccaccaacatccccaagatggaggccgccaccaaccaggaccaggacggcagaaccaccaacgacatcagcttcggcaccagcgccgtgacccccgacatccccctgagagccacctaccccagaaccgacttcgccctgcccaaccaggaggccaagaaggagaagaaggaccccaccggcagaaagaccaacctggacttccagcagtacgtgttcatcaaccagatgtgctaccacctggccctgccctggtacagcaagtacttcccctacctggccctgatccacaccatcatcctgatggtgagcagcaacttctggttcaagtacccctag

SEQ ID NO: 86730 - DNA, 369 bp, synthetic construct
  misc_feature 1..369: note = Description of Artificial Sequence: Synthetic coding sequence
  source 1..369: mol_type = other DNA
atgttcaccctggccgaggtggccagcctgaacgacatccagcccacctacagaatcctgaagccctggtgggacgtgttcatggactacctggccgtggtgatgctgatggtggccatcttcgccggcaccatgcagctgaccaaggaccaggtggtgtgcctgcccgtgctgcccagccccgtgaacagcaaggcccacaccccccccggcaacgccgaggtgaccaccaacatccccaagatggaggccgccaccaaccaggaccaggacggcagaaccaccaacgacatcagcttcggcaccagcgccgtgacccccgacatccccctgagagccacctaccccagaaccgacttcgccctgtag

SEQ ID NO: 86731 - DNA, 2391 bp, synthetic construct
  misc_feature 1..2391: note = Description of Artificial Sequence: Synthetic coding sequence
  source 1..2391: mol_type = other DNA
atgatccccgtggccgagttcaagcagttcaccgagcagcagcccgccttcaaggtgctgaagccctggtgggacgtgctggccgagtacctgaccgtggccatgctgatgatcggcgtgttcggctgcaccctgcaggtgacccaggacaagatcatctgcctgcccaaccacgagctgcaggagaacctgagcgaggccccctgccagcagctgctgcccagaggcatccccgagcagatcggcgccctgcaggaggtgaagggcctgaagaacaacctggacctgcagcagtacagcttcatcaaccagctgtgctacgagaccgccctgcactggtacgccaagtacttcccctacctggtggtgatccacaccctgatcttcatggtgtgcaccagcttctggttcaagttccccggcaccagcagcaagatcgagcacttcatcagcatcctgggcaagtgcttcgacagcccctggaccaccagagccctgagcgaggtgagcggcgagaaccagaagggccccgccgccaccgagagagccgccgccaccatcgtggccatggccggcaccggccccggcaaggccggcgagggcgagaaggagaaggtgctggccgagcccgagaaggtggtgaccgagccccccgtggtgaccctgctggacaagaaggagggcgagcaggccaaggccctgttcgagaaggtgaagaagttcagaatgcacgtggaggagggcgacatcctgtacaccatgtacatcagacagaccgtgctgaaggtgtgcaagttcctggccatcctggtgtacaacctggtgtacgtggagaagatcagcttcctggtggcctgcagagtggagaccagcgaggtgaccggctacgccagcttctgctgcaaccacaccaaggcccacctgttcagcaagctggccttctgctacatcagcttcgtgtgcatctacggcctgacctgcatctacaccctgtactggctgttccacagacccctgaaggagtacagcttcagaagcgtgagagaggagaccggcatgggcgacatccccgacgtgaagaacgacttcgccttcatgctgcacctgatcgaccagtacgacagcctgtacagcaagagattcgccgtgttcctgagcgaggtgagcgagagcagactgaagcagctgaacctgaaccacgagtggacccccgagaagctgagacagaagctgcagagaaacgccgccggcagactggagctggccctgtgcatgctgcccggcctgcccgacaccgtgttcgagctgagcgaggtggagagcctgagactggaggccatctgcgacatcaccttcccccccggcctgagccagctggtgcacctgcaggagctgagcctgctgcacagccccgccagactgcccttcagcctgcaggtgttcctgagagaccacctgaaggtgatgagagtgaagtgcgaggagctgagagaggtgcccctgtgggtgttcggcctgagaggcctggaggagctgcacctggagggcctgttcccccaggagctggccagagccgccaccctggagagcctgagagagctgaagcagctgaaggtgctgagcctgagaagcaacgccggcaaggtgcccgccagcgtgaccgacgtggccggccacctgcagagactgagcctgcacaacgacggcgccagactggtggccctgaacagcctgaagaagctggccgccctgagagagctggagctggtggcctgcggcctggagagaatcccccacgccgtgttcagcctgggcgccctgcaggagctggacctgaaggacaaccacctgagaagcatcgaggagatcctgagcttccagcactgcagaaagctggtgaccctgagactgtggcacaaccagatcgcctacgtgcccgagcacgtgagaaagctgagaagcctggagcagctgtacctgagctacaacaagctggagaccctgcccagccagctgggcctgtgcagcggcctgagactgctggacgtgagccacaacggcctgcacagcctgccccccgaggtgggcctgctgcagaacctgcagcacctggccctgagctacaacgccctggaggccctgcccgaggagctgttcttctgcagaaagctgagaaccctgctgctgggcgacaaccagctgagccagctgagcccccacgtgggcgccctgagagccctgagcagactggagctgaagggcaacagactggaggccctgcccgaggagctgggcaactgcggcggcctgaagaaggccggcctgctggtggaggacaccctgtaccagggcctgcccgccgaggtgagagacaagatggaggaggagtag

SEQ ID NO: 86732 - DNA, 1569 bp, synthetic construct
  misc_feature 1..1569: note = Description of Artificial Sequence: Synthetic coding sequence
  source 1..1569: mol_type = other DNA
atggacttcctgctgctgggcctgtgcctgtactggctgctgagaagacccagcggcgtggtgctgtgcctgctgggcgcctgcttccagatgctgcccgccgcccccagcggctgcccccagctgtgcagatgcgagggcagactgctgtactgcgaggccctgaacctgaccgaggccccccacaacctgagcggcctgctgggcctgagcctgagatacaacagcctgagcgagctgagagccggccagttcaccggcctgatgcagctgacctggctgtacctggaccacaaccacatctgcagcgtgcagggcgacgccttccagaagctgagaagagtgaaggagctgaccctgagcagcaaccagatcacccagctgcccaacaccaccttcagacccatgcccaacctgagaagcgtggacctgagctacaacaagctgcaggccctggcccccgacctgttccacggcctgagaaagctgaccaccctgcacatgagagccaacgccatccagttcgtgcccgtgagaatcttccaggactgcagaagcctgaagttcctggacatcggctacaaccagctgaagagcctggccagaaacagcttcgccggcctgttcaagctgaccgagctgcacctggagcacaacgacctggtgaaggtgaacttcgcccacttccccagactgatcagcctgcacagcctgtgcctgagaagaaacaaggtggccatcgtggtgagcagcctggactgggtgtggaacctggagaagatggacctgagcggcaacgagatcgagtacatggagccccacgtgttcgagaccgtgccccacctgcagagcctgcagctggacagcaacagactgacctacatcgagcccagaatcctgaacagctggaagagcctgaccagcatcaccctggccggcaacctgtgggactgcggcagaaacgtgtgcgccctggccagctggctgaacaacttccagggcagatacgacggcaacctgcagtgcgccagccccgagtacgcccagggcgaggacgtgctggacgccgtgtacgccttccacctgtgcgaggacggcgccgagcccaccagcggccacctgctgagcgccgtgaccaacagaagcgacctgggcccccccgccagcagcgccaccaccctggccgacggcggcgagggccagcacgacggcaccttcgagcccgccaccgtggccctgcccggcggcgagcacgccgagaacgccgtgcagatccacaaggtggtgaccggcaccatggccctgatcttcagcttcctgatcgtggtgctggtgctgtacgtgagctggaagtgcttccccgccagcctgagacagctgagacagtgcttcgtgacccagagaagaaagcagaagcagaagcagaccatgcaccagatggccgccatgagcgcccaggagtactacgtggactacaagcccaaccacatcgagggcgccctggtgatcatcaacgagtacggcagctgcacctgccaccagcagcccgccagagagtgcgaggtgtag

SEQ ID NO: 86733 - DNA, 1569 bp, synthetic construct; identical to SEQ ID NO: 86732
  misc_feature 1..1569: note = Description of Artificial Sequence: Synthetic coding sequence
  source 1..1569: mol_type = other DNA

SEQ ID NO: 86734 - DNA, 330 bp, synthetic construct
  misc_feature 1..330: note = Description of Artificial Sequence: Synthetic coding sequence
  source 1..330: mol_type = other DNA
atggacttcctgctgctgggcctgtgcctgtactggctgctgagaagacccagcggcgtggtgctgtgcctgctgggcgcctgcttccagatgctgcccgccgcccccagcggctgcccccagctgtgcagatgcgagggcagactgctgtactgcgaggccctgaacctgaccgaggccccccacaacctgagcggcctgctgggcctgagcctgagatacaacagcctgagcgagctgagagccggccagttcaccggcctgatgcagctgacctggctgtacctggaccacaaccacatctgcagcgtgcagggcgacgccttctag

SEQ ID NO: 86735 - DNA, 672 bp, synthetic construct
  misc_feature 1..672: note = Description of Artificial Sequence: Synthetic coding sequence
  source 1..672: mol_type = other DNA
atggacttcctgctgctgggcctgtgcctgtactggctgctgagaagacccagcggcgtggtgctgtgcctgctgggcgcctgcttccagatgctgcccgccgcccccagcggctgcccccagctgtgcagatgcgagggcagactgctgtactgcgaggccctgaacctgaccgaggccccccacaacctgagcggcctgctgggcctgagcctgagatacaacagcctgagcgagctgagagccggccagttcaccggcctgatgcagctgacctggctgtacctggaccacaaccacatctgcagcgtgcagggcgacgccttccagaagctgagaagagtgaaggagctgaccctgagcagcaaccagatcacccagctgcccaacaccaccttcagacccatgcccaacctgagaagcgtggacctgagctacaacaagctgcaggccctggcccccgacctgttccacggcctgagaaagctgaccaccctgcacatgagagccaacgccatccagttcgtgcccgtgagaatcttccaggactgcagaagcctgaagttcctggacatcggctacaaccagctgaagagcctggccagaaacagcttcgccggcctgttcaagctgaccgagctgcacctggagcacaacgacctggtgaagtag

SEQ ID NO: 86736 - DNA, 1569 bp, synthetic construct; identical to SEQ ID NO: 86732
  misc_feature 1..1569: note = Description of Artificial Sequence: Synthetic coding sequence
  source 1..1569: mol_type = other DNA

SEQ ID NO: 86737 - DNA, 1569 bp, synthetic construct; identical to SEQ ID NO: 86732
  misc_feature 1..1569: note = Description of Artificial Sequence: Synthetic coding sequence
  source 1..1569: mol_type = other DNA

SEQ ID NO: 86738 - DNA, 552 bp, synthetic construct
  misc_feature 1..552: note = Description of Artificial Sequence: Synthetic coding sequence
  source 1..552: mol_type = other DNA
atggacttcctgctgctgggcctgtgcctgtactggctgctgagaagacccagcggcgtggtgctgtgcctgctgggcgcctgcttccagatgctgcccgccgcccccagcggctgcccccagctgtgcagatgcgagggcagactgctgtactgcgaggccctgaacctgaccgaggccccccacaacctgagcggcctgctgggcctgagcctgagatacaacagcctgagcgagctgagagccggccagttcaccggcctgatgcagctgacctggctgtacctggaccacaaccacatctgcagcgtgcagggcgacgccttccagaagctgagaagagtgaaggagctgaccctgagcagcaaccagatcacccagctgcccaacaccaccttcagacccatgcccaacctgagaagcgtggacctgagctacaacaagctgcaggccctggcccccgacctgttccacggcctgagaaagctgaccaccctgcacatgagagccaacgccatccagttcgtgcccgtgagaatcttccaggactag

SEQ ID NO: 86739 - DNA, 1551 bp, synthetic construct
  misc_feature 1..1551: note = Description of Artificial Sequence: Synthetic coding sequence
  source 1..1551: mol_type = other DNA
atgggcctgcacttcaagtggcccctgggcgcccccatgctggccgccatctacgccatgagcatggtgctgaagatgctgcccgccctgggcatggcctgcccccccaagtgcagatgcgagaagctgctgttctactgcgacagccagggcttccacagcgtgcccaacgccaccgacaagggcagcctgggcctgagcctgagacacaaccacatcaccgagctggagagagaccagttcgccagcttcagccagctgacctggctgcacctggaccacaaccagatcagcaccgtgaaggaggacgccttccagggcctgtacaagctgaaggagctgatcctgagcagcaacaagatcttctacctgcccaacaccaccttcacccagctgatcaacctgcagaacctggacctgagcttcaaccagctgagcagcctgcaccccgagctgttctacggcctgagaaagctgcagaccctgcacctgagaagcaacagcctgagaaccatccccgtgagactgttctgggactgcagaagcctggagttcctggacctgagcaccaacagactgagaagcctggccagaaacggcttcgccggcctgatcaagctgagagagctgcacctggagcacaaccagctgaccaagatcaacttcgcccacttcctgagactgagcagcctgcacaccctgttcctgcagtggaacaagatcagcaacctgacctgcggcatggagtggacctggggcaccctggagaagctggacctgaccggcaacgagatcaaggccatcgacctgaccgtgttcgagaccatgcccaacctgaagatcctgctgatggacaacaacaagctgaacagcctggacagcaagatcctgaacagcctgagaagcctgaccaccgtgggcctgagcggcaacctgtgggagtgcagcgccagaatctgcgccctggccagctggctgggcagcttccagggcagatgggagcacagcatcctgtgccacagccccgaccacacccagggcgaggacatcctggacgccgtgcacggcttccagctgtgctggaacctgagcaccaccgtgaccgtgatggccaccacctacagagaccccaccaccgagtacaccaagagaatcagcagcagcagctaccacgtgggcgacaaggagatccccaccaccgccggcatcgccgtgaccaccgaggagcacttccccgagcccgacaacgccatcttcacccagagagtgatcaccggcaccatggccctgctgttcagcttcttcttcatcatcttcatcgtgttcatcagcagaaagtgctgcccccccaccctgagaagaatcagacagtgcagcatggtgcagaaccacagacagctgagaagccagaccagactgcacatgagcaacatgagcgaccagggcccctacaacgagtacgagcccacccacgagggccccttcatcatcatcaacggctacggccagtgcaagtgccagcagctgccctacaaggagtgcgaggtgtag

SEQ ID NO: 86740 - DNA, 1746 bp, synthetic construct
  misc_feature 1..1746: note = Description of Artificial Sequence: Synthetic coding sequence
  source 1..1746: mol_type = other DNA
atgggcttcaacgtgatcagactgctgagcggcagcgccgtggccctggtgatcgcccccaccgtgctgctgaccatgctgagcagcgccgagagaggctgccccaagggctgcagatgcgagggcaagatggtgtactgcgagagccagaagctgcaggagatccccagcagcatcagcgccggctgcctgggcctgagcctgagatacaacagcctgcagaagctgaagtacaaccagttcaagggcctgaaccagctgacctggctgtacctggaccacaaccacatcagcaacatcgacgagaacgccttcaacggcatcagaagactgaaggagctgatcctgagcagcaacagaatcagctacttcctgaacaacaccttcagacccgtgaccaacctgagaaacctggacctgagctacaaccagctgcacagcctgggcagcgagcagttcagaggcctgagaaagctgctgagcctgcacctgagaagcaacagcctgagaaccatccccgtgagaatcttccaggactgcagaaacctggagctgctggacctgggctacaacagaatcagaagcctggccagaaacgtgttcgccggcatgatcagactgaaggagctgcacctggagcacaaccagttcagcaagctgaacctggccctgttccccagactggtgagcctgcagaacctgtacctgcagtggaacaagatcagcgtgatcggccagaccatgagctggacctggagcagcctgcagagactggacctgagcggcaacgagatcgaggccttcagcggccccagcgtgttccagtgcgtgcccaacctgcagagactgaacctggacagcaacaagctgaccttcatcggccaggagatcctggacagctggatcagcctgaacgacatcagcctggccggcaacatctgggagtgcagcagaaacatctgcagcctggtgaactggctgaagagcttcaagggcctgagagagaacaccatcatctgcgccagccccaaggagctgcagggcgtgaacgtgatcgacgccgtgaagaactacagcatctgcggcaagagcaccaccgagagattcgacctggccagagccctgcccaagcccaccttcaagcccaagctgcccagacccaagcacgagagcaagccccccctgccccccaccgtgggcgccaccgagcccggccccgagaccgacgccgacgccgagcacatcagcttccacaagatcatcgccggcagcgtggccctgttcctgagcgtgctggtgatcctgctggtgatctacgtgagctggaagagataccccgccagcatgaagcagctgcagcagagaagcctgatgagaagacacagaaagaagaagagacagagcctgaagcagatgacccccagcacccaggagttctacgtggactacaagcccaccaacaccgagaccagcgagatgctgctgaacggcaccggcccctgcacctacaacaagagcggcagcagagagtgcgagatccccctgagcatgaacgtgagcaccttcctggcctacgaccagcccaccatcagctactgcggcgtgcaccacgagctgctgagccacaagagcttcgagaccaacgcccaggaggacaccatggagacccacctggagaccgagctggacctgagcaccatcaccaccgccggcagaatcagcgaccacaagcagcagctggcctag

SEQ ID NO: 86741 - DNA, 1746 bp, synthetic construct; identical to SEQ ID NO: 86740
  misc_feature 1..1746: note = Description of Artificial Sequence: Synthetic coding sequence
  source 1..1746: mol_type = other DNA

SEQ ID NO: 86742 - DNA, 1557 bp, synthetic construct
  misc_feature 1..1557: note = Description of Artificial Sequence: Synthetic coding sequence
  source 1..1557: mol_type = other DNA
atgggcttccacctgatcacccagctgaagggcatgagcgtggtgctggtgctgctgcccaccctgctgctggtgatgctgaccggcgcccagagagcctgccccaagaactgcagatgcgacggcaagatcgtgtactgcgagagccacgccttcgccgacatccccgagaacatcagcggcggcagccagggcctgagcctgagattcaacagcatccagaagctgaagagcaaccagttcgccggcctgaaccagctgatctggctgtacctggaccacaactacatcagcagcgtggacgaggacgccttccagggcatcagaagactgaaggagctgatcctgagcagcaacaagatcacctacctgcacaacaagaccttccaccccgtgcccaacctgagaaacctggacctgagctacaacaagctgcagaccctgcagagcgagcagttcaagggcctgagaaagctgatcatcctgcacctgagaagcaacagcctgaagaccgtgcccatcagagtgttccaggactgcagaaacctggacttcctggacctgggctacaacagactgagaagcctgagcagaaacgccttcgccggcctgctgaagctgaaggagctgcacctggagcacaaccagttcagcaagatcaacttcgcccacttccccagactgttcaacctgagaagcatctacctgcagtggaacagaatcagaagcatcagccagggcctgacctggacctggagcagcctgcacaacctggacctgagcggcaacgacatccagggcatcgagcccggcaccttcaagtgcctgcccaacctgcagaagctgaacctggacagcaacaagctgaccaacatcagccaggagaccgtgaacgcctggatcagcctgatcagcatcaccctgagcggcaacatgtgggagtgcagcagaagcatctgccccctgttctactggctgaagaacttcaagggcaacaaggagagcaccatgatctgcgccggccccaagcacatccagggcgagaaggtgagcgacgccgtggagacctacaacatctgcagcgaggtgcaggtggtgaacaccgagagaagccacctggtgccccagaccccccagaagcccctgatcatccccagacccaccatcttcaagcccgacgtgacccagagcaccttcgagacccccagccccagccccggcttccagatccccggcgccgagcaggagtacgagcacgtgagcttccacaagatcatcgccggcagcgtggccctgttcctgagcgtggccatgatcctgctggtgatctacgtgagctggaagagataccccgccagcatgaagcagctgcagcagcacagcctgatgaagagaagaagaaagaaggccagagagagcgagagacagatgaacagccccctgcaggagtactacgtggactacaagcccaccaacagcgagaccatggacatcagcgtgaacggcagcggcccctgcacctacaccatcagcggcagcagagagtgcgaggtgtag

SEQ ID NO: 86743 - DNA, 1773 bp, synthetic construct
  misc_feature 1..1773: note = Description of Artificial Sequence: Synthetic coding sequence
  source 1..1773: mol_type = other DNA
atgggcttccacctgatcacccagctgaagggcatgagcgtggtgctggtgctgctgcccaccctgctgctggtgatgctgaccggcgcccagagagcctgccccaagaactgcagatgcgacggcaagatcgtgtactgcgagagccacgccttcgccgacatccccgagaacatcagcggcggcagccagggcctgagcctgagattcaacagcatccagaagctgaagagcaaccagttcgccggcctgaaccagctgatctggctgtacctggaccacaactacatcagcagcgtggacgaggacgccttccagggcatcagaagactgaaggagctgatcctgagcagcaacaagatcacctacctgcacaacaagaccttccaccccgtgcccaacctgagaaacctggacctgagctacaacaagctgcagaccctgcagagcgagcagttcaagggcctgagaaagctgatcatcctgcacctgagaagcaacagcctgaagaccgtgcccatcagagtgttccaggactgcagaaacctggacttcctggacctgggctacaacagactgagaagcctgagcagaaacgccttcgccggcctgctgaagctgaaggagctgcacctggagcacaaccagttcagcaagatcaacttcgcccacttccccagactgttcaacctgagaagcatctacctgcagtggaacagaatcagaagcatcagccagggcctgacctggacctggagcagcctgcacaacctggacctgagcggcaacgacatccagggcatcgagcccggcaccttcaagtgcctgcccaacctgcagaagctgaacctggacagcaacaagctgaccaacatcagccaggagaccgtgaacgcctggatcagcctgatcagcatcaccctgagcggcaacatgtgggagtgcagcagaagcatctgccccctgttctactggctgaagaacttcaagggcaacaaggagagcaccatgatctgcgccggccccaagcacatccagggcgagaaggtgagcgacgccgtggagacctacaacatctgcagcgaggtgcaggtggtgaacaccgagagaagccacctggtgccccagaccccccagaagcccctgatcatccccagacccaccatcttcaagcccgacgtgacccagagcaccttcgagacccccagccccagccccggcttccagatccccggcgccgagcaggagtacgagcacgtgagcttccacaagatcatcgccggcagcgtggccctgttcctgagcgtggccatgatcctgctggtgatctacgtgagctggaagagataccccgccagcatgaagcagctgcagcagcacagcctgatgaagagaagaagaaagaaggccagagagagcgagagacagatgaacagccccctgcaggagtactacgtggactacaagcccaccaacagcgagaccatggacatcagcgtgaacggcagcggcccctgcacctacaccatcagcggcagcagagagtgcgagatgccccaccacatgaagcccctgccctactacagctacgaccagcccgtgatcggctactgccaggcccaccagcccctgcacgtgaccaagggctacgagaccgtgagccccgagcaggacgagagccccggcctggagctgggcagagaccacagcttcatcgccaccatcgccagaagcgccgcccccgccatctacctggagagaatcgccaactag

SEQ ID NO: 86744 - DNA, 1773 bp, synthetic construct; identical to SEQ ID NO: 86743
  misc_feature 1..1773: note = Description of Artificial Sequence: Synthetic coding sequence
  source 1..1773: mol_type = other DNA

SEQ ID NO: 86745 - DNA, 1776 bp, synthetic construct
  misc_feature 1..1776: note = Description of Artificial Sequence: Synthetic coding sequence
  source 1..1776: mol_type = other DNA
atgcccggcttccacctgatcacccagctgaagggcatgagcgtggtgctggtgctgctgcccaccctgctgctggtgatgctgaccggcgcccagagagcctgccccaagaactgcagatgcgacggcaagatcgtgtactgcgagagccacgccttcgccgacatccccgagaacatcagcggcggcagccagggcctgagcctgagattcaacagcatccagaagctgaagagcaaccagttcgccggcctgaaccagctgatctggctgtacctggaccacaactacatcagcagcgtggacgaggacgccttccagggcatcagaagactgaaggagctgatcctgagcagcaacaagatcacctacctgcacaacaagaccttccaccccgtgcccaacctgagaaacctggacctgagctacaacaagctgcagaccctgcagagcgagcagttcaagggcctgagaaagctgatcatcctgcacctgagaagcaacagcctgaagaccgtgcccatcagagtgttccaggactgcagaaacctggacttcctggacctgggctacaacagactgagaagcctgagcagaaacgccttcgccggcctgctgaagctgaaggagctgcacctggagcacaaccagttcagcaagatcaacttcgcccacttccccagactgttcaacctgagaagcatctacctgcagtggaacagaatcagaagcatcagccagggcctgacctggacctggagcagcctgcacaacctggacctgagcggcaacgacatccagggcatcgagcccggcaccttcaagtgcctgcccaacctgcagaagctgaacctggacagcaacaagctgaccaacatcagccaggagaccgtgaacgcctggatcagcctgatcagcatcaccctgagcggcaacatgtgggagtgcagcagaagcatctgccccctgttctactggctgaagaacttcaagggcaacaaggagagcaccatgatctgcgccggccccaagcacatccagggcgagaaggtgagcgacgccgtggagacctacaacatctgcagcgaggtgcaggtggtgaacaccgagagaagccacctggtgccccagaccccccagaagcccctgatcatccccagacccaccatcttcaagcccgacgtgacccagagcaccttcgagacccccagccccagccccggcttccagatccccggcgccgagcaggagtacgagcacgtgagcttccacaagatcatcgccggcagcgtggccctgttcctgagcgtggccatgatcctgctggtgatctacgtgagctggaagagataccccgccagcatgaagcagctgcagcagcacagcctgatgaagagaagaagaaagaaggccagagagagcgagagacagatgaacagccccctgcaggagtactacgtggactacaagcccaccaacagcgagaccatggacatcagcgtgaacggcagcggcccctgcacctacaccatcagcggcagcagagagtgcgagatgccccaccacatgaagcccctgccctactacagctacgaccagcccgtgatcggctactgccaggcccaccagcccctgcacgtgaccaagggctacgagaccgtgagccccgagcaggacgagagccccggcctggagctgggcagagaccacagcttcatcgccaccatcgccagaagcgccgcccccgccatctacctggagagaatcgccaactag

SEQ ID NO: 86746 - DNA, 579 bp, synthetic construct
  misc_feature 1..579: note = Description of Artificial Sequence: Synthetic coding sequence
  source 1..579: mol_type = other DNA
atgaacaagagagactacatgaacaccagcgtgcaggagccccccctggactacagcttcagaagcatccacgtgatccaggacctggtgaacgaggagcccagaaccggcctgagacccctgaagagaagcaagagcggcaagagcctgacccagagcctgtggctgaacaacaacgtgctgaacgacctgagagacttcaaccaggtggccagccagctgctggagcaccccgagaacctggcctggatcgacctgagcttcaacgacctgaccagcatcgaccccgtgctgaccaccttcttcaacctgagcgtgctgtacctgcacggcaacagcatccagagactgggcgaggtgaacaagctggccgtgctgcccagactgagaagcctgaccctgcacggcaaccccatggaggaggagaagggctacagacagtacgtgctgtgcaccctgagcagaatcaccaccttcgacttcagcggcgtgaccaaggccgacagaaccaccgccgaggtgtggaagagaatgaacatcaagcccaagaaggcctggaccaagcagaacaccctgtag

SEQ ID NO: 86747 - DNA, 876 bp, synthetic construct
  misc_feature 1..876: note = Description of Artificial Sequence: Synthetic coding sequence
  source 1..876: mol_type = other DNA
atgggcaccccctggagaaagagaaagggcatcgccggccccggcctgcccgacctgagctgcgccctggtgctgcagcccagagcccaggtgggcaccatgagccccgccatcgccctggccttcctgcccctggtggtgaccctgctggtgagatacagacactacttcagactgctggtgagaaccgtgctgctgagaagcctgagagactgcctgagcggcctgagaatcgaggagagagccttcagctacgtgctgacccacgccctgcccggcgaccccggccacatcctgaccaccctggaccactggagcagcagatgcgagtacctgagccacatgggccccgtgaagggccagatcctgatgagactggtggaggagaaggcccccgcctgcgtgctggagctgggcacctactgcggctacagcaccctgctgatcgccagagccctgccccccggcggcagactgctgaccgtggagagagaccccagaaccgccgccgtggccgagaagctgatcagactggccggcttcgacgagcacatggtggagctgatcgtgggcagcagcgaggacgtgatcccctgcctgagaacccagtaccagctgagcagagccgacctggtgctgctggcccacagacccagatgctacctgagagacctgcagctgctggaggcccacgccctgctgcccgccggcgccaccgtgctggccgaccacgtgctgttccccggcgcccccagattcctgcagtacgccaagagctgcggcagatacagatgcagactgcaccacaccggcctgcccgacttccccgccatcaaggacggcatcgcccagctgacctacgccggccccggctag

SEQ ID NO: 86748 - DNA, 441 bp, synthetic construct
  misc_feature 1..441: note = Description of Artificial Sequence: Synthetic coding sequence
  source 1..441: mol_type = other DNA
atgaacaagagagactacatgaacaccagcgtgcaggagccccccctggactacagcttcagaagcatccacgtgatccaggacctggtgaacgaggagcccagaaccggcctgagacccctgaagagaagcaagagcggcaagagcctgacccagagcctgtggctgaacaacaacgtgctgaacgacctgagagacttcaaccaggtggccagccagctgctggagcaccccgagaacctggcctggatcgacctgagcttcaacgacctgaccagcatcgaccccgtgctgaccaccttcttcaacctgagcgtgctgtacctgcacggcaacagcatccagagactgggcgaggtgaacaagctggccgtgctgcccagactgagaagcctgaccctgcacggcaaccccatggaggaggagaagggctacagatag

SEQ ID NO: 86749 - DNA, 756 bp, synthetic construct
  misc_feature 1..756: note = Description of Artificial Sequence: Synthetic coding sequence
  source 1..756: mol_type = other DNA
atgggcaccccctggagaaagagaaagggcatcgccggccccggcctgcccgacctgagctgcgccctggtgctgcagcccagcctgagagactgcctgagcggcctgagaatcgaggagagagccttcagctacgtgctgacccacgccctgcccggcgaccccggccacatcctgaccaccctggaccactggagcagcagatgcgagtacctgagccacatgggccccgtgaagggccagatcctgatgagactggtggaggagaaggcccccgcctgcgtgctggagctgggcacctactgcggctacagcaccctgctgatcgccagagccctgccccccggcggcagactgctgaccgtggagagagaccccagaaccgccgccgtggccgagaagctgatcagactggccggcttcgacgagcacatggtggagctgatcgtgggcagcagcgaggacgtgatcccctgcctgagaacccagtaccagctgagcagagccgacctggtgctgctggcccacagacccagatgctacctgagagacctgcagctgctggaggcccacgccctgctgcccgccggcgccaccgtgctggccgaccacgtgctgttccccggcgcccccagattcctgcagtacgccaagagctgcggcagatacagatgcagactgcaccacaccggcctgcccgacttccccgccatcaaggacggcatcgcccagctgacctacgccggccccggctag

SEQ ID NO: 86750 - DNA, 876 bp, synthetic construct; identical to SEQ ID NO: 86747
  misc_feature 1..876: note = Description of Artificial Sequence: Synthetic coding sequence
  source 1..876: mol_type = other DNA

SEQ ID NO: 86751 - DNA, 477 bp, synthetic construct
  misc_feature 1..477: note = Description of Artificial Sequence: Synthetic coding sequence
  source 1..477: mol_type = other DNA
atgaacaagagagactacatgaacaccagcgtgcaggagccccccctggactacagcttcagaagcatccacgtgatccaggacctggtgaacgaggagcccagaaccggcctgagacccctgaagagaagcaagagcggcaagagcctgacccagagcctgtggctgaacaacaacgtgctgaacgacctgagagacttcaaccaggtggccagccagctgctggagcaccccgagaacctggcctggatcgacctgagcttcaacgacctgaccagcatcgaccccgtgctgaccaccttcttcaacctgagcgtgctgtacctgcacggcaacagcatccagagactgggcgaggtgaacaagctggccgtgctgcccagactgagaagcctgaccctgcacggcaaccccatggaggaggagaagggctacagagtgcccggcagcgtggagatgccccacagacccccctag

SEQ ID NO: 86752 - DNA, 279 bp, synthetic construct
  misc_feature 1..279: note = Description of Artificial Sequence: Synthetic coding sequence
  source 1..279: mol_type = other DNA
atgaacaagagagactacatgaacaccagcgtgcaggagccccccctggactacagcttcagaagcatccacgtgatccaggacctggtgaacgaggagcccagaaccggcctgagacccctgaagagaagcaagagcggcaagagcctgacccagagcctgtggctgaacaacaacgtgctgaacgacctgagagacttcaaccaggtggccagccagctgctggagcaccccgagaacctggcctggatcgacctgagcttcaacgacctgacctag

SEQ ID NO: 86753 - DNA, 579 bp, synthetic construct; identical to SEQ ID NO: 86746
  misc_feature 1..579: note = Description of Artificial Sequence: Synthetic coding sequence
  source 1..579: mol_type = other DNA

SEQ ID NO: 86754 - DNA, 477 bp, synthetic construct; identical to SEQ ID NO: 86751
  misc_feature 1..477: note = Description of Artificial Sequence: Synthetic coding sequence
  source 1..477: mol_type = other DNA

SEQ ID NO: 86755 - DNA, 315 bp, synthetic construct
  misc_feature 1..315: note = Description of Artificial Sequence: Synthetic coding sequence
  source 1..315: mol_type = other DNA
atgaacaagagagactacatgaacaccagcgtgcaggagccccccctggactacagcttcagaagcatccacgtgatccaggacctggtgaacgaggagcccagaaccggcctgagacccctgaagagaagcaagagcggcaagagcctgacccagagcctgtggctgaacaacaacgtgctgaacgacctgagagacttcaaccaggtggccagccagctgctggagcaccccgagaacctggcctggatcgacctgagcttcaacgacctgaccagcatcgaccccgtgctgaccaccttcttcaacctgtag

SEQ ID NO: 86756 - DNA, 525 bp, synthetic construct
  misc_feature 1..525: note = Description of Artificial Sequence: Synthetic coding sequence
  source 1..525: mol_type = other DNA
atggtggagttccagcccagcgtgaccgacctggtgaacgaggagcccagaaccggcctgagacccctgaagagaagcaagagcggcaagagcctgacccagagcctgtggctgaacaacaacgtgctgaacgacctgagagacttcaaccaggtggccagccagctgctggagcaccccgagaacctggcctggatcgacctgagcttcaacgacctgaccagcatcgaccccgtgctgaccaccttcttcaacctgagcgtgctgtacctgcacggcaacagcatccagagactgggcgaggtgaacaagctggccgtgctgcccagactgagaagcctgaccctgcacggcaaccccatggaggaggagaagggctacagacagtacgtgctgtgcaccctgagcagaatcaccaccttcgacttcagcggcgtgaccaaggccgacagaaccaccgccgaggtgtggaagagaatgaacatcaagcccaagaaggcctggaccaagcagaacaccctgtag

SEQ ID NO: 86757 - DNA, 3231 bp, synthetic construct
  misc_feature 1..3231: note = Description of Artificial Sequence: Synthetic coding sequence
  source 1..3231: mol_type = other DNA
atggccgagttcaccagctacaaggagaccgccagcagcagacacctgagattcaagctgcagagcctgagcagaagactggacgagctggaggaggccaccaagaacctgcagaaggccgaggacgagctgctggacctgcaggacaaggtgatccaggccgagggcagcaacagcagcatgctggccgagatcgaggtgctgagacagagagtgctgagaatcgagggcaaggacgaggagatcaagagagccgaggacctgtgcagactgatgaaggagaagctggaggaggaggagaacctgaccagagagctgaagagcgagatcgagagactgcagaagagaatggccgagctggagaagctggaggaggccttcagcagaagcaagaacgactgcacccagctgtgcctgagcctgaacgaggagagaaacctgaccaagaagatcagcagcgagctggagatgctgagagtgaaggtgaaggagctggagagcagcgaggacagactggacaagaccgagcagagcctggccagcgagctggagaagctgaagagcctgaccctgagcttcgtgagcgagagaaagtacctgaacgagaaggagaaggagaacgagaagctgatcaaggagctgacccagaagctggagcagaacaagaagatgaacagagactacaccagaaacgccagcaacctggagagaaacgacctgagaatcgaggacggcatcagcagcaccctgcccagcaaggagagcagaagaaagggcggcctggactacctgaagcaggtggagaacgagaccagaaacaagagcgagaacgagaagaacagaaaccaggaggacaacaaggtgaaggacctgaaccaggagatcgagaagctgaagacccagatcaagcacttcgagagcctggaggaggagctgaagaagatgaagagcaagaacaacgacctgcaggacaactacctgagcgagcagaacaagaacaagctgctggccagccagctggaggagatcaagctgcagatcaagaagcagaaggagctggagaacggcgaggtggagggcgaggacgccttcctgagcagcaagggcagacacgagagaaccaagttcagaggccacggcagcgaggccagcgtgagcaagcacaccgccagagagctgagcccccagcacaagagagagagactgagaaacagagagttcgccctgaacaacgagaactacagcctgagcaacagacaggtgagcagccccagcttcaccaacagaagagccgccaaggccagccacatgggcgtgagcaccgacagcggcacccaggagaccaagaagaccgaggacagattcgtgcccggcagcagccagagcgagggcaagaagagcagagagcagcccagcgtgctgagcagatacccccccgccgcccaggagcacagcaaggcctggaagggcaccagcaagcccggcaccgagagcggcctgaagggcaaggtggagaagaccaccagaaccttcagcgacaccacccacggcagcgtgcccagcgaccccctgggcagagccgacaaggccagcgacaccagcagcgagaccgtgttcggcaagagaggccacgtgctgggcaacggcagccaggtgacccaggccgccaacagcggctgcagcaaggccatcggcgccctggccagcagcagaagaagcagcagcgagggcctgagcaagggcaagaaggccgccaacggcctggaggccgacaacagctgccccaacagcaaggcccccgtgctgagcaagtacccctacagctgcagaagccaggagaacatcctgcagggcttcagcaccagccacaaggagggcgtgaaccagcccgccgccgtggtgatggaggacagcagcccccacgaggccctgagatgcagagtgatcaagagcagcggcagagagaagcccgacagcgacgacgacctggacatcgccagcctggtgaccgccaagctggtgaacaccaccatcacccccgagcccgagcccaagccccagcccaacagcagagagaaggccaagaccagaggcgcccccagaaccagcctgttcgagaacgacaaggacgccggcatggagaacgagagcgtgaagagcgtgagagccagcaccaacaccatggagctgcccgacaccaacggcgccggcgtgaagagccagagacccttcagccccagagaggccctgagaagcagagccatcatcaagcccgtgatcgtggacaaggacgtgaagaagatcatgggcggcagcggcaccgagaccaccctggagaagcagaagcccgtgagcaagcccggccccaacaaggtgaccagcagcatcaccatctaccccagcgacagcagcagccccagagccgcccccggcgaggccctgagagagagacacaccagcaccagcaacatccaggtgggcctggccgagctgaccagcgtgagcaaccacgtgagcagccccttcgagctgagcatccacaagcacgacatcaccctgcagctggccgaggccgagagaatggccgacggccccctgaaggacagacccgagaccgtggtgagcagaagcagcatcatcatcaagcccagcgaccccgtggagagaaacagccacgccccccccgccgagaccatcagatggaagagccacagcgcccccagcgaggtgggcttcagcgacgccagacacgtgaccgtgagaaacgcctggaagagcagaagagacctgaagagcctggaggacccccccaccagaatcggcaagaacgtggagagcaccaacagcaacgcctacacccagagaagcagcaccgacttcagcgagctggagcagcccagaagctgcctgttcgagcagggcaccagaagagtgggccccagcagcggcgacgcccccgagcccagcagcagaagaacccagagcagcctgaccgtgagcgaggtgctgaccagaagaaacagagtgggcgacaccatcaccgtggccgcctggaaccacagcgccagcatggaggaggagggcgaggactgcaccctgagcgtgtacagacagctgcacaacagcctggaccccagcgagctgcccggcaagcagggcctgcccgagagcggcagagtgagagccgaggagagactgagacccaccagaccctgcgccgaggagaactag

SEQ ID NO: 86758 - DNA, 3081 bp, synthetic construct
  misc_feature 1..3081: note = Description of Artificial Sequence: Synthetic coding sequence
  source 1..3081: mol_type = other DNA
atggccgagttcaccagctacaaggagaccgccagcagcagacacctgagattcaagctgcagagcctgagcagaagactggacgagctggaggaggccaccaagaacctgcagaaggccgaggacgagctgctggacctgcaggacaaggtgatccaggccgagggcagcaacagcagcatgctggccgagatcgaggtgctgagacagagagtgctgagaatcgagggcaaggacgaggagatcaagagagccgaggacctgtgcagactgatgaaggagaagctggaggaggaggagaacctgaccagagagctgaagagcgagatcgagagactgcagaagagaatggccgagctggagaagctggaggaggccttcagcagaagcaagaacgactgcacccagctgtgcctgagcctgaacgaggagagaaacctgaccaagaagatcagcagcgagctggagatgctgagagtgaaggtgaaggagctggagagcagcgaggacagactggacaagaccgagcagagcctggccagcgagctggagaagctgaagagcctgaccctgagcttcgtgagcgagagaaagtacctgaacgagaaggagaaggagaacgagaagctgatcaaggagctgacccagaagctggagcagaacaagaagatgaacagagactacaccagaaacgccagcaacctggagagaaacgacctgagaatcgaggacggcatcagcagcaccctgcccagcaaggagagcagaagaaagggcggcctggactacctgaagcaggtggagaacgagaccagaaacaagagcgagaacgagaagaacagaaaccaggaggacaacaaggtgaaggacctgaaccaggagatcgagaagctgaagacccagatcaagcacttcgagagcctggaggaggagctgaagaagatgaagagcaagaacaacgacctgcaggacaactacctgagcgagcagaacaagaacaagctgctggccagccagctggaggagatcaagctgcagatcaagaagcagaaggagctggagaacggcgaggtggagggcgaggacgccttcctgagcagcaagggcagacacgagagaaccaagttcagaggccacggcagcgaggccagcgtgagcaagcacaccgccagagagctgagcccccagcacaagagagagagactgagaaacagagagttcgccctgaacaacgagaactacagcctgagcaacagacaggtgagcagccccagcttcaccaacagaagagccgccaaggccagccacatgggcgtgagcaccgacagcggcacccaggagaccaagaagaccgaggacagattcgtgcccggcagcagccagagcgagggcaagaagagcagagagcagcccagcgtgctgagcagatacccccccgccgcccaggagcacagcaaggcctggaagggcaccagcaagcccggcaccgagagcggcctgaagggcaaggtggagaagaccaccagaaccttcagcgacaccacccacggcagcgtgcccagcgaccccctgggcagagccgacaaggccagcgacaccagcagcgagaccgtgttcggcaagagaggccacgtgctgggcaacggcagccaggtgacccaggccgccaacagcggctgcagcaaggccatcggcgccctggccagcagcagaagaagcagcagcgagggcctgagcaagggcaagaaggccgccaacggcctggaggccgacaacagctgccccaacagcaaggcccccgtgctgagcaagtacccctacagctgcagaagccaggagaacatcctgcagggcttcagcaccagccacaaggagggcgtgaaccagcccgccgccgtggtgatggaggacagcagcccccacgaggccctgagatgcagagtgatcaagagcagcggcagagagaagcccgacagcgacgacgacctggacatcgccagcctggtgaccgccaagctggtgaacaccaccatcacccccgagcccgagcccaagccccagcccaacagcagagagaaggccaagaccagaggcgcccccagaaccagcctgttcgagaacgacaaggacgccggcatggagaacgagagcgtgaagagcgtgagagccagcaccaacaccatggagctgcccgacaccaacggcgccggcgtgaagagccagagacccttcagccccagagaggccctgagaagcagagccatcatcaagcccgtgatcgtggacaaggacgtgaagaagatcatgggcggcagcggcaccgagaccaccctggagaagcagaagcccgtgagcaagcccggccccaacaaggtgaccagcagcatcaccatctaccccagcgacagcagcagccccagagccgcccccggcgaggccctgagagagagacacaccagcaccagcaacatccaggtgggcctggccgagctgaccagcgtgagcaaccacgtgagcagccccttcgagctgagcatccacaagcacgacatcaccctgcagctggccgaggccgagagaatggccgacggccccctgaaggacagacccgagaccgtggtgagcagaagcagcatcatcatcaagcccagcgaccccgtggagagaaacagccacgccccccccgccgagaccatcagatggaagagccacagcgcccccagcgaggtgggcttcagcgacgccagacacgtgaccgtgagaaacgcctggaagagcagaagagacctgaagagcctggaggacccccccaccagaatcggcaagaacgtggagagcaccaacagcaacgcctacacccagagaagcagcaccgacttcagcgagctggagcagcccagaagctgcctgttcgagcagggcaccagaagagtgggccccagcagcggcgacgcccccgagcccagcagcagaagaacccagagcagcctgaccgtgagcgaggtgctgaccagaagaaacagagtgggcgacaccatcaccgtggccgcctggaaccacagcgccagcatgagcagctag

SEQ ID NO: 86759 - DNA, 3231 bp, synthetic construct; identical to SEQ ID NO: 86757
  misc_feature 1..3231: note = Description of Artificial Sequence: Synthetic coding sequence
  source 1..3231: mol_type = other DNA

SEQ ID NO: 86760 - DNA, 3231 bp, synthetic construct; identical to SEQ ID NO: 86757
  misc_feature 1..3231: note = Description of Artificial Sequence: Synthetic coding sequence
  source 1..3231: mol_type = other DNA

SEQ ID NO: 86761 - DNA, 822 bp, synthetic construct
  misc_feature 1..822: note = Description of Artificial Sequence: Synthetic coding sequence
  source 1..822: mol_type = other DNA
atggccgagttcaccagctacaaggagaccgccagcagcagacacctgagattcaagctgcagagcctgagcagaagactggacgagctggaggaggccaccaagaacctgcagaaggccgaggacgagctgctggacctgcaggacaaggtgatccaggccgagggcagcaacagcagcatgctggccgagatcgaggtgctgagacagagagtgctgagaatcgagggcaaggacgaggagatcaagagagccgaggacctgtgcagactgatgaaggagaagctggaggaggaggagaacctgaccagagagctgaagagcgagatcgagagactgcagaagagaatggccgagctggagaagctggaggaggccttcagcagaagcaagaacgactgcacccagctgtgcctgagcctgaacgaggagagaaacctgaccaagaagatcagcagcgagctggagatgctgagagtgaaggtgaaggagctggagagcagcgaggacagactggacaagaccgagcagagcctggccagcgagctggagaagctgaagagcctgaccctgagcttcgtgagcgagagaaagtacctgaacgagaaggagaaggagaacgagaagctgatcaaggagctgacccagaagctggagcagaacaagaagatgaacagagactacaccagaaacgccagcaacctggagagaaacgacctgagaatcgaggacggcatcagcagcaccctgcccagcaaggagagcagaagaaagggcggcctggactacctgaagcaggtggagaacgagaccagaaactag

SEQ ID NO: 86762 - DNA, 108 bp, synthetic construct
  misc_feature 1..108: note = Description of Artificial Sequence: Synthetic coding sequence
  source 1..108: mol_type = other DNA
atggccgagttcaccagctacaaggagaccgccagcagcagacacctgagattcaagctgcagagcctgagcagaagactggacgagctggaggaggccaccaagtag

SEQ ID NO: 86763 - DNA, 1041 bp, synthetic construct
  misc_feature 1..1041: note = Description of Artificial Sequence: Synthetic coding sequence
  source 1..1041: mol_type = other DNA
atgaagttcagccccgcccactacctgctgcccctgctgcccgccctggtgctgagcaccagacaggactacgaggagctggagaagcagctgaaggaggtgttcaaggagagaagcaccatcctgagacagctgaccaagaccagcagagagctggacggcatcaaggtgaacctgcagagcctgaagaacgacgagcagagcgccaagaccgacgtgcagaagctgctggagctgggccagaagcagagagaggagatgaagagcctgcaggaggccctgcagaaccagctgaaggagaccagcgagaaggccgagaagcaccaggccaccatcaacttcctgaagaccgaggtggagagaaagagcaagatgatcagagacctgcagaacgagaacaagagcctgaagaacaagctgctgagcggcaacaagctgtgcggcatccacgccgaggagagcaagaagatccaggcccagctgaaggagctgagatacggcaagaaggacctgctgttcaaggcccagcagctgaccgacctggagcagaagctggccgtggccaagaacgagctggagaaggccgccctggacagagagagccagatgaaggccatgaaggagaccgtgcagctgtgcctgaccagcgtgttcagagaccagccccccccccccctgagcctgatcaccagcaaccccaccagaatgctgctgccccccagaaacatcgccagcaagctgcccgacgccgccgccaagagcaagccccagcagagcgccagcggcaacaacgagagcagccaggtggagagcaccaaggagggcaaccccagcaccaccgcctgcgacagccaggacgagggcagaccctgcagcatgaagcacaaggagagcccccccagcaacgccaccgccgagaccgagcccatcccccagaagctgcagatgcccccctgcagcgagtgcgaggtgaagaaggcccccgagaagcccctgaccagcttcgagggcatggccgccagagaggagaagatcctgtag

SEQ ID NO: 86764 - DNA, 783 bp, synthetic construct
  misc_feature 1..783: note = Description of Artificial Sequence: Synthetic coding sequence
  source 1..783: mol_type = other DNA
atgaagagcctgcaggaggccctgcagaaccagctgaaggagaccagcgagaaggccgagaagcaccaggccaccatcaacttcctgaagaccgaggtggagagaaagagcaagatgatcagagacctgcagaacgagaacaagagcctgaagaacaagctgctgagcggcaacaagctgtgcggcatccacgccgaggagagcaagaagatccaggcccagctgaaggagctgagatacggcaagaaggacctgctgttcaaggcccagcagctgaccgacctggagcagaagctggccgtggccaagaacgagctggagaaggccgccctggacagagagagccagatgaaggccatgaaggagaccgtgcagctgtgcctgaccagcgtgttcagagaccagccccccccccccctgagcctgatcaccagcaaccccaccagaatgctgctgccccccagaaacatcgccagcaagctgcccgacgccgccgccaagagcaagccccagcagagcgccagcggcaacaacgagagcagccaggtggagagcaccaaggagggcaaccccagcaccaccgcctgcgacagccaggacgagggcagaccctgcagcatgaagcacaaggagagcccccccagcaacgccaccgccgagaccgagcccatcccccagaagctgcagatgcccccctgcagcgagtgcgaggtgaagaaggcccccgagaagcccctgaccagcttcgagggcatggccgccagagaggagaagatcctgtag

SEQ ID NO: 86765 - DNA, 900 bp, synthetic construct
  misc_feature 1..900: note = Description of Artificial Sequence: Synthetic coding sequence
  source 1..900: mol_type = other DNA
atggccgagctgggcctgaacgagcaccaccagaacgaggtgatcaactacatgagattcgccagaagcaagagaggcctgagactgaagaccgtggacagctgcttccaggacctgaaggagagcagactggtggaggacaccttcaccatcgacgaggtgagcgaggtgctgaacggcctgcaggccgtggtgcacagcgaggtggagagcgagctgatcaacaccgcctacaccaacgtgctgctgctgagacagctgttcgcccaggccgagaagtggtacctgaagctgcagaccgacatcagcgagctggagaacagagagctgctggagcaggtggccgagttcgagaaggccgagatcaccagcagcaacaagaagcccatcctggacgtgaccaagcccaagctggcccccctgaacgagggcggcaccgccgagctgctgaacaaggagatcctgagactgcaggaggagaacgagaagctgaagagcagactgaagaccatcgagatccaggccaccaacgccctggacgagaagagcaagctggagaaggccctgcaggacctgcagctggaccagggcaaccagaaggacttcatcaaggcccaggacctgagcaacctggagaacaccgtggccgccctgaagagcgagttccagaagaccctgaacgacaagaccgagaaccagaagagcctggaggagaacctggccaccgccaagcacgacctgctgagagtgcaggagcagctgcacatggccgagaaggagctggagaagaagttccagcagaccgccgcctacagaaacatgaaggagatcctgaccaagaagaacgaccagatcaaggacctgagaaagagactggcccagtacgagcccgaggactag

SEQ ID NO: 86766 - DNA, 849 bp, synthetic construct
  misc_feature 1..849: note = Description of Artificial Sequence: Synthetic coding sequence
  source 1..849: mol_type = other DNA
atgagattcgccagaagcaagagaggcctgagactgaagaccgtggacagctgcttccaggacctgaaggagagcagactggtggaggacaccttcaccatcgacgaggtgagcgaggtgctgaacggcctgcaggccgtggtgcacagcgaggtggagagcgagctgatcaacaccgcctacaccaacgtgctgctgctgagacagctgttcgcccaggccgagaagtggtacctgaagctgcagaccgacatcagcgagctggagaacagagagctgctggagcaggtggccgagttcgagaaggccgagatcaccagcagcaacaagaagcccatcctggacgtgaccaagcccaagctggcccccctgaacgagggcggcaccgccgagctgctgaacaaggagatcctgagactgcaggaggagaacgagaagctgaagagcagactgaagaccatcgagatccaggccaccaacgccctggacgagaagagcaagctggagaaggccctgcaggacctgcagctggaccagggcaaccagaaggacttcatcaaggcccaggacctgagcaacctggagaacaccgtggccgccctgaagagcgagttccagaagaccctgaacgacaagaccgagaaccagaagagcctggaggagaacctggccaccgccaagcacgacctgctgagagtgcaggagcagctgcacatggccgagaaggagctggagaagaagttccagcagaccgccgcctacagaaacatgaaggagatcctgaccaagaagaacgaccagatcaaggacctgagaaagagactggcccagtacgagcccgaggactag

SEQ ID NO: 86767 - DNA, 771 bp, synthetic construct
  misc_feature 1..771: note = Description of Artificial Sequence: Synthetic coding sequence
  source 1..771: mol_type = other DNA
atgagaaaccaggaccccggcaagatgggcagacagagaaagagcatcaagctgtaccccacccaccccctggtgaccttccccagaagctgggccaagttccaggagaaggccctgctggtggaggacaccttcaccatcgacgaggtgagcgaggtgctgaacggcctgcaggccgtggtgcacagcgaggtggagagcgagctgatcaacaccgcctacaccaacgtgctgctgctgagacagctgttcgcccaggccgagaagtggtacctgaagctgcagaccgacatcagcgagctggagaacagagagctgctggagcaggtggccgagttcgagaaggccgagatcaccagcagcaacaagaagcccatcctggacgtgaccaagcccaagctggcccccctgaacgagggcggcaccgccgagctgctgaacaaggagatcctgagactgcaggaggagaacgagaagctgaagagcagactgaagaccatcgagatccaggccaccaacgccctggacgagaagagcaagctggagaaggccctgcaggacctgcagctggaccagggcaaccagaaggacttcatcaaggcccaggacctgagcaacctggagaacaccgtggccgccctgaagagcgagttccagaagaccctgaacgacaagaccgagaaccagaagagcctggaggagaacctggccaccgccaagcacgacctgctgagagtgcaggagcagctgcacatggccgagaagatctag

SEQ ID NO: 86768 - DNA, 441 bp, synthetic construct
  misc_feature 1..441: note = Description of Artificial Sequence: Synthetic coding sequence
  source 1..441: mol_type = other DNA
atggtggacgagctggtgctgctgctgcacgccctgctgatgagacacagagccctgagcatcgagaacagccagctgatggagcagctgagactgctggtgtgcgagagagccagcctgctgagacaggtgagaccccccagctgccccgtgcccttccccgagaccttcaacggcgagagcagcagactgcccgagttcatcgtgcagaccgccagctacatgctggtgaacgagaacagattctgcaacgacgccatgaaggtggccttcctgatcagcctgctgaccggcgaggccgaggagtgggtggtgccctacatcgagatggacagccccatcctgggcgactacagagccttcctggacgagatgaagcagtgcttcggctgggacgacgacgaggacgacgacgacgaggaggaggaggacgactactag

SEQ ID NO: 86769 - DNA, 2220 bp, synthetic construct
  misc_feature 1..2220: note = Description of Artificial Sequence: Synthetic coding sequence
  source 1..2220: mol_type = other DNA
atggccagcatcctgctgagaagctgcagaggcagagcccccgccagactgccccccccccccagatacaccgtgcccagaggcagccccggcgaccccgcccacctgagctgcgccagcaccctgggcctgagaaactgcctgaacgtgcccttcggctgctgcacccccatccaccccgtgtacaccagcagcagaggcgaccacctgggctgctgggccctgagacccgagtgcctgagaatcgtgagcagagccccctggaccagcaccagcgtgggcttcgtggccgtgggcccccagtgcctgcccgtgagaggctggcacagcagcagacccgtgagagacgacagcgtggtggagaagagcctgaagagcctgaaggacaagaacaagaagctggaggagggcggccccgtgtacagcccccccgccgaggtggtggtgaagaagagcctgggccagagagtgctggacgagctgaagcactactaccacggcttcagactgctgtggatcgacaccaagatcgccgccagaatgctgtggagaatcctgaacggccacagcctgaccagaagagagagaagacagttcctgagaatctgcgccgacctgttcagactggtgcccttcctggtgttcgtggtggtgcccttcatggagttcctgctgcccgtggccgtgaagctgttccccaacatgctgcccagcaccttcgagacccagagcctgaaggaggagagactgaagaaggagctgagagtgaagctggagctggccaagttcctgcaggacaccatcgaggagatggccctgaagaacaaggccgccaagggcagcgccaccaaggacttcagcgtgttcttccagaagatcagagagaccggcgagagacccagcaacgaggagatcatgagattcagcaagctgttcgaggacgagctgaccctggacaacctgaccagaccccagctggtggccctgtgcaagctgctggagctgcagagcatcggcaccaacaacttcctgagattccagctgaccatgagactgagaagcatcaaggccgacgacaagctgatcgccgaggagggcgtggacagcctgaacgtgaaggagctgcaggccgcctgcagagccagaggcatgagagccctgggcgtgaccgaggacagactgagaggccagctgaagcagtggctggacctgcacctgcaccaggagatccccaccagcctgctgatcctgagcagagccatgtacctgcccgacaccctgagccccgccgaccagctgaagagcaccctgcagaccctgcccgagatcgtggccaaggaggcccaggtgaaggtggccgaggtggagggcgagcaggtggacaacaaggccaagctggaggccaccctgcaggaggaggccgccatccagcaggagcacagagagaaggagctgcagaagagaagcgaggtggccaaggacttcgagcccgagagagtggtggccgccccccagagacccggcaccgagccccagcccgagatgcccgacaccgtgctgcagagcgagaccctgaaggacaccgcccccgtgctggagggcctgaaggaggaggagatcaccaaggaggagatcgacatcctgagcgacgcctgcagcaagctgcaggagcagaagaagagcctgaccaaggagaaggaggagctggagctgctgaaggaggacgtgcaggactacagcgaggacctgcaggagatcaagaaggagctgagcaagaccggcgaggagaagtacgtggaggagagcaaggccagcaagagactgaccaagagagtgcagcagatgatcggccagatcgacggcctgatcagccagctggagatggaccagcaggccggcaagctggcccccgccaacggcatgcccaccggcgagaacgtgatcagcgtggccgagctgatcaacgccatgaagcaggtgaagcacatccccgagagcaagctgaccagcctggccgccgccctggacgagaacaaggacggcaaggtgaacatcgacgacctggtgaaggtgatcgagctggtggacaaggaggacgtgcacatcagcaccagccaggtggccgagatcgtggccaccctggagaaggaggagaaggtggaggagaaggagaaggccaaggagaaggccgagaaggaggtggccgaggtgaagagctag

SEQ ID NO: 86770 - DNA, 759 bp, synthetic construct
  misc_feature 1..759: note = Description of Artificial Sequence: Synthetic coding sequence
  source 1..759: mol_type = other DNA
atgagacacacctggcccttcagaaacgtgcccttcggctgctgcacccccatccaccccgtgtacaccagcagcagaggcgaccacctgggctgctgggccctgagacccgagtgcctgagaatcgtgagcagagccccctggaccagcaccagcgtgggcttcgtggccgtgggcccccagtgcctgcccgtgagaggctggcacagcagcagacccgtgagagacgacagcgtggtggagaagagcctgaagagcctgaaggacaagaacaagaagctggaggagggcggccccgtgtacagcccccccgccgaggtggtggtgaagaagagcctgggccagagagtgctggacgagctgaagcactactaccacggcttcagactgctgtggatcgacaccaagatcgccgccagaatgctgtggagaatcctgaacggccacagcctgaccagaagagagagaagacagttcctgagaatctgcgccgacctgttcagactggtgcccttcctggtgttcgtggtggtgcccttcatggagttcctgctgcccgtggccgtgaagctgttccccaacatgctgcccagcaccttcgagacccagagcctgaaggaggagagactgaagaaggagctgagagtgaagctggagctggccaagttcctgcaggacaccatcgaggagatggccctgaagaacaaggccgccaagggcagcgccaccaaggacttcagcgtgttcttccagaagtag

SEQ ID NO: 86771 - DNA, 4185 bp, synthetic construct
  misc_feature 1..4185: note = Description of Artificial Sequence: Synthetic coding sequence
  source 1..4185: mol_type = other DNA
atggccgccctgctgagaagcgccagatggctgctgagagccggcgccgcccccagactgcccctgagcctgagactgctgcccggcggccccggcagactgcacgccgccagctacctgcccgccgccagagccggccccgtggccggcggcctgctgagccccgccagactgtacgccatcgccgccaaggagaaggacatccaggaggagagcaccttcagcagcagaaagatcagcaaccagttcgactgggccctgatgagactggacctgagcgtgagaagaaccggcagaatccccaagaagctgctgcagaaggtgttcaacgacacctgcagaagcggcggcctgggcggcagccacgccctgctgctgctgagaagctgcggcagcctgctgcccgagctgaagctggaggagagaaccgagttcgcccacagaatctgggacaccctgcagaagctgggcgccgtgtacgacgtgagccactacaacgccctgctgaaggtgtacctgcagaacgagtacaagttcagccccaccgacttcctggccaagatggaggaggccaacatccagcccaacagagtgacctaccagagactgatcgccagctactgcaacgtgggcgacatcgagggcgccagcaagatcctgggcttcatgaagaccaaggacctgcccgtgaccgaggccgtgttcagcgccctggtgaccggccacgccagagccggcgacatggagaacgccgagaacatcctgaccgtgatgagagacgccggcatcgagcccggccccgacacctacctggccctgctgaacgcctacgccgagaagggcgacatcgaccacgtgaagcagaccctggagaaggtggagaagagcgagctgcacctgatggacagagacctgctgcagatcatcttcagcttcagcaaggccggctacccccagtacgtgagcgagatcctggagaaggtgacctgcgagagaagatacatccccgacgccatgaacctgatcctgctgctggtgaccgagaagctggaggacgtggccctgcagatcctgctggcctgccccgtgagcaaggaggacggccccagcgtgttcggcagcttcttcctgcagcactgcgtgaccatgaacacccccgtggagaagctgaccgactactgcaagaagctgaaggaggtgcagatgcacagcttccccctgcagttcaccctgcactgcgccctgctggccaacaagaccgacctggccaaggccctgatgaaggccgtgaaggaggagggcttccccatcagaccccactacttctggcccctgctggtgggcagaagaaaggagaagaacgtgcagggcatcatcgagatcctgaagggcatgcaggagctgggcgtgcaccccgaccaggagacctacaccgactacgtgatcccctgcttcgacagcgtgaacagcgccagagccatcctgcaggagaacggctgcctgagcgacagcgacatgttcagccaggccggcctgagaagcgaggccgccaacggcaacctggacttcgtgctgagcttcctgaagagcaacaccctgcccatcagcctgcagagcatcagaagcagcctgctgctgggcttcagaagaagcatgaacatcaacctgtggagcgagatcaccgagctgctgtacaaggacggcagatactgccaggagcccagaggccccaccgaggccgtgggctacttcctgtacaacctgatcgacagcatgagcgacagcgaggtgcaggccaaggaggagcacctgagacagtacttccaccagctggagaagatgaacgtgaagatccccgagaacatctacagaggcatcagaaacctgctggagagctaccacgtgcccgagctgatcaaggacgcccacctgctggtggagagcaagaacctggacttccagaagaccgtgcagctgaccagcagcgagctggagagcaccctggagaccctgaaggccgagaaccagcccatcagagacgtgctgaagcagctgatcctggtgctgtgcagcgaggagaacatgcagaaggccctggagctgaaggccaagtacgagagcgacatggtgaccggcggctacgccgccctgatcaacctgtgctgcagacacgacaaggtggaggacgccctgaacctgaaggaggagttcgacagactggacagcagcgccgtgctggacaccggcaagtacgtgggcctggtgagagtgctggccaagcacggcaagctgcaggacgccatcaacatcctgaaggagatgaaggagaaggacgtgctgatcaaggacaccaccgccctgagcttcttccacatgctgaacggcgccgccctgagaggcgagatcgagaccgtgaagcagctgcacgaggccatcgtgaccctgggcctggccgagcccagcaccaacatcagcttccccctggtgaccgtgcacctggagaagggcgacctgagcaccgccctggaggtggccatcgactgctacgagaagtacaaggtgctgcccagaatccacgacgtgctgtgcaagctggtggagaagggcgagaccgacctgatccagaaggccatggacttcgtgagccaggagcagggcgagatggtgatgctgtacgacctgttcttcgccttcctgcagaccggcaactacaaggaggccaagaagatcatcgagacccccggcatcagagccagaagcgccagactgcagtggttctgcgacagatgcgtggccaacaaccaggtggagaccctggagaagctggtggagctgacccagaagctgttcgagtgcgacagagaccagatgtactacaacctgctgaagctgtacaagatcaacggcgactggcagagagccgacgccgtgtggaacaagatccaggaggagaacgtgatccccagagagaagaccctgagactgctggccgagatcctgagagagggcaaccaggaggtgcccttcgacgtgcccgagctgtggtacgaggacgagaagcacagcctgaacagcagcagcgccagcaccaccgagcccgacttccagaaggacatcctgatcgcctgcagactgaaccagaagaagggcgcctacgacatcttcctgaacgccaaggagcagaacatcgtgttcaacgccgagacctacagcaacctgatcaagctgctgatgagcgaggactacttcacccaggccatggaggtgaaggccttcgccgagacccacatcaagggcttcaccctgaacgacgccgccaacagcagactgatcatcacccaggtgagaagagactacctgaaggaggccgtgaccaccctgaagaccgtgctggaccagcagcagacccccagcagactggccgtgaccagagtgatccaggccctggccatgaagggcgacgtggagaacatcgaggtggtgcagaagatgctgaacggcctggaggacagcatcggcctgagcaagatggtgttcatcaacaacatcgccctggcccagatcaagaacaacaacatcgacgccgccatcgagaacatcgagaacatgctgaccagcgagaacaaggtgatcgagccccagtacttcggcctggcctacctgttcagaaaggtgatcgaggagcagctggagcccgccgtggagaagatcagcatcatggccgagagactggccaaccagttcgccatctacaagcccgtgaccgacttcttcctgcagctggtggacgccggcaaggtggacgacgccagagccctgctgcagagatgcggcgccatcgccgagcagacccccatcctgctgctgttcctgctgagaaacagcagaaagcagggcaaggccagcaccgtgaagagcgtgctggagctgatccccgagctgaacgagaaggaggaggcctacaacagcctgatgaagagctacgtgagcgagaaggacgtgaccagcgccaaggccctgtacgagcacctgaccgccaagaacaccaagctggacgacctgttcctgaagagatacgccagcctgctgaagtacgccggcgagcccgtgcccttcatcgagccccccgagagcttcgagttctacgcccagcagctgagaaagctgagagagaacagcagctag

SEQ ID NO: 86772 - DNA, 3264 bp, synthetic construct
  misc_feature 1..3264: note = Description of Artificial Sequence: Synthetic coding sequence
  source 1..3264: mol_type = other DNA
atgcccccccccatctgcccccccctggcccccggcccctggcccggcggcctgggcggcagccacgccctgctgctgctgagaagctgcggcagcctgctgcccgagctgaagctggaggagagaaccgagttcgcccacagaatctgggacaccctgcagaagctgggcgccgtgtacgacgtgagccactacaacgccctgctgaaggtgtacctgcagaacgagtacaagttcagccccaccgacttcctggccaagatggaggaggccaacatccagcccaacagagtgacctaccagagactgatcgccagctactgcaacgtgggcgacatcgagggcgccagcaagatcctgggcttcatgaagaccaaggacctgcccgtgaccgaggccgtgttcagcgccctggtgaccggccacgccagagccggcgacatggagaacgccgagaacatcctgaccgtgatgagagacgccggcatcgagcccggccccgacacctacctggccctgctgaacgcctacgccgagaagggcgacatcgaccacgtgaagcagaccctggagaaggtggagaagagcgagctgcacctgatggacagagacctgctgcagatcatcttcagcttcagcaaggccggctacccccagtacgtgagcgagatcctggagaaggtgacctgcgagagaagatacatccccgacgccatgaacctgatcctgctgctggtgaccgagaagctggaggacgtggccctgcagatcctgctggcctgccccgtgagcaaggaggacggccccagcgtgttcggcagcttcttcctgcagcactgcgtgaccatgaacacccccgtggagaagctgaccgactactgcaagaagctgaaggaggtgcagatgcacagcttccccctgcagttcaccctgcactgcgccctgctggccaacaagaccgacctggccaaggccctgatgaaggccgtgaaggaggagggcttccccatcagaccccactacttctggcccctgctggtgggcagaagaaaggagaagaacgtgcagggcatcatcgagatcctgaagggcatgcaggagctgggcgtgcaccccgaccaggagacctacaccgactacgtgatcccctgcttcgacagcgtgaacagcgccagagccatcctgcaggagaacggctgcctgagcgacagcgacatgttcagccaggccggcctgagaagcgaggccgccaacggcaacctggacttcgtgctgagcttcctgaagagcaacaccctgcccatcagcctgcagagcatcagaagcagcctgctgctgggcttcagaagaagcatgaacatcaacctgtggagcgagatcaccgagctgctgtacaaggacggcagatactgccaggagcccagaggccccaccgaggccgtgggctacttcctgtacaacctgatcgacagcatgagcgacagcgaggtgcaggccaaggaggagcacctgagacagtacttccaccagctggagaagatgaacgtgaagatccccgagaacatctacagaggcatcagaaacctgctggagagctaccacgtgcccgagctgatcaaggacgcccacctgctggtggagagcaagaacctggacttccagaagaccgtgcagctgaccagcagcgagctggagagcaccctggagaccctgaaggccgagaaccagcccatcagagacgtgctgaagcagctgatcctggtgctgtgcagcgaggagaacatgcagaaggccctggagctgaaggccaagtacgagagcgacatggtgaccggcggctacgccgccctgatcaacctgtgctgcagacacgacaaggtggaggacgccctgaacctgaaggaggagttcgacagactggacagcagcgccgtgctggacaccggcaagtacgtgggcctggtgagagtgctggccaagcacggcaagctgcaggacgccatcaacatcctgaaggagatgaaggagaaggacgtgctgatcaaggacaccaccgccctgagcttcttccacatgctgaacggcgccgccctgagaggcgagatcgagaccgtgaagcagctgcacgaggccatcgtgaccctgggcctggccgagcccagcaccaacatcagcttccccctggtgaccgtgcacctggagaagggcgacctgagcaccgccctggaggtggccatcgactgctacgagaagtacaaggtgctgcccagaatccacgacgtgctgtgcaagctggtggagaagggcgagaccgacctgatccagaaggccatggacttcgtgagccaggagcagggcgagatggtgatgctgtacgacctgttcttcgccttcctgcagaccggcaactacaaggaggccaagaagatcatcgagacccccggcatcagagccagaagcgccagactgcagtggttctgcgacagatgcgtggccaacaaccaggtggagaccctggagaagctggtggagctgacccagaagctgttcgagtgcgacagagaccagatgtactacaacctgctgaagctgtacaagatcaacggcgactggcagagagccgacgccgtgtggaacaagatccaggaggagaacgtgatccccagagagaagaccctgagactgctggccgagatcctgagagagggcaaccaggaggtgcccttcgacgtgcccgagctgtggtacgaggacgagaagcacagcctgaacagcagcagcgccagcaccaccgagcccgacttccagaaggacatcctgatcgcctgcagactgaaccagaagaagggcgcctacgacatcttcctgaacgccaaggagcagaacatcgtgttcaacgccgagacctacagcaacctgatcaagctgctgatgagcgaggactacttcacccaggccatggaggtgaaggccttcgccgagacccacatcaagggcttcaccctgaacgacgccgccaacagcagactgatcatcacccaggtgagaagagactacctgaaggaggccgtgaccaccctgaagaccgtgctggaccagcagcagacccccagcagactggccgtgaccagagtgatccaggccctggccatgaagggcgacgtggagaacatcgaggtggtgcagaagatgctgaacggcctggaggacagcatcggcctgagcaagatggtgttcatcaacaacatcgccctggcccagtag

SEQ ID NO: 86773 - DNA, 2856 bp, synthetic construct
  misc_feature 1..2856: note = Description of Artificial Sequence: Synthetic coding sequence
  source 1..2856: mol_type = other DNA
atgcccggccccctgggcctgctgtgcttcctggccctgggcctgctgggcagcgccggccccagcggcgccgccccccccctgtgcgccgccccctgcagctgcgacggcgacagaagagtggactgcagcggcaagggcctgaccgccgtgcccgagggcctgagcgccttcacccaggccctggacatcagcatgaacaacatcacccagctgcccgaggacgccttcaagaacttccccttcctggaggagctgcagctggccggcaacgacctgagcttcatccaccccaaggccctgagcggcctgaaggagctgaaggtgctgaccctgcagaacaaccagctgaagaccgtgcccagcgaggccatcagaggcctgagcgccctgcagagcctgagactggacgccaaccacatcaccagcgtgcccgaggacagcttcgagggcctggtgcagctgagacacctgtggctggacgacaacagcctgaccgaggtgcccgtgcaccccctgagcaacctgcccaccctgcaggccctgaccctggccctgaacaagatcagcagcatccccgacttcgccttcaccaacctgagcagcctggtggtgctgcacctgcacaacaacaagatcagaagcctgagccagcactgcttcgacggcctggacaacctggagaccctggacctgaactacaacaacctgggcgagttcccccaggccatcaaggccctgcccagcctgaaggagctgggcttccacagcaacagcatcagcgtgatccccgacggcgccttcgacggcaaccccctgctgagaaccatccacctgtacgacaaccccctgagcttcgtgggcaacagcgccttccacaacctgagcgacctgcacagcctggtgatcagaggcgccagcatggtgcagcagttccccaacctgaccggcaccgtgcacctggagagcctgaccctgaccggcaccaagatcagcagcatccccaacaacctgtgccaggagcagaagatgctgagaaccctggacctgagctacaacaacatcagagacctgcccagcttcaacggctgccacgccctggaggagatcagcctgcagagaaaccagatctaccagatcaaggagggcaccttccagggcctgatcagcctgagaatcctggacctgagcagaaacctgatccacgagatccacagcagagccttcgccaccctgggccccatcaccaacctggacgtgagcttcaacgagctgaccagcttccccaccgagggcctgaacggcctgaaccagctgaagctggtgggcaacttcaagctgaaggaggccctggccgccaaggacttcgtgaacctgagaagcctgagcgtgccctacgcctaccagtgctgcgccttctggggctgcgacagctacgccaacctgaacaccgaggacaacagcctgcaggaccacagcgtggcccaggagaagggcaccgccgacgccgccaacgtgaccagcaccctggagaacgaggagcacagccagatcatcatccactgcacccccagcaccggcgccttcaagccctgcgagtacctgctgggcagctggatgatcagactgaccgtgtggttcatcttcctggtggccctgttcttcaacctgctggtgatcctgaccaccttcgccagctgcaccagcctgcccagcagcaagctgttcatcggcctgatcagcgtgagcaacctgttcatgggcatctacaccggcatcctgaccttcctggacgccgtgagctggggcagattcgccgagttcggcatctggtgggagaccggcagcggctgcaaggtggccggcttcctggccgtgttcagcagcgagagcgccatcttcctgctgatgctggccaccgtggagagaagcctgagcgccaaggacatcatgaagaacggcaagagcaaccacctgaagcagttcagagtggccgccctgctggccttcctgggcgccaccgtggccggctgcttccccctgttccacagaggcgagtacagcgccagccccctgtgcctgcccttccccaccggcgagacccccagcctgggcttcaccgtgaccctggtgctgctgaacagcctggccttcctgctgatggccgtgatctacaccaagctgtactgcaacctggagaaggaggacctgagcgagaacagccagagcagcatgatcaagcacgtggcctggctgatcttcaccaactgcatcttcttctgccccgtggccttcttcagcttcgcccccctgatcaccgccatcagcatcagccccgagatcatgaagagcgtgaccctgatcttcttccccctgcccgcctgcctgaaccccgtgctgtacgtgttcttcaaccccaagttcaaggaggactggaagctgctgaagagaagagtgaccaagaagagcggcagcgtgagcgtgagcatcagcagccagggcggctgcctggagcaggacttctactacgactgcggcatgtacagccacctgcagggcaacctgaccgtgtgcgactgctgcgagagcttcctgctgaccaagcccgtgagctgcaagcacctgatcaagagccacagctgccccgccctggccgtggccagctgccagagacccgagggctactggagcgactgcggcacccagagcgcccacagcgactacgccgacgaggaggacagcttcgtgagcgacagcagcgaccaggtgcaggcctgcggcagagcctgcttctaccagagcagaggcttccccctggtgagatacgcctacaacctgcccagagtgaaggactag

SEQ ID NO: 86774 - DNA, 2724 bp, synthetic construct
  misc_feature 1..2724: note = Description of Artificial Sequence: Synthetic coding sequence
  source 1..2724: mol_type = other DNA
atggacaccagcagactgggcgtgctgctgagcctgcccgtgctgctgcagctggccaccggcggcagcagccccagaagcggcgtgctgctgagaggctgccccacccactgccactgcgagcccgacggcagaatgctgctgagagtggactgcagcgacctgggcctgagcgagctgcccagcaacctgagcgtgttcaccagctacctggacctgagcatgaacaacatcagccagctgctgcccaaccccctgcccagcctgagattcctggaggagctgagactggccggcaacgccctgacctacatccccaagggcgccttcaccggcctgtacagcctgaaggtgctgatgctgcagaacaaccagctgagacacgtgcccaccgaggccctgcagaacctgagaagcctgcagagcctgagactggacgccaaccacatcagctacgtgccccccagctgcttcagcggcctgcacagcctgagacacctgtggctggacgacaacgccctgaccgagatccccgtgcaggccttcagaagcctgagcgccctgcaggccatgaccctggccctgaacaagatccaccacatccccgactacgccttcggcaacctgagcagcctggtggtgctgcacctgcacaacaacagaatccacagcctgggcaagaagtgcttcgacggcctgcacagcctggagaccctggacctgaactacaacaacctggacgagttccccaccgccatcagaaccctgagcaacctgaaggagctgggcttccacagcaacaacatcagaagcatccccgagaaggccttcgtgggcaaccccagcctgatcaccatccacttctacgacaaccccatccagttcgtgggcagaagcgccttccagcacctgcccgagctgagaaccctgaccctgaacggcgccagccagatcaccgagttccccgacctgaccggcaccgccaacctggagagcctgaccctgaccggcgcccagatcagcagcctgccccagaccgtgtgcaaccagctgcccaacctgcaggtgctggacctgagctacaacctgctggaggacctgcccagcttcagcgtgtgccagaagctgcagaagatcgacctgagacacaacgagatctacgagatcaaggtggacaccttccagcagctgctgagcctgagaagcctgaacctggcctggaacaagatcgccatcatccaccccaacgccttcagcaccctgcccagcctgatcaagctggacctgagcagcaacctgctgagcagcttccccatcaccggcctgcacggcctgacccacctgaagctgaccggcaaccacgccctgcagagcctgatcagcagcgagaacttccccgagctgaaggtgatcgagatgccctacgcctaccagtgctgcgccttcggcgtgtgcgagaacgcctacaagatcagcaaccagtggaacaagggcgacaacagcagcatggacgacctgcacaagaaggacgccggcatgttccaggcccaggacgagagagacctggaggacttcctgctggacttcgaggaggacctgaaggccctgcacagcgtgcagtgcagccccagccccggccccttcaagccctgcgagcacctgctggacggctggctgatcagaatcggcgtgtggaccatcgccgtgctggccctgacctgcaacgccctggtgaccagcaccgtgttcagaagccccctgtacatcagccccatcaagctgctgatcggcgtgatcgccgccgtgaacatgctgaccggcgtgagcagcgccgtgctggccggcgtggacgccttcaccttcggcagcttcgccagacacggcgcctggtgggagaacggcgtgggctgccacgtgatcggcttcctgagcatcttcgccagcgagagcagcgtgttcctgctgaccctggccgccctggagagaggcttcagcgtgaagtacagcgccaagttcgagaccaaggcccccttcagcagcctgaaggtgatcatcctgctgtgcgccctgctggccctgaccatggccgccgtgcccctgctgggcggcagcaagtacggcgccagccccctgtgcctgcccctgcccttcggcgagcccagcaccatgggctacatggtggccctgatcctgctgaacagcctgtgcttcctgatgatgaccatcgcctacaccaagctgtactgcaacctggacaagggcgacctggagaacatctgggactgcagcatggtgaagcacatcgccctgctgctgttcaccaactgcatcctgaactgccccgtggccttcctgagcttcagcagcctgatcaacctgaccttcatcagccccgaggtgatcaagttcatcctgctggtggtggtgcccctgcccgcctgcctgaaccccctgctgtacatcctgttcaacccccacttcaaggaggacctggtgagcctgagaaagcagacctacgtgtggaccagaagcaagcaccccagcctgatgagcatcaacagcgacgacgtggagaagcagagctgcgacagcacccaggccctggtgaccttcaccagcagcagcatcacctacgacctgccccccagcagcgtgcccagccccgcctaccccgtgaccgagagctgccacctgagcagcgtggccttcgtgccctgcctgtag

SEQ ID NO: 86775 - DNA, 2334 bp, synthetic construct
  misc_feature 1..2334: note = Description of Artificial Sequence: Synthetic coding sequence
  source 1..2334: mol_type = other DNA
atggacaccagcagactgggcgtgctgctgagcctgcccgtgctgctgcagctggccaccggcggcagcagccccagaagcggcgtgctgctgagaggctgccccacccactgccactgcgagcccgacggcagaatgctgctgagagtggactgcagcgacctgggcctgagcgagctgcccagcaacctgagcgtgttcaccagctacctggacctgagcatgaacaacatcagccagctgctgcccaaccccctgcccagcctgagattcctggaggagctgagactggccggcaacgccctgacctacatccccaagggcgccttcaccggcctgtacagcctgaaggtgctgatgctgcagaacaaccagctgagacacgtgcccaccgaggccctgcagaacctgagaagcctgcagagcctgagactggacgccaaccacatcagctacgtgccccccagctgcttcagcggcctgcacagcctgagacacctgtggctggacgacaacgccctgaccgagatccccgtgcaggccttcagaagcctgagcgccctgcaggccatgaccctggccctgaacaagatccaccacatccccgactacgccttcggcaacctgagcagcctggtggtgctgcacctgcacaacaacagaatccacagcctgggcaagaagtgcttcgacggcctgcacagcctggagaccctggacctgaactacaacaacctggacgagttccccaccgccatcagaaccctgagcaacctgaaggagctgggcttccacagcaacaacatcagaagcatccccgagaaggccttcgtgggcaaccccagcctgatcaccatccacttctacgacaaccccatccagttcgtgggcagaagcgccttccagcacctgcccgagctgagaaccctgaccctgaacggcgccagccagatcaccgagttccccgacctgaccggcaccgccaacctggagagcctgaccctgaccggcgcccagatcagcagcctgccccagaccgtgtgcaaccagctgcccaacctgcaggtgctggacctgagctacaacctgctggaggacctgcccagcttcagcgtgtgccagaagctgcagaagatcgacctgagacacaacgagatctacgagatcaaggtggacaccttccagcagctgctgagcctgagaagcctgaacctggcctggaacaagatcgccatcatccaccccaacgccttcagcaccctgcccagcctgatcaagctggacctgagcagcaacctgctgagcagcttccccatcaccggcctgcacggcctgacccacctgaagctgaccggcaaccacgccctgcagagcctgatcagcagcgagaacttccccgagctgaaggtgatcgagatgccctacgcctaccagtgctgcgccttcggcgtgtgcgagaacgcctacaagatcagcaaccagtggaacaagggcgacaacagcagcatggacgacctgcacaagaaggacgccggcatgttccaggcccaggacgagagagacctggaggacttcctgctggacttcgaggaggacctgaaggccctgcacagcgtgcagtgcagccccagccccggccccttcaagccctgcgagcacctgctggacggctggctgatcagaatcggcgtgtggaccatcgccgtgctggccctgacctgcaacgccctggtgaccagcaccgtgttcagaagccccctgtacatcagccccatcaagctgctgatcggcgtgatcgccgccgtgaacatgctgaccggcgtgagcagcgccgtgctggccggcgtggacgccttcaccttcggcagcttcgccagacacggcgcctggtgggagaacggcgtgggctgccacgtgatcggcttcctgagcatcttcgccagcgagagcagcgtgttcctgctgaccctggccgccctggagagaggcttcagcgtgaagtacagcgccaagttcgagaccaaggcccccttcagcagcctgaaggtgatcatcctgctgtgcgccctgctggccctgaccatggccgccgtgcccctgctgggcggcagcaagtacggcgccagccccctgtgcctgcccctgctgccccacgacgaccactgcctgcaccaggccctgctgcagttcggccagggcagacccggcgagtacctgggcctgctgtacggcaagacccactgccccgtggccctgcaccagctgcaccccaagctgccctgcggcttcctggtgctgctgctgttcaacaagccctacatctaccagagctag

SEQ ID NO: 86776 - DNA, 2508 bp, synthetic construct
  misc_feature 1..2508: note = Description of Artificial Sequence: Synthetic coding sequence
  source 1..2508: mol_type = other DNA
atggacaccagcagactgggcgtgctgctgagcctgcccgtgctgctgcagctggccaccggcggcagcagccccagaagcggcgtgctgctgagaggctgccccacccactgccactgcgagcccgacggcagaatgctgctgagagtggactgcagcgacctgggcctgagcgagctgcccagcaacctgagcgtgttcaccagctacctggacctgagcatgaacaacatcagccagctgctgcccaaccccctgcccagcctgagattcctggaggagctgagactggccggcaacgccctgacctacatccccaagggcgccttcaccggcctgtacagcctgaaggtgctgatgctgcagaacaaccagctgagacacgtgcccaccgaggccctgcagaacctgagaagcctgcagagcctgcacctgcacaacaacagaatccacagcctgggcaagaagtgcttcgacggcctgcacagcctggagaccctggacctgaactacaacaacctggacgagttccccaccgccatcagaaccctgagcaacctgaaggagctgggcttccacagcaacaacatcagaagcatccccgagaaggccttcgtgggcaaccccagcctgatcaccatccacttctacgacaaccccatccagttcgtgggcagaagcgccttccagcacctgcccgagctgagaaccctgaccctgaacggcgccagccagatcaccgagttccccgacctgaccggcaccgccaacctggagagcctgaccctgaccggcgcccagatcagcagcctgccccagaccgtgtgcaaccagctgcccaacctgcaggtgctggacctgagctacaacctgctggaggacctgcccagcttcagcgtgtgccagaagctgcagaagatcgacctgagacacaacgagatctacgagatcaaggtggacaccttccagcagctgctgagcctgagaagcctgaacctggcctggaacaagatcgccatcatccaccccaacgccttcagcaccctgcccagcctgatcaagctggacctgagcagcaacctgctgagcagcttccccatcaccggcctgcacggcctgacccacctgaagctgaccggcaaccacgccctgcagagcctgatcagcagcgagaacttccccgagctgaaggtgatcgagatgccctacgcctaccagtgctgcgccttcggcgtgtgcgagaacgcctacaagatcagcaaccagtggaacaagggcgacaacagcagcatggacgacctgcacaagaaggacgccggcatgttccaggcccaggacgagagagacctggaggacttcctgctggacttcgaggaggacctgaaggccctgcacagcgtgcagtgcagccccagccccggccccttcaagccctgcgagcacctgctggacggctggctgatcagaatcggcgtgtggaccatcgccgtgctggccctgacctgcaacgccctggtgaccagcaccgtgttcagaagccccctgtacatcagccccatcaagctgctgatcggcgtgatcgccgccgtgaacatgctgaccggcgtgagcagcgccgtgctggccggcgtggacgccttcaccttcggcagcttcgccagacacggcgcctggtgggagaacggcgtgggctgccacgtgatcggcttcctgagcatcttcgccagcgagagcagcgtgttcctgctgaccctggccgccctggagagaggcttcagcgtgaagtacagcgccaagttcgagaccaaggcccccttcagcagcctgaaggtgatcatcctgctgtgcgccctgctggccctgaccatggccgccgtgcccctgctgggcggcagcaagtacggcgccagccccctgtgcctgcccctgcccttcggcgagcccagcaccatgggctacatggtggccctgatcctgctgaacagcctgtgcttcctgatgatgaccatcgcctacaccaagctgtactgcaacctggacaagggcgacctggagaacatctgggactgcagcatggtgaagcacatcgccctgctgctgttcaccaactgcatcctgaactgccccgtggccttcctgagcttcagcagcctgatcaacctgaccttcatcagccccgaggtgatcaagttcatcctgctggtggtggtgcccctgcccgcctgcctgaaccccctgctgtacatcctgttcaacccccacttcaaggaggacctggtgagcctgagaaagcagacctacgtgtggaccagaagcaagcaccccagcctgatgagcatcaacagcgacgacgtggagaagcagagctgcgacagcacccaggccctggtgaccttcaccagcagcagcatcacctacgacctgccccccagcagcgtgcccagccccgcctaccccgtgaccgagagctgccacctgagcagcgtggccttcgtgccctgcctgtag

SEQ ID NO: 86777 - DNA, 2652 bp, synthetic construct
  misc_feature 1..2652: note = Description of Artificial Sequence: Synthetic coding sequence
  source 1..2652: mol_type = other DNA
atggacaccagcagactgggcgtgctgctgagcctgcccgtgctgctgcagctggccaccggcggcagcagccccagaagcggcgtgctgctgagaggctgccccacccactgccactgcgagcccgacggcagaatgctgctgagagtggactgcagcgacctgggcctgagcgagctgcccagcaacctgagcgtgttcaccagctacctggacctgagcatgaacaacatcagccagctgctgcccaaccccctgcccagcctgagattcctggaggagctgagactggccggcaacgccctgacctacatccccaagggcgccttcaccggcctgtacagcctgaaggtgctgatgctgcagaacaaccagctgagacacgtgcccaccgaggccctgcagaacctgagaagcctgcagagcctgagactggacgccaaccacatcagctacgtgccccccagctgcttcagcggcctgcacagcctgagacacctgtggctggacgacaacgccctgaccgagatccccgtgcaggccttcagaagcctgagcgccctgcaggccatgaccctggccctgaacaagatccaccacatccccgactacgccttcggcaacctgagcagcctggtggtgctgcacctgcacaacaacagaatccacagcctgggcaagaagtgcttcgacggcctgcacagcctggagaccctggacctgaactacaacaacctggacgagttccccaccgccatcagaaccctgagcaacctgaaggagctgcacttctacgacaaccccatccagttcgtgggcagaagcgccttccagcacctgcccgagctgagaaccctgaccctgaacggcgccagccagatcaccgagttccccgacctgaccggcaccgccaacctggagagcctgaccctgaccggcgcccagatcagcagcctgccccagaccgtgtgcaaccagctgcccaacctgcaggtgctggacctgagctacaacctgctggaggacctgcccagcttcagcgtgtgccagaagctgcagaagatcgacctgagacacaacgagatctacgagatcaaggtggacaccttccagcagctgctgagcctgagaagcctgaacctggcctggaacaagatcgccatcatccaccccaacgccttcagcaccctgcccagcctgatcaagctggacctgagcagcaacctgctgagcagcttccccatcaccggcctgcacggcctgacccacctgaagctgaccggcaaccacgccctgcagagcctgatcagcagcgagaacttccccgagctgaaggtgatcgagatgccctacgcctaccagtgctgcgccttcggcgtgtgcgagaacgcctacaagatcagcaaccagtggaacaagggcgacaacagcagcatggacgacctgcacaagaaggacgccggcatgttccaggcccaggacgagagagacctggaggacttcctgctggacttcgaggaggacctgaaggccctgcacagcgtgcagtgcagccccagccccggccccttcaagccctgcgagcacctgctggacggctggctgatcagaatcggcgtgtggaccatcgccgtgctggccctgacctgcaacgccctggtgaccagcaccgtgttcagaagccccctgtacatcagccccatcaagctgctgatcggcgtgatcgccgccgtgaacatgctgaccggcgtgagcagcgccgtgctggccggcgtggacgccttcaccttcggcagcttcgccagacacggcgcctggtgggagaacggcgtgggctgccacgtgatcggcttcctgagcatcttcgccagcgagagcagcgtgttcctgctgaccctggccgccctggagagaggcttcagcgtgaagtacagcgccaagttcgagaccaaggcccccttcagcagcctgaaggtgatcatcctgctgtgcgccctgctggccctgaccatggccgccgtgcccctgctgggcggcagcaagtacggcgccagccccctgtgcctgcccctgcccttcggcgagcccagcaccatgggctacatggtggccctgatcctgctgaacagcctgtgcttcctgatgatgaccatcgcctacaccaagctgtactgcaacctggacaagggcgacctggagaacatctgggactgcagcatggtgaagcacatcgccctgctgctgttcaccaactgcatcctgaactgccccgtggccttcctgagcttcagcagcctgatcaacctgaccttcatcagccccgaggtgatcaagttcatcctgctggtggtggtgcccctgcccgcctgcctgaaccccctgctgtacatcctgttcaacccccacttcaaggaggacctggtgagcctgagaaagcagacctacgtgtggaccagaagcaagcaccccagcctgatgagcatcaacagcgacgacgtggagaagcagagctgcgacagcacccaggccctggtgaccttcaccagcagcagcatcacctacgacctgccccccagcagcgtgcccagccccgcctaccccgtgaccgagagctgccacctgagcagcgtggccttcgtgccctgcctgtag

SEQ ID NO: 86778 - DNA, 2748 bp, synthetic construct
  misc_feature 1..2748: note = Description of Artificial Sequence: Synthetic coding sequence
  source 1..2748: mol_type = other DNA
atgggcagacccagactgaccctggtgtgccaggtgagcatcatcatcagcgccagagacctgagcatgaacaacctgaccgagctgcagcccggcctgttccaccacctgagattcctggaggagctgagactgagcggcaaccacctgagccacatccccggccaggccttcagcggcctgtacagcctgaagatcctgatgctgcagaacaaccagctgggcggcatccccgccgaggccctgtgggagctgcccagcctgcagagcctgagactggacgccaacctgatcagcctggtgcccgagagaagcttcgagggcctgagcagcctgagacacctgtggctggacgacaacgccctgaccgagatccccgtgagagccctgaacaacctgcccgccctgcaggccatgaccctggccctgaacagaatcagccacatccccgactacgccttccagaacctgaccagcctggtggtgctgcacctgcacaacaacagaatccagcacctgggcacccacagcttcgagggcctgcacaacctggagaccctggacctgaactacaacaagctgcaggagttccccgtggccatcagaaccctgggcagactgcaggagctgggcttccacaacaacaacatcaaggccatccccgagaaggccttcatgggcaaccccctgctgcagaccatccacttctacgacaaccccatccagttcgtgggcagaagcgccttccagtacctgcccaagctgcacaccctgagcctgaacggcgccatggacatccaggagttccccgacctgaagggcaccaccagcctggagatcctgaccctgaccagagccggcatcagactgctgcccagcggcatgtgccagcagctgcccagactgagagtgctggagctgagccacaaccagatcgaggagctgcccagcctgcacagatgccagaagctggaggagatcggcctgcagcacaacagaatctgggagatcggcgccgacaccttcagccagctgagcagcctgcaggccctggacctgagctggaacgccatcagaagcatccaccccgaggccttcagcaccctgcacagcctggtgaagctggacctgaccgacaaccagctgaccaccctgcccctggccggcctgggcggcctgatgcacctgaagctgaagggcaacctggccctgagccaggccttcagcaaggacagcttccccaagctgagaatcctggaggtgccctacgcctaccagtgctgcccctacggcatgtgcgccagcttcttcaaggccagcggccagtgggaggccgaggacctgcacctggacgacgaggagagcagcaagagacccctgggcctgctggccagacaggccgagaaccactacgaccaggacctggacgagctgcagctggagatggaggacagcaagccccaccccagcgtgcagtgcagccccacccccggccccttcaagccctgcgagtacctgttcgagagctggggcatcagactggccgtgtgggccatcgtgctgctgagcgtgctgtgcaacggcctggtgctgctgaccgtgttcgccggcggccccgtgcccctgccccccgtgaagttcgtggtgggcgccatcgccggcgccaacaccctgaccggcatcagctgcggcctgctggccagcgtggacgccctgaccttcggccagttcagcgagtacggcgccagatgggagaccggcctgggctgcagagccaccggcttcctggccgtgctgggcagcgaggccagcgtgctgctgctgaccctggccgccgtgcagtgcagcgtgagcgtgagctgcgtgagagcctacggcaagagccccagcctgggcagcgtgagagccggcgtgctgggctgcctggccctggccggcctggccgccgccctgcccctggccagcgtgggcgagtacggcgccagccccctgtgcctgccctacgccccccccgagggccagcccgccgccctgggcttcaccgtggccctggtgatgatgaacagcttctgcttcctggtggtggccggcgcctacatcaagctgtactgcgacctgcccagaggcgacttcgaggccgtgtgggactgcgccatggtgagacacgtggcctggctgatcttcgccgacggcctgctgtactgccccgtggccttcctgagcttcgccagcatgctgggcctgttccccgtgacccccgaggccgtgaagagcgtgctgctggtggtgctgcccctgcccgcctgcctgaaccccctgctgtacctgctgttcaacccccacttcagagacgacctgagaagactgagacccagagccggcgacagcggccccctggcctacgccgccgccggcgagctggagaagagcagctgcgacagcacccaggccctggtggccttcagcgacgtggacctgatcctggaggccagcgaggccggcagaccccccggcctggagacctacggcttccccagcgtgaccctgatcagctgccagcagcccggcgcccccagactggagggcagccactgcgtggagcccgagggcaaccacttcggcaacccccagcccagcatggacggcgagctgctgctgagagccgagggcagcacccccgccggcggcggcctgagcggcggcggcggcttccagcccagcggcctggccttcgccagccacgtgtag

SEQ ID NO: 86779 - DNA, 699 bp, synthetic construct
  misc_feature 1..699: note = Description of Artificial Sequence: Synthetic coding sequence
  source 1..699: mol_type = other DNA
atgaacaacctgaccgagctgcagcccggcctgttccaccacctgagattcctggaggagctgagactgagcggcaaccacctgagccacatccccggccaggccttcagcggcctgtacagcctgaagatcctgatgctgcagaacaaccagctgggcggcatccccgccgaggccctgtgggagctgcccagcctgcagagcctgagactggacgccaacctgatcagcctggtgcccgagagaagcttcgagggcctgagcagcctgagacacctgtggctggacgacaacgccctgaccgagatccccgtgagagccctgaacaacctgcccgccctgcaggccatgaccctggccctgaacagaatcagccacatccccgactacgccttccagaacctgaccagcctggtggtgctggacctgaactacaacaagctgcaggagttccccgtggccatcagaaccctgggcagactgcaggagctgagcctgaacggcgccatggacatccaggagttccccgacctgaagggcaccaccagcctggagatcctgaccctgaccagagccggcatcagactgctgcccagcggcatgtgccagcagctgcccagactgagagtgctggagctgagccacaaccagatcgaggagctgcccagcctgcacagatgccagaagctggaggagtag

SEQ ID NO: 86780 - DNA, 2904 bp, synthetic construct
  misc_feature 1..2904: note = Description of Artificial Sequence: Synthetic coding sequence
  source 1..2904: mol_type = other DNA
atgcccagcccccccggcctgagagccctgtggctgtgcgccgccctgtgcgccagcagaagagccggcggcgccccccagcccggccccggccccaccgcctgccccgccccctgccactgccaggaggacggcatcatgctgagcgccgactgcagcgagctgggcctgagcgccgtgcccggcgacctggaccccctgaccgcctacctggacctgagcatgaacaacctgaccgagctgcagcccggcctgttccaccacctgagattcctggaggagctgagactgagcggcaaccacctgagccacatccccggccaggccttcagcggcctgtacagcctgaagatcctgatgctgcagaacaaccagctgggcggcatccccgccgaggccctgtgggagctgcccagcctgcagagcctgagactggacgccaacctgatcagcctggtgcccgagagaagcttcgagggcctgagcagcctgagacacctgtggctggacgacaacgccctgaccgagatccccgtgagagccctgaacaacctgcccgccctgcaggccatgaccctggccctgaacagaatcagccacatccccgactacgccttccagaacctgaccagcctggtggtgctgcacctgcacaacaacagaatccagcacctgggcacccacagcttcgagggcctgcacaacctggagaccctggacctgaactacaacaagctgcaggagttccccgtggccatcagaaccctgggcagactgcaggagctgggcttccacaacaacaacatcaaggccatccccgagaaggccttcatgggcaaccccctgctgcagaccatccacttctacgacaaccccatccagttcgtgggcagaagcgccttccagtacctgcccaagctgcacaccctgagcctgaacggcgccatggacatccaggagttccccgacctgaagggcaccaccagcctggagatcctgaccctgaccagagccggcatcagactgctgcccagcggcatgtgccagcagctgcccagactgagagtgctggagctgagccacaaccagatcgaggagctgcccagcctgcacagatgccagaagctggaggagatcggcctgcagcacaacagaatctgggagatcggcgccgacaccttcagccagctgagcagcctgcaggccctggacctgagctggaacgccatcagaagcatccaccccgaggccttcagcaccctgcacagcctggtgaagctggacctgaccgacaaccagctgaccaccctgcccctggccggcctgggcggcctgatgcacctgaagctgaagggcaacctggccctgagccaggccttcagcaaggacagcttccccaagctgagaatcctggaggtgccctacgcctaccagtgctgcccctacggcatgtgcgccagcttcttcaaggccagcggccagtgggaggccgaggacctgcacctggacgacgaggagagcagcaagagacccctgggcctgctggccagacaggccgagaaccactacgaccaggacctggacgagctgcagctggagatggaggacagcaagccccaccccagcgtgcagtgcagccccacccccggccccttcaagccctgcgagtacctgttcgagagctggggcatcagactggccgtgtgggccatcgtgctgctgagcgtgctgtgcaacggcctggtgctgctgaccgtgttcgccggcggccccgtgcccctgccccccgtgaagttcgtggtgggcgccatcgccggcgccaacaccctgaccggcatcagctgcggcctgctggccagcgtggacgccctgaccttcggccagttcagcgagtacggcgccagatgggagaccggcctgggctgcagagccaccggcttcctggccgtgctgggcagcgaggccagcgtgctgctgctgaccctggccgccgtgcagtgcagcgtgagcgtgagctgcgtgagagcctacggcaagagccccagcctgggcagcgtgagagccggcgtgctgggctgcctggccctggccggcctggccgccgccctgcccctggccagcgtgggcgagtacggcgccagccccctgtgcctgccctacgccccccccgagggccagcccgccgccctgggcttcaccgtggccctggtgatgatgaacagcttctgcttcctggtggtggccggcgcctacatcaagctgtactgcgacctgcccagaggcgacttcgaggccgtgtgggactgcgccatggtgagacacgtggcctggctgatcttcgccgacggcctgctgtactgccccgtggccttcctgagcttcgccagcatgctgggcctgttccccgtgacccccgaggccgtgaagagcgtgctgctggtggtgctgcccctgcccgcctgcctgaaccccctgctgtacctgctgttcaacccccacttcagagacgacctgagaagactgagacccagagccggcgacagcggccccctggcctacgccgccgccggcgagctggagaagagcagctgcgacagcacccaggccctggtggccttcagcgacgtggacctgatcctggaggccagcgaggccggcagaccccccggcctggagacctacggcttccccagcgtgaccctgatcagctgccagcagcccggcgcccccagactggagggcagccactgcgtggagcccgagggcaaccacttcggcaacccccagcccagcatggacggcgagctgctgctgagagccgagggcagcacccccgccggcggcggcctgagcggcggcggcggcttccagcccagcggcctggccttcgccagccacgtgtag

SEQ ID NO: 86781 - DNA, 228 bp, synthetic construct
  misc_feature 1..228: note = Description of Artificial Sequence: Synthetic coding sequence
  source 1..228: mol_type = other DNA
atgctgagcgccgactgcagcgagctgggcctgagcgccgtgcccggcgacctggaccccctgaccgcctacctggccgtgcccggcatggtggccgagggcaaggccgacagaaccggcggcggcggcagcagcagacccgagaagaccagaagaagcctggaggaggccatcgacagaaccatcggcggcgcccaggagctgtgggcccccgaggtgagcagctag

SEQ ID NO: 86782 - DNA, 2487 bp, synthetic construct
  misc_feature 1..2487: note = Description of Artificial Sequence: Synthetic coding sequence
  source 1..2487: mol_type = other DNA
atgagactggagggcgagggcagaagcgccagagccggccagaacctgagcagagccggcagcgccagaagaggcgcccccagagacctgagcatgaacaacctgaccgagctgcagcccggcctgttccaccacctgagattcctggaggagctgagactgagcggcaaccacctgagccacatccccggccaggccttcagcggcctgtacagcctgaagatcctgatgctgcagaacaaccagctgggcggcatccccgccgaggccctgtgggagctgcccagcctgcagagcctggacctgaactacaacaagctgcaggagttccccgtggccatcagaaccctgggcagactgcaggagctgggcttccacaacaacaacatcaaggccatccccgagaaggccttcatgggcaaccccctgctgcagaccatccacttctacgacaaccccatccagttcgtgggcagaagcgccttccagtacctgcccaagctgcacaccctgagcctgaacggcgccatggacatccaggagttccccgacctgaagggcaccaccagcctggagatcctgaccctgaccagagccggcatcagactgctgcccagcggcatgtgccagcagctgcccagactgagagtgctggagctgagccacaaccagatcgaggagctgcccagcctgcacagatgccagaagctggaggagatcggcctgcagcacaacagaatctgggagatcggcgccgacaccttcagccagctgagcagcctgcaggccctggacctgagctggaacgccatcagaagcatccaccccgaggccttcagcaccctgcacagcctggtgaagctggacctgaccgacaaccagctgaccaccctgcccctggccggcctgggcggcctgatgcacctgaagctgaagggcaacctggccctgagccaggccttcagcaaggacagcttccccaagctgagaatcctggaggtgccctacgcctaccagtgctgcccctacggcatgtgcgccagcttcttcaaggccagcggccagtgggaggccgaggacctgcacctggacgacgaggagagcagcaagagacccctgggcctgctggccagacaggccgagaaccactacgaccaggacctggacgagctgcagctggagatggaggacagcaagccccaccccagcgtgcagtgcagccccacccccggccccttcaagccctgcgagtacctgttcgagagctggggcatcagactggccgtgtgggccatcgtgctgctgagcgtgctgtgcaacggcctggtgctgctgaccgtgttcgccggcggccccgtgcccctgccccccgtgaagttcgtggtgggcgccatcgccggcgccaacaccctgaccggcatcagctgcggcctgctggccagcgtggacgccctgaccttcggccagttcagcgagtacggcgccagatgggagaccggcctgggctgcagagccaccggcttcctggccgtgctgggcagcgaggccagcgtgctgctgctgaccctggccgccgtgcagtgcagcgtgagcgtgagctgcgtgagagcctacggcaagagccccagcctgggcagcgtgagagccggcgtgctgggctgcctggccctggccggcctggccgccgccctgcccctggccagcgtgggcgagtacggcgccagccccctgtgcctgccctacgccccccccgagggccagcccgccgccctgggcttcaccgtggccctggtgatgatgaacagcttctgcttcctggtggtggccggcgcctacatcaagctgtactgcgacctgcccagaggcgacttcgaggccgtgtgggactgcgccatggtgagacacgtggcctggctgatcttcgccgacggcctgctgtactgccccgtggccttcctgagcttcgccagcatgctgggcctgttccccgtgacccccgaggccgtgaagagcgtgctgctggtggtgctgcccctgcccgcctgcctgaaccccctgctgtacctgctgttcaacccccacttcagagacgacctgagaagactgagacccagagccggcgacagcggccccctggcctacgccgccgccggcgagctggagaagagcagctgcgacagcacccaggccctggtggccttcagcgacgtggacctgatcctggaggccagcgaggccggcagaccccccggcctggagacctacggcttccccagcgtgaccctgatcagctgccagcagcccggcgcccccagactggagggcagccactgcgtggagcccgagggcaaccacttcggcaacccccagcccagcatggacggcgagctgctgctgagagccgagggcagcacccccgccggcggcggcctgagcggcggcggcggcttccagcccagcggcctggccttcgccagccacgtgtag

SEQ ID NO: 86783 - DNA, 6039 bp, synthetic construct
  misc_feature 1..6039: note = Description of Artificial Sequence: Synthetic coding sequence
  source 1..6039: mol_type = other DNA
atggagaccctgaacggcgccggcgacaccggcggcaagcccagcaccagaggcggcgaccccgccgccagaagcagaagaaccgagggcatcagagccgcctacagaagaggcgacagaggcggcgccagagacctgctggaggaggcctgcgaccagtgcgccagccagctggagaagggccagctgctgagcatccccgccgcctacggcgacctggagatggtgagatacctgctgagcaagagactggtggagctgcccaccgagcccaccgacgacaaccccgccgtggtggccgcctacttcggccacaccgccgtggtgcaggagctgctggagcccctgacccccaagcagaccgagtgggagcagaccgcccccttcagcggcaccttccccctgagctgccacctgctgcccggcccctgcagcccccagagactgctgaactggatgctggccctggcctgccagagaggccacctgggcgtggtgaagctgctggtgctgacccacggcgccgaccccgagagctacgccgtgagaaagaacgagttccccgtgatcgtgagactgcccctgtacgccgccatcaagagcggcaacgaggacatcgccatcttcctgctgagacacggcgcctacttctgcagctacatcctgctggacagccccgaccccagcaagcacctgctgagaaagtacttcatcgaggccagccccctgcccagcagctaccccggcaagaccgccctgagagtgaagtggagccacctgagactgccctgggtggacctggactggctgatcgacatcagctgccagatcaccgagctggacctgagcgccaactgcctggccaccctgcccagcgtgatcccctggggcctgatcaacctgagaaagctgaacctgagcgacaaccacctgggcgagctgcccggcgtgcagagcagcgacgagatcatctgcagcagactgctggagatcgacatcagcagcaacaagctgagccacctgccccccggcttcctgcacctgagcaagctgcagaagctgaccgccagcaagaactgcctggagaagctgttcgaggaggagaacgccaccaactggatcggcctgagaaagctgcaggagctggacatcagcgacaacaagctgaccgagctgcccgccctgttcctgcacagcttcaagagcctgaacagcctgaacgtgagcagaaacaacctgaaggtgttccccgacccctgggcctgccccctgaagtgctgcaaggccagcagaaacgccctggagtgcctgcccgacaagatggccgtgttctggaagaaccacctgaaggacgtggacttcagcgagaacgccctgaaggaggtgcccctgggcctgttccagctggacgccctgatgttcctgagactgcagggcaaccagctggccgccctgcccccccaggagaagtggacctgcagacagctgaagaccctggacctgagcagaaaccagctgggcaagaacgaggacggcctgaagaccaagagaatcgccttcttcaccaccagaggcagacagagaagcggcaccgaggccgccagcgtgctggagttccccgccttcctgagcgagagcctggaggtgctgtgcctgaacgacaaccacctggacaccgtgccccccagcgtgtgcctgctgaagagcctgagcgagctgtacctgggcaacaaccccggcctgagagagctgccccccgagctgggccagctgggcaacctgtggcagctggacaccgaggacctgaccatcagcaacgtgcccgccgagatccagaaggagggccccaaggccatgctgagctacctgagagcccagctgagaaaggccgagaagtgcaagctgatgaagatgatcatcgtgggcccccccagacagggcaagagcaccctgctggagatcctgcagaccggcagagccccccaggtggtgcacggcgaggccaccatcagaaccaccaagtgggagctgcagagacccgccggcagcagagccaaggtggagagcgtggagttcaacgtgtgggacatcggcggccccgccagcatggccaccgtgaaccagtgcttcttcaccgacaaggccctgtacgtggtggtgtggaacctggccctgggcgaggaggccgtggccaacctgcagttctggctgctgaacatcgaggccaaggcccccaacgccgtggtgctggtggtgggcacccacctggacctgatcgaggccaagttcagagtggagagaatcgccaccctgagagcctacgtgctggccctgtgcagaagccccagcggcagcagagccaccggcttccccgacatcaccttcaagcacctgcacgagatcagctgcaagagcctggagggccaggagggcctgagacagctgatcttccacgtgacctgcagcatgaaggacgtgggcagcaccatcggctgccagagactggccggcagactgatccccagaagctacctgagcctgcaggaggccgtgctggccgagcagcagagaagaagcagagacgacgacgtgcagtacctgaccgacagacagctggagcagctggtggagcagacccccgacaacgacatcaaggactacgaggacctgcagagcgccatcagcttcctgatcgagaccggcaccctgctgcacttccccgacaccagccacggcctgagaaacctgtacttcctggaccccatctggctgagcgagtgcctgcagagaatcttcaacatcaagggcagcagaagcgtggccaagaacggcgtgatcagagccgaggacctgagaatgctgctggtgggcaccggcttcacccagcagaccgaggagcagtacttccagttcctggccaagttcgagatcgccctgcccgtggccaacgacagctacctgctgccccacctgctgcccagcaagcccggcctggacacccacggcatgagacaccccaccgccaacaccatccagagagtgttcaagatgagcttcgtgcccgtgggcttctggcagagattcatcgccagaatgctgatcagcctggccgagatggacctgcagctgttcgagaacaagaagaacaccaagagcagaaacagaaaggtgaccatctacagcttcaccggcaaccagagaaacagatgcagcaccttcagagtgaagagaaaccagaccatctactggcaggagggcctgctggtgaccttcgacggcggctacctgagcgtggagagcagcgacgtgaactggaagaagaagaagagcggcggcatgaagatcgtgtgccagagcgaggtgagagacttcagcgccatggccttcatcaccgaccacgtgaacagcctgatcgaccagtggttccccgccctgaccgccaccgagagcgacggcacccccctgatggagcagtacgtgccctgccccgtgtgcgagaccgcctgggcccagcacaccgaccccagcgagaagagcgaggacgtgcagtacttcgacatggaggactgcgtgctgaccgccatcgagagagacttcatcagctgccccagacaccccgacctgcccgtgcccctgcaggagctggtgcccgagctgttcatgaccgacttccccgccagactgttcctggagaacagcaagctggagcacagcgaggacgagggcagcgtgctgggccagggcggcagcggcaccgtgatctacagagccagataccagggccagcccgtggccgtgaagagattccacatcaagaagttcaagaacttcgccaacgtgcccgccgacaccatgctgagacacctgagagccaccgacgccatgaagaacttcagcgagttcagacaggaggccagcatgctgcacgccctgcagcacccctgcatcgtggccctgatcggcatcagcatccaccccctgtgcttcgccctggagctggcccccctgagcagcctgaacaccgtgctgagcgagaacgccagagacagcagcttcatccccctgggccacatgctgacccagaagatcgcctaccagatcgccagcggcctggcctacctgcacaagaagaacatcatcttctgcgacctgaagagcgacaacatcctggtgtggagcctggacgtgaaggagcacatcaacatcaagctgagcgactacggcatcagcagacagagcttccacgagggcgccctgggcgtggagggcacccccggctaccaggcccccgagatcagacccagaatcgtgtacgacgagaaggtggacatgttcagctacggcatggtgctgtacgagctgctgagcggccagagacccgccctgggccaccaccagctgcagatcgccaagaagctgagcaagggcatcagacccgtgctgggccagcccgaggaggtgcagttcagaagactgcaggccctgatgatggagtgctgggacaccaagcccgagaagagacccctggccctgagcgtggtgagccagatgaaggaccccaccttcgccaccttcatgtacgagctgtgctgcggcaagcagaccgccttcttcagcagccagggccaggagtacaccgtggtgttctgggacggcaaggaggagagcagaaactacaccgtggtgaacaccgagaagggcctgatggaggtgcagagaatgtgctgccccggcatgaaggtgagctgccagctgcaggtgcagagaagcctgtggaccgccaccgaggaccagaagatctacatctacaccctgaagggcatgtgccccctgaacaccccccagcaggccctggacacccccgccgtggtgacctgcttcctggccgtgcccgtgatcaagaagaacagctacctggtgctggccggcctggccgacggcctggtggccgtgttccccgtggtgagaggcacccccaaggacagctgcagctacctgtgcagccacaccgccaacagaagcaagttcagcatcgccgacgaggacgccagacagaacccctaccccgtgaaggccatggaggtggtgaacagcggcagcgaggtgtggtacagcaacggccccggcctgctggtgatcgactgcgccagcctggagatctgcagaagactggagccctacatggcccccagcatggtgaccagcgtggtgtgcagcagcgagggcagaggcgaggaggtggtgtggtgcctggacgacaaggccaacagcctggtgatgtaccacagcaccacctaccagctgtgcgccagatacttctgcggcgtgcccagccccctgagagacatgttccccgtgagacccctggacaccgagccccccgccgccagccacaccgccaaccccaaggtgcccgagggcgacagcatcgccgacgtgagcatcatgtacagcgaggagctgggcacccagatcctgatccaccaggagagcctgaccgactactgcagcatgagcagctacagcagcagcccccccagacaggccgccagaagccccagcagcctgcccagcagccccgccagcagcagcagcgtgcccttcagcaccgactgcgaggacagcgacatgctgcacacccccggcgccgccagcgacagaagcgagcacgacctgacccccatggacggcgagaccttcagccagcacctgcaggccgtgaagatcctggccgtgagagacctgatctgggtgcccagaagaggcggcgacgtgatcgtgatcggcctggagaaggacagcggcgcccagagaggcagagtgatcgccgtgctgaaggccagagagctgaccccccacggcgtgctggtggacgccgccgtggtggccaaggacaccgtggtgtgcaccttcgagaacgagaacaccgagtggtgcctggccgtgtggagaggctggggcgccagagagttcgacatcttctaccagagctacgaggagctgggcagactggaggcctgcaccagaaagagaagatag

SEQ ID NO: 86784 - DNA, 6048 bp, synthetic construct
  misc_feature 1..6048: note = Description of Artificial Sequence: Synthetic coding sequence
  source 1..6048: mol_type = other DNA
atggccggcatgagccagagaccccccagcatgtactggtgcgtgggccccgaggagagcgccgtgtgccccgagagagccatggagaccctgaacggcgccggcgacaccggcggcaagcccagcaccagaggcggcgaccccgccgccagaagcagaagaaccgagggcatcagagccgcctacagaagaggcgacagaggcggcgccagagacctgctggaggaggcctgcgaccagtgcgccagccagctggagaagggccagctgctgagcatccccgccgcctacggcgacctggagatggtgagatacctgctgagcaagagactggtggagctgcccaccgagcccaccgacgacaaccccgccgtggtggccgcctacttcggccacaccgccgtggtgcaggagctgctggagagcctgcccggcccctgcagcccccagagactgctgaactggatgctggccctggcctgccagagaggccacctgggcgtggtgaagctgctggtgctgacccacggcgccgaccccgagagctacgccgtgagaaagaacgagttccccgtgatcgtgagactgcccctgtacgccgccatcaagagcggcaacgaggacatcgccatcttcctgctgagacacggcgcctacttctgcagctacatcctgctggacagccccgaccccagcaagcacctgctgagaaagtacttcatcgaggccagccccctgcccagcagctaccccggcaagaccgccctgagagtgaagtggagccacctgagactgccctgggtggacctggactggctgatcgacatcagctgccagatcaccgagctggacctgagcgccaactgcctggccaccctgcccagcgtgatcccctggggcctgatcaacctgagaaagctgaacctgagcgacaaccacctgggcgagctgcccggcgtgcagagcagcgacgagatcatctgcagcagactgctggagatcgacatcagcagcaacaagctgagccacctgccccccggcttcctgcacctgagcaagctgcagaagctgaccgccagcaagaactgcctggagaagctgttcgaggaggagaacgccaccaactggatcggcctgagaaagctgcaggagctggacatcagcgacaacaagctgaccgagctgcccgccctgttcctgcacagcttcaagagcctgaacagcctgaacgtgagcagaaacaacctgaaggtgttccccgacccctgggcctgccccctgaagtgctgcaaggccagcagaaacgccctggagtgcctgcccgacaagatggccgtgttctggaagaaccacctgaaggacgtggacttcagcgagaacgccctgaaggaggtgcccctgggcctgttccagctggacgccctgatgttcctgagactgcagggcaaccagctggccgccctgcccccccaggagaagtggacctgcagacagctgaagaccctggacctgagcagaaaccagctgggcaagaacgaggacggcctgaagaccaagagaatcgccttcttcaccaccagaggcagacagagaagcggcaccgaggccgccagcgtgctggagttccccgccttcctgagcgagagcctggaggtgctgtgcctgaacgacaaccacctggacaccgtgccccccagcgtgtgcctgctgaagagcctgagcgagctgtacctgggcaacaaccccggcctgagagagctgccccccgagctgggccagctgggcaacctgtggcagctggacaccgaggacctgaccatcagcaacgtgcccgccgagatccagaaggagggccccaaggccatgctgagctacctgagagcccagctgagaaaggccgagaagtgcaagctgatgaagatgatcatcgtgggcccccccagacagggcaagagcaccctgctggagatcctgcagaccggcagagccccccaggtggtgcacggcgaggccaccatcagaaccaccaagtgggagctgcagagacccgccggcagcagagccaaggtggagagcgtggagttcaacgtgtgggacatcggcggccccgccagcatggccaccgtgaaccagtgcttcttcaccgacaaggccctgtacgtggtggtgtggaacctggccctgggcgaggaggccgtggccaacctgcagttctggctgctgaacatcgaggccaaggcccccaacgccgtggtgctggtggtgggcacccacctggacctgatcgaggccaagttcagagtggagagaatcgccaccctgagagcctacgtgctggccctgtgcagaagccccagcggcagcagagccaccggcttccccgacatcaccttcaagcacctgcacgagatcagctgcaagagcctggagggccaggagggcctgagacagctgatcttccacgtgacctgcagcatgaaggacgtgggcagcaccatcggctgccagagactggccggcagactgatccccagaagctacctgagcctgcaggaggccgtgctggccgagcagcagagaagaagcagagacgacgacgtgcagtacctgaccgacagacagctggagcagctggtggagcagacccccgacaacgacatcaaggactacgaggacctgcagagcgccatcagcttcctgatcgagaccggcaccctgctgcacttccccgacaccagccacggcctgagaaacctgtacttcctggaccccatctggctgagcgagtgcctgcagagaatcttcaacatcaagggcagcagaagcgtggccaagaacggcgtgatcagagccgaggacctgagaatgctgctggtgggcaccggcttcacccagcagaccgaggagcagtacttccagttcctggccaagttcgagatcgccctgcccgtggccaacgacagctacctgctgccccacctgctgcccagcaagcccggcctggacacccacggcatgagacaccccaccgccaacaccatccagagagtgttcaagatgagcttcgtgcccgtgggcttctggcagagattcatcgccagaatgctgatcagcctggccgagatggacctgcagctgttcgagaacaagaagaacaccaagagcagaaacagaaaggtgaccatctacagcttcaccggcaaccagagaaacagatgcagcaccttcagagtgaagagaaaccagaccatctactggcaggagggcctgctggtgaccttcgacggcggctacctgagcgtggagagcagcgacgtgaactggaagaagaagaagagcggcggcatgaagatcgtgtgccagagcgaggtgagagacttcagcgccatggccttcatcaccgaccacgtgaacagcctgatcgaccagtggttccccgccctgaccgccaccgagagcgacggcacccccctgatggagcagtacgtgccctgccccgtgtgcgagaccgcctgggcccagcacaccgaccccagcgagaagagcgaggacgtgcagtacttcgacatggaggactgcgtgctgaccgccatcgagagagacttcatcagctgccccagacaccccgacctgcccgtgcccctgcaggagctggtgcccgagctgttcatgaccgacttccccgccagactgttcctggagaacagcaagctggagcacagcgaggacgagggcagcgtgctgggccagggcggcagcggcaccgtgatctacagagccagataccagggccagcccgtggccgtgaagagattccacatcaagaagttcaagaacttcgccaacgtgcccgccgacaccatgctgagacacctgagagccaccgacgccatgaagaacttcagcgagttcagacaggaggccagcatgctgcacgccctgcagcacccctgcatcgtggccctgatcggcatcagcatccaccccctgtgcttcgccctggagctggcccccctgagcagcctgaacaccgtgctgagcgagaacgccagagacagcagcttcatccccctgggccacatgctgacccagaagatcgcctaccagatcgccagcggcctggcctacctgcacaagaagaacatcatcttctgcgacctgaagagcgacaacatcctggtgtggagcctggacgtgaaggagcacatcaacatcaagctgagcgactacggcatcagcagacagagcttccacgagggcgccctgggcgtggagggcacccccggctaccaggcccccgagatcagacccagaatcgtgtacgacgagaaggtggacatgttcagctacggcatggtgctgtacgagctgctgagcggccagagacccgccctgggccaccaccagctgcagatcgccaagaagctgagcaagggcatcagacccgtgctgggccagcccgaggaggtgcagttcagaagactgcaggccctgatgatggagtgctgggacaccaagcccgagaagagacccctggccctgagcgtggtgagccagatgaaggaccccaccttcgccaccttcatgtacgagctgtgctgcggcaagcagaccgccttcttcagcagccagggccaggagtacaccgtggtgttctgggacggcaaggaggagagcagaaactacaccgtggtgaacaccgagaagggcctgatggaggtgcagagaatgtgctgccccggcatgaaggtgagctgccagctgcaggtgcagagaagcctgtggaccgccaccgaggaccagaagatctacatctacaccctgaagggcatgtgccccctgaacaccccccagcaggccctggacacccccgccgtggtgacctgcttcctggccgtgcccgtgatcaagaagaacagctacctggtgctggccggcctggccgacggcctggtggccgtgttccccgtggtgagaggcacccccaaggacagctgcagctacctgtgcagccacaccgccaacagaagcaagttcagcatcgccgacgaggacgccagacagaacccctaccccgtgaaggccatggaggtggtgaacagcggcagcgaggtgtggtacagcaacggccccggcctgctggtgatcgactgcgccagcctggagatctgcagaagactggagccctacatggcccccagcatggtgaccagcgtggtgtgcagcagcgagggcagaggcgaggaggtggtgtggtgcctggacgacaaggccaacagcctggtgatgtaccacagcaccacctaccagctgtgcgccagatacttctgcggcgtgcccagccccctgagagacatgttccccgtgagacccctggacaccgagccccccgccgccagccacaccgccaaccccaaggtgcccgagggcgacagcatcgccgacgtgagcatcatgtacagcgaggagctgggcacccagatcctgatccaccaggagagcctgaccgactactgcagcatgagcagctacagcagcagcccccccagacaggccgccagaagccccagcagcctgcccagcagccccgccagcagcagcagcgtgcccttcagcaccgactgcgaggacagcgacatgctgcacacccccggcgccgccagcgacagaagcgagcacgacctgacccccatggacggcgagaccttcagccagcacctgcaggccgtgaagatcctggccgtgagagacctgatctgggtgcccagaagaggcggcgacgtgatcgtgatcggcctggagaaggacagcggcgcccagagaggcagagtgatcgccgtgctgaaggccagagagctgaccccccacggcgtgctggtggacgccgccgtggtggccaaggacaccgtggtgtgcaccttcgagaacgagaacaccgagtggtgcctggccgtgtggagaggctggggcgccagagagttcgacatcttctaccagagctacgaggagctgggcagactggaggcctgcaccagaaagagaagatag

SEQ ID NO: 86785 - DNA, 2025 bp, synthetic construct
  misc_feature 1..2025: note = Description of Artificial Sequence: Synthetic coding sequence
  source 1..2025: mol_type = other DNA
atgctgcacgccctgcagcacccctgcatcgtggccctgatcggcatcagcatccaccccctgtgcttcgccctggagctggcccccctgagcagcctgaacaccgtgctgagcgagaacgccagagacagcagcttcatccccctgggccacatgctgacccagaagatcgcctaccagatcgccagcggcctggcctacctgcacaagaagaacatcatcttctgcgacctgaagagcgacaacatcctggtgtggagcctggacgtgaaggagcacatcaacatcaagctgagcgactacggcatcagcagacagagcttccacgagggcgccctgggcgtggagggcacccccggctaccaggcccccgagatcagacccagaatcgtgtacgacgagaaggtggacatgttcagctacggcatggtgctgtacgagctgctgagcggccagagacccgccctgggccaccaccagctgcagatcgccaagaagctgagcaagggcatcagacccgtgctgggccagcccgaggaggtgcagttcagaagactgcaggccctgatgatggagtgctgggacaccaagcccgagaagagacccctggccctgagcgtggtgagccagatgaaggaccccaccttcgccaccttcatgtacgagctgtgctgcggcaagcagaccgccttcttcagcagccagggccaggagtacaccgtggtgttctgggacggcaaggaggagagcagaaactacaccgtggtgaacaccgagaagggcctgatggaggtgcagagaatgtgctgccccggcatgaaggtgagctgccagctgcaggtgcagagaagcctgtggaccgccaccgaggaccagaagatctacatctacaccctgaagggcatgtgccccctgaacaccccccagcaggccctggacacccccgccgtggtgacctgcttcctggccgtgcccgtgatcaagaagaacagctacctggtgctggccggcctggccgacggcctggtggccgtgttccccgtggtgagaggcacccccaaggacagctgcagctacctgtgcagccacaccgccaacagaagcaagttcagcatcgccgacgaggacgccagacagaacccctaccccgtgaaggccatggaggtggtgaacagcggcagcgaggtgtggtacagcaacggccccggcctgctggtgatcgactgcgccagcctggagatctgcagaagactggagccctacatggcccccagcatggtgaccagcgtggtgtgcagcagcgagggcagaggcgaggaggtggtgtggtgcctggacgacaaggccaacagcctggtgatgtaccacagcaccacctaccagctgtgcgccagatacttctgcggcgtgcccagccccctgagagacatgttccccgtgagacccctggacaccgagccccccgccgccagccacaccgccaaccccaaggtgcccgagggcgacagcatcgccgacgtgagcatcatgtacagcgaggagctgggcacccagatcctgatccaccaggagagcctgaccgactactgcagcatgagcagctacagcagcagcccccccagacaggccgccagaagccccagcagcctgcccagcagccccgccagcagcagcagcgtgcccttcagcaccgactgcgaggacagcgacatgctgcacacccccggcgccgccagcgacagaagcgagcacgacctgacccccatggacggcgagaccttcagccagcacctgcaggccgtgaagatcctggccgtgagagacctgatctgggtgcccagaagaggcggcgacgtgatcgtgatcggcctggagaaggacagcggcgcccagagaggcagagtgatcgccgtgctgaaggccagagagctgaccccccacggcatcatgcccgtgagcagcgtgaaggtgtgctgggccggctggcccgtgagagacatggtgtacatggtggccgtgatgtag

SEQ ID NO: 86786 - DNA, 99 bp, synthetic construct
  misc_feature 1..99: note = Description of Artificial Sequence: Synthetic coding sequence
  source 1..99: mol_type = other DNA
atggccggcatgagccagagaccccccagcatgtactggtgcgtgggccccgaggagagcgccgtgtgccccgagagagccatggagaccctgaactag

SEQ ID NO: 86787 - DNA, 1506 bp, synthetic construct
  misc_feature 1..1506: note = Description of Artificial Sequence: Synthetic coding sequence
  source 1..1506: mol_type = other DNA
atgttcagctacggcatggtgctgtacgagctgctgagcggccagagacccgccctgggccaccaccagctgcagatcgccaagaagctgagcaagggcatcagacccgtgctgggccagcccgaggaggtgcagttcagaagactgcaggccctgatgatggagtgctgggacaccaagcccgagaagagacccctggccctgagcgtggtgagccagatgaaggaccccaccttcgccaccttcatgtacgagctgtgctgcggcaagcagaccgccttcttcagcagccagggccaggagtacaccgtggtgttctgggacggcaaggaggagagcagaaactacaccgtggtgaacaccgagaagggcctgatggaggtgcagagaatgtgctgccccggcatgaaggtgagctgccagctgcaggtgcagagaagcctgtggaccgccaccgaggaccagaagatctacatctacaccctgaagggcatgtgccccctgaacaccccccagcaggccctggacacccccgccgtggtgacctgcttcctggccgtgcccgtgatcaagaagaacagctacctggtgctggccggcctggccgacggcctggtggccgtgttccccgtggtgagaggcacccccaaggacagctgcagctacctgtgcagccacaccgccaacagaagcaagttcagcatcgccgacgaggacgccagacagaacccctaccccgtgaaggccatggaggtggtgaacagcggcagcgaggtgtggtacagcaacggccccggcctgctggtgatcgactgcgccagcctggagatctgcagaagactggagccctacatggcccccagcatggtgaccagcgtggtgtgcagcagcgagggcagaggcgaggaggtggtgtggtgcctggacgacaaggccaacagcctggtgatgtaccacagcaccacctaccagctgtgcgccagatacttctgcggcgtgcccagccccctgagagacatgttccccgtgagacccctggacaccgagccccccgccgccagccacaccgccaaccccaaggtgcccgagggcgacagcatcgccgacgtgagcatcatgtacagcgaggagctgggcacccagatcctgatccaccaggagagcctgaccgactactgcagcatgagcagctacagcagcagcccccccagacaggccgccagaagccccagcagcctgcccagcagccccgccagcagcagcagcgtgcccttcagcaccgactgcgaggacagcgacatgctgcacacccccggcgccgccagcgacagaagcgagcacgacctgacccccatggacggcgagaccttcagccagcacctgcaggccgtgaagatcctggccgtgagagacctgatctgggtgcccagaagagtggagatgctgagcagcctggcctggagaagaatcctggcccccagcggcgccgagagcctgcccagctag

SEQ ID NO: 86788 - DNA, 7584 bp, synthetic construct
  misc_feature 1..7584: note = Description of Artificial Sequence: Synthetic coding sequence
  source 1..7584: mol_type = other DNA
atggccagcggcagctgccagggctgcgaggaggacgaggagaccctgaagaagctgatcgtgagactgaacaacgtgcaggagggcaagcagatcgagaccctggtgcagatcctggaggacctgctggtgttcacctacagcgagagagccagcaagctgttccagggcaagaacatccacgtgcccctgctgatcgtgctggacagctacatgagagtggccagcgtgcagcaggtgggctggagcctgctgtgcaagctgatcgaggtgtgccccggcaccatgcagagcctgatgggcccccaggacgtgggcaacgactgggaggtgctgggcgtgcaccagctgatcctgaagatgctgaccgtgcacaacgccagcgtgaacctgagcgtgatcggcctgaagaccctggacctgctgctgaccagcggcaagatcaccctgctgatcctggacgaggagagcgacatcttcatgctgatcttcgacgccatgcacagcttccccgccaacgacgaggtgcagaagctgggctgcaaggccctgcacgtgctgttcgagagagtgagcgaggagcagctgaccgagttcgtggagaacaaggactacatgatcctgctgagcgccctgaccaacttcaaggacgaggaggagatcgtgctgcacgtgctgcactgcctgcacagcctggccatcccctgcaacaacgtggaggtgctgatgagcggcaacgtgagatgctacaacatcgtggtggaggccatgaaggccttccccatgagcgagagaatccaggaggtgagctgctgcctgctgcacagactgaccctgggcaacttcttcaacatcctggtgctgaacgaggtgcacgagttcgtggtgaaggccgtgcagcagtaccccgagaacgccgccctgcagatcagcgccctgagctgcctggccctgctgaccgagaccatcttcctgaaccaggacctggaggagaagaacgagaaccaggagaacgacgacgagggcgaggaggacaagctgttctggctggaggcctgctacaaggccctgacctggcacagaaagaacaagcacgtgcaggaggccgcctgctgggccctgaacaacctgctgatgtaccagaacagcctgcacgagaagatcggcgacgaggacggccacttccccgcccacagagaggtgatgctgagcatgctgatgcacagcagcagcaaggaggtgttccaggccagcgccaacgccctgagcaccctgctggagcagaacgtgaacttcagaaagatcctgctgagcaagggcatccacctgaacgtgctggagctgatgcagaagcacatccacagccccgaggtggccgagagcggctgcaagatgctgaaccacctgttcgagggcagcaacaccagcctggacatcatggccgccgtggtgcccaagatcctgaccgtgatgaagagacacgagaccagcctgcccgtgcagctggaggccctgagagccatcctgcacttcatcgtgcccggcatgcccgaggagagcagagaggacaccgagttccaccacaagctgaacatggtgaagaagcagtgcttcaagaacgacatccacaagctggtgctggccgccctgaacagattcatcggcaaccccggcatccagaagtgcggcctgaaggtgatcagcagcatcgtgcacttccccgacgccctggagatgctgagcctggagggcgccatggacagcgtgctgcacaccctgcagatgtaccccgacgaccaggagatccagtgcctgggcctgagcctgatcggctacctgatcaccaagaagaacgtgttcatcggcaccggccacctgctggccaagatcctggtgagcagcctgtacagattcaaggacgtggccgagatccagaccaagggcttccagaccatcctggccatcctgaagctgagcgccagcttcagcaagctgctggtgcaccacagcttcgacctggtgatcttccaccagatgagcagcaacatcatggagcagaaggaccagcagttcctgaacctgtgctgcaagtgcttcgccaaggtggccatggacgactacctgaagaacgtgatgctggagagagcctgcgaccagaacaacagcatcatggtggagtgcctgctgctgctgggcgccgacgccaaccaggccaaggagggcagcagcctgatctgccaggtgtgcgagaaggagagcagccccaagctggtggagctgctgctgaacagcggcagcagagagcaggacgtgagaaaggccctgaccatcagcatcggcaagggcgacagccagatcatcagcctgctgctgagaagactggccctggacgtggccaacaacagcatctgcctgggcggcttctgcatcggcaaggtggagcccagctggctgggccccctgttccccgacaagaccagcaacctgagaaagcagaccaacatcgccagcaccctggccagaatggtgatcagataccagatgaagagcgccgtggaggagggcaccgccagcggcagcgacggcaacttcagcgaggacgtgctgagcaagttcgacgagtggaccttcatccccgacagcagcatggacagcgtgttcgcccagagcgacgacctggacagcgagggcagcgagggcagcttcctggtgaagaagaagagcaacagcatcagcgtgggcgagttctacagagacgccgtgctgcagagatgcagccccaacctgcagagacacagcaacagcctgggccccatcttcgaccacgaggacctgctgaagagaaagagaaagatcctgagcagcgacgacagcctgagaagcagcaagctgcagagccacatgagacacagcgacagcatcagcagcctggccagcgagagagagtacatcaccagcctggacctgagcgccaacgagctgagagacatcgacgccctgagccagaagtgctgcatcagcgtgcacctggagcacctggagaagctggagctgcaccagaacgccctgaccagcttcccccagcagctgtgcgagaccctgaagagcctgacccacctggacctgcacagcaacaagttcaccagcttccccagctacctgctgaagatgagctgcatcgccaacctggacgtgagcagaaacgacatcggccccagcgtggtgctggaccccaccgtgaagtgccccaccctgaagcagttcaacctgagctacaaccagctgagcttcgtgcccgagaacctgaccgacgtggtggagaagctggagcagctgatcctggagggcaacaagatcagcggcatctgcagccccctgagactgaaggagctgaagatcctgaacctgagcaagaaccacatcagcagcctgagcgagaacttcctggaggcctgccccaaggtggagagcttcagcgccagaatgaacttcctggccgccatgcccttcctgccccccagcatgaccatcctgaagctgagccagaacaagttcagctgcatccccgaggccatcctgaacctgccccacctgagaagcctggacatgagcagcaacgacatccagtacctgcccggccccgcccactggaagagcctgaacctgagagagctgctgttcagccacaaccagatcagcatcctggacctgagcgagaaggcctacctgtggagcagagtggagaagctgcacctgagccacaacaagctgaaggagatcccccccgagatcggctgcctggagaacctgaccagcctggacgtgagctacaacctggagctgagaagcttccccaacgagatgggcaagctgagcaagatctgggacctgcccctggacgagctgcacctgaacttcgacttcaagcacatcggctgcaaggccaaggacatcatcagattcctgcagcagagactgaagaaggccgtgccctacaacagaatgaagctgatgatcgtgggcaacaccggcagcggcaagaccaccctgctgcagcagctgatgaagaccaagaagagcgacctgggcatgcagagcgccaccgtgggcatcgacgtgaaggactggcccatccagatcagagacaagagaaagagagacctggtgctgaacgtgtgggacttcgccggcagagaggagttctacagcacccacccccacttcatgacccagagagccctgtacctggccgtgtacgacctgagcaagggccaggccgaggtggacgccatgaagccctggctgttcaacatcaaggccagagccagcagcagccccgtgatcctggtgggcacccacctggacgtgagcgacgagaagcagagaaaggcctgcatgagcaagatcaccaaggagctgctgaacaagagaggcttccccgccatcagagactaccacttcgtgaacgccaccgaggagagcgacgccctggccaagctgagaaagaccatcatcaacgagagcctgaacttcaagatcagagaccagctggtggtgggccagctgatccccgactgctacgtggagctggagaagatcatcctgagcgagagaaagaacgtgcccatcgagttccccgtgatcgacagaaagagactgctgcagctggtgagagagaaccagctgcagctggacgagaacgagctgccccacgccgtgcacttcctgaacgagagcggcgtgctgctgcacttccaggaccccgccctgcagctgagcgacctgtacttcgtggagcccaagtggctgtgcaagatcatggcccagatcctgaccgtgaaggtggagggctgccccaagcaccccaagggcatcatcagcagaagagacgtggagaagttcctgagcaagaagagaaagttccccaagaactacatgagccagtacttcaagctgctggagaagttccagatcgccctgcccatcggcgaggagtacctgctggtgcccagcagcctgagcgaccacagacccgtgatcgagctgccccactgcgagaacagcgagatcatcatcagactgtacgagatgccctacttccccatgggcttctggagcagactgatcaacagactgctggagatcagcccctacatgctgagcggcagagagagagccctgagacccaacagaatgtactggagacagggcatctacctgaactggagccccgaggcctactgcctggtgggcagcgaggtgctggacaaccaccccgagagcttcctgaagatcaccgtgcccagctgcagaaagggctgcatcctgctgggccaggtggtggaccacatcgacagcctgatggaggagtggttccccggcctgctggagatcgacatctgcggcgagggcgagaccctgctgaagaagtgggccctgtacagcttcaacgacggcgaggagcaccagaagatcctgctggacgacctgatgaagaaggccgaggagggcgacctgctggtgaaccccgaccagcccagactgaccatccccatcagccagatcgcccccgacctgatcctggccgacctgcccagaaacatcatgctgaacaacgacgagctggagttcgagcaggcccccgagttcctgctgggcgacggcagcttcggcagcgtgtacagagccgcctacgagggcgaggaggtggccgtgaagatcttcaacaagcacaccagcctgagactgctgagacaggagctggtggtgctgtgccacctgcaccaccccagcctgatcagcctgctggccgccggcatcagacccagaatgctggtgatggagctggccagcaagggcagcctggacagactgctgcagcaggacaaggccagcctgaccagaaccctgcagcacagaatcgccctgcacgtggccgacggcctgagatacctgcacagcgccatgatcatctacagagacctgaagccccacaacgtgctgctgttcaccctgtaccccaacgccgccatcatcgccaagatcgccgactacggcatcgcccagtactgctgcagaatgggcatcaagaccagcgagggcacccccggcttcagagcccccgaggtggccagaggcaacgtgatctacaaccagcaggccgacgtgtacagcttcggcctgctgctgtacgacatcctgaccaccggcggcagaatcgtggagggcctgaagttccccaacgagttcgacgagctggagatccagggcaagctgcccgaccccgtgaaggagtacggctgcgccccctggcccatggtggagaagctgatcaagcagtgcctgaaggagaacccccaggagagacccaccagcgcccaggtgttcgacatcctgaacagcgccgagctggtgtgcctgaccagaagaatcctgctgcccaagaacgtgatcgtggagtgcatggtggccacccaccacaacagcagaaacgccagcatctggctgggctgcggccacaccgacagaggccagctgagcttcctggacctgaacaccgagggctacaccagcgaggaggtggccgacagcagaatcctgtgcctggccctggtgcacctgcccgtggagaaggagagctggatcgtgagcggcacccagagcggcaccctgctggtgatcaacaccgaggacggcaagaagagacacaccctggagaagatgaccgacagcgtgacctgcctgtactgcaacagcttcagcaagcagagcaagcagaagaacttcctgctggtgggcaccgccgacggcaagctggccatcttcgaggacaagaccgtgaagctgaagggcgccgcccccctgaagatcctgaacatcggcaacgtgagcacccccctgatgtgcctgagcgagagcaccaacagcaccgagagaaacgtgatgtggggcggctgcggcaccaagatcttcagcttcagcaacgacttcaccatccagaagctgatcgagaccagaaccagccagctgttcagctacgccgccttcagcgacagcaacatcatcaccgtggtggtggacaccgccctgtacatcgccaagcagaacagccccgtggtggaggtgtgggacaagaagaccgagaagctgtgcggcctgatcgactgcgtgcacttcctgagagaggtgatggtgaaggagaacaaggagagcaagcacaagatgagctacagcggcagagtgaagaccctgtgcctgcagaagaacaccgccctgtggatcggcaccggcggcggccacatcctgctgctggacctgagcaccagaagactgatcagagtgatctacaacttctgcaacagcgtgagagtgatgatgaccgcccagctgggcagcctgaagaacgtgatgctggtgctgggctacaacagaaagaacaccgagggcacccagaagcagaaggagatccagagctgcctgaccgtgtgggacatcaacctgccccacgaggtgcagaacctggagaagcacatcgaggtgagaaaggagctggccgagaagatgagaagaaccagcgtggagtag

SEQ ID NO: 86789 - DNA, 582 bp, synthetic construct
  misc_feature 1..582: note = Description of Artificial Sequence: Synthetic coding sequence
  source 1..582: mol_type = other DNA
atgaccagcagctgcttcagaagcaccaccagaagaagcctgagcagccagaccgcccagagactggtgtgcccccagttcatcaacggcaccgccaaggacagcatcctgaccagcagaagccaggtgcccatcatcctgcagtggaacaagagcagcaagaagttcgtgccccacggcgacatccccaacatggaggacgtgctggccgtgaagagcttcagaatgcagaacaccctgtacctgagcctgaccagattcatcggcgacagcagagtgatgagatggaacagcaagcagttcgtggagatccaggccctgcccagcagaggcgccatgaccctgcagcccttcagcttcaaggacaaccactacctggccctgggcagcgactacaccttcagccagatctaccagtgggacaaggagaagcagctgttcaagaagttcaaggagatctacgtgcaggcccccagaagcttcaccgccgtgagcaccgacagaagagacttcttcttcgccagcagcttcaagggcaagaccaagatcttcgagcacatcatcgtggacctgagcctgtag

SEQ ID NO: 86790 - DNA, 1638 bp, synthetic construct
  misc_feature 1..1638: note = Description of Artificial Sequence: Synthetic coding sequence
  source 1..1638: mol_type = other DNA
atggccctgagaagaggcggctgcggcgccctgggcctgctgctgctgctgctgggcgccgcctgcctgatccccagaagcgcccaggtgagaagactggccagatgccccgccacctgcagctgcaccaaggagagcatcatctgcgtgggcagcagctgggtgcccagaatcgtgcccggcgacatcagcagcctgagcctggtgaacggcaccttcagcgagatcaaggacagaatgttcagccacctgcccagcctgcagctgctgctgctgaacagcaacagcttcaccatcatcagagacgacgccttcgccggcctgttccacctggagtacctgttcatcgagggcaacaagatcgagaccatcagcagaaacgccttcagaggcctgagagacctgacccacctgagcctggccaacaaccacatcaaggccctgcccagagacgtgttcagcgacctggacagcctgatcgagctggacctgagaggcaacaagttcgagtgcgactgcaaggccaagtggctgtacctgtggctgaagatgaccaacagcaccgtgagcgacgtgctgtgcatcggcccccccgagtaccaggagaagaagctgaacgacgtgaccagcttcgactacgagtgcaccaccaccgacttcgtggtgcaccagaccctgccctaccagagcgtgagcgtggacaccttcaacagcaagaacgacgtgtacgtggccatcgcccagcccagcatggagaactgcatggtgctggagtgggaccacatcgagatgaacttcagaagctacgacaacatcaccggccagagcatcgtgggctgcaaggccatcctgatcgacgaccaggtgttcgtggtggtggcccagctgttcggcggcagccacatctacaagtacgacgagagctggaccaagttcgtgaagttccaggacatcgaggtgagcagaatcagcaagcccaacgacatcgagctgttccagatcgacgacgagaccttcttcgtgatcgccgacagcagcaaggccggcctgagcaccgtgtacaagtggaacagcaagggcttctacagctaccagagcctgcacgagtggttcagagacaccgacgccgagttcgtggacatcgacggcaagagccacctgatcctgagcagcagaagccaggtgcccatcatcctgcagtggaacaagagcagcaagaagttcgtgccccacggcgacatccccaacatggaggacgtgctggccgtgaagagcttcagaatgcagaacaccctgtacctgagcctgaccagattcatcggcgacagcagagtgatgagatggaacagcaagcagttcgtggagatccaggccctgcccagcagaggcgccatgaccctgcagcccttcagcttcaaggacaaccactacctggccctgggcagcgactacaccttcagccagatctaccagtgggacaaggagaagcagctgttcaagaagttcaaggagatctacgtgcaggcccccagaagcttcaccgccgtgagcaccgacagaagagacttcttcttcgccagcagcttcaagggcaagaccaagatcttcgagcacatcatcgtggacctgagcctgtag

SEQ ID NO: 86791 - DNA, 1647 bp, synthetic construct
  misc_feature 1..1647: note = Description of Artificial Sequence: Synthetic coding sequence
  source 1..1647: mol_type = other DNA
atggccggcctgagagccagaggcggccccggccccggcctgctggccctgagcgccctgggcttctgcctgatgctgcaggtgagcgccaagagaccccccaagacccccccctgcccccccagctgcagctgcaccagagacaccgccttctgcgtggacagcaaggccgtgcccagaaacctgcccagcgaggtgatcagcctgaccctggtgaacgccgccttcagcgagatccaggacggcgccttcagccacctgcccctgctgcagttcctgctgctgaacagcaacaagttcaccctgatcggcgacaacgccttcaccggcctgagccacctgcagtacctgttcatcgagaacaacgacatctgggccctgagcaagttcaccttcagaggcctgaagagcctgacccacctgagcctggccaacaacaacctgcagaccctgcccagagacatcttcagacccctggacatcctgaacgacctggacctgagaggcaacagcctgaactgcgactgcaaggtgaagtggctggtggagtggctggcccacaccaacaccaccgtggcccccatctactgcgccagcccccccagattccaggagcacaaggtgcaggacctgcccctgagagagttcgactgcatcaccaccgacttcgtgctgtaccagaccctggccttccccgccgtgagcgccgagcccttcctgtacagcagcgacctgtacctggccctggcccagcccggcgtgagcgcctgcaccatcctgaagtgggactacgtggagagacagctgagagactacgacagaatccccgcccccagcgccgtgcactgcaagcccatggtggtggacagccagctgtacgtggtggtggcccagctgttcggcggcagctacatctaccactgggaccccaacaccaccagattcaccagactgcaggacatcgacccccagagagtgagaaagcccaacgacctggaggccttcagaatcgacggcgactggtacttcgccgtggccgacagcagcaaggccggcgccaccagcctgtacagatggcaccagaacggcttctacagccaccaggccctgcacccctggcacagagacaccgacctggagttcgtggacggcgagggcaagcccagactgatcgtgagcagcagcagccaggcccccgtgatctaccagtggagcagaacccagaagcagttcgtggcccagggcgaggtgacccaggtgcccgacgcccaggccgtgaagcacttcagagccggcagagacagctacctgtgcctgagcagatacatcggcgacagcaagatcctgagatgggagggcaccagattcagcgaggtgcaggccctgcccagcagaggcagcctggccctgcagcccttcctggtgggcggcagaagatacctggccctgggcagcgacttcagcttcacccagatctaccagtgggacgagggcagacagaagttcgtgagattccaggagctggccgtgcaggcccccagagccttctgctacatgcccgccggcgacgcccagctgctgctggcccccagcttcaagggccagaccctggtgtacagacacatcgtggtggacctgagcgcctag

SEQ ID NO: 86792 - DNA, 1614 bp, synthetic construct
  misc_feature 1..1614: note = Description of Artificial Sequence: Synthetic coding sequence
  source 1..1614: mol_type = other DNA
atgggcggcgccggcatcctgctgctgctgctggccggcgccggcgtggtggtggcctggagaccccccaagggcaagtgccccctgagatgcagctgcagcaaggacagcgccctgtgcgagggcagccccgacctgcccgtgagcttcagccccaccctgctgagcctgagcctggtgagaaccggcgtgacccagctgaaggccggcagcttcctgagaatccccagcctgcacctgctgctgttcaccagcaacagcttcagcgtgatcgaggacgacgccttcgccggcctgagccacctgcagtacctgttcatcgaggacaacgagatcggcagcatcagcaagaacgccctgagaggcctgagaagcctgacccacctgagcctggccaacaaccacctggagaccctgcccagattcctgttcagaggcctggacaccctgacccacgtggacctgagaggcaaccccttccagtgcgactgcagagtgctgtggctgctgcagtggatgcccaccgtgaacgccagcgtgggcaccggcgcctgcgccggccccgccagcctgagccacatgcagctgcaccacctggaccccaagaccttcaagtgcagagccatcgagctgagctggttccagaccgtgggcgagagcgccctgagcgtggagcccttcagctaccagggcgagccccacatcgtgctggcccagcccttcgccggcagatgcctgatcctgagctgggactacagcctgcagagattcagacccgaggaggagctgcccgccgccagcgtggtgagctgcaagcccctggtgctgggccccagcctgttcgtgctggccgccagactgtggggcggcagccagctgtgggccagacccagccccggcctgagactggcccccacccagaccctggcccccagaagactgctgagacccaacgacgccgagctgctgtggctggagggccagccctgcttcgtggtggccgacgccagcaaggccggcagcaccaccctgctgtgcagagacggccccggcttctacccccaccagagcctgcacgcctggcacagagacaccgacgccgaggccctggagctggacggcagaccccacctgctgctggccagcgccagccagagacccgtgctgttccactggaccggcggcagattcgagagaagaaccgacatccccgaggccgaggacgtgtacgccaccagacacttccaggccggcggcgacgtgttcctgtgcctgaccagatacatcggcgacagcatggtgatgagatgggacggcagcatgttcagactgctgcagcagctgcccagcagaggcgcccacgtgttccagcccctgctgatcgccagagaccagctggccatcctgggcagcgacttcgccttcagccaggtgctgagactggagcccgacaagggcctgctggagcccctgcaggagctgggcccccccgccctggtggcccccagagccttcgcccacatcaccatggccggcagaagattcctgttcgccgcctgcttcaagggccccacccagatctaccagcaccacgagatcgacctgagcgcctag

SEQ ID NO: 86793 - DNA, 1485 bp, synthetic construct
  misc_feature 1..1485: note = Description of Artificial Sequence: Synthetic coding sequence
  source 1..1485: mol_type = other DNA
atgggcggcgccggcatcctgctgctgctgctggccggcgccggcgtggtggtggcctggagaccccccaagggcaagtgccccctgagatgcagctgcagcaaggacagcgccctgtgcgagggcagccccgacctgcccgtgagcttcagccccaccctgctgagcctgagcctggtgagaaccggcgtgacccagctgaaggccggcagcttcctgagaatccccagcctgcacctgctgctgttcaccagcaacagcttcagcgtgatcgaggacgacgccttcgccggcctgagccacctgcagtacctgttcatcgaggacaacgagatcggcagcatcagcaagaacgccctgagaggcctgagaagcctgacccacctgagcctggccaacaaccacctggagaccctgcccagattcctgttcagaggcctggacaccctgacccacgtggacctgagaggcaaccccttccagtgcgactgcagagtgctgtggctgctgcagtggatgcccaccgtgaacgccagcgtgggcaccggcgcctgcgccggccccgccagcctgagccacatgcagctgcaccacctggaccccaagaccttcaagtgcagagccatcgagctgagctggttccagaccgtgggcgagagcgccctgagcgtggagcccttcagctaccagggcgagccccacatcgtgctggcccagcccttcgccggcagatgcctgatcctgagctgggactacagcctgcagagattcagacccgaggaggagctgcccggcgagcccccccccagacccagcgcctgccccgccgcctgcctggccggcctgacctgcctgcccaccagcccccagagacccccctggtgccccgccagccactggtgctgggccagagccagcagctgctggctgcccgcctgcggcggcgcccacagctgcggccccggccccgtgcccgcctgcgcctggccccagagaagaccctggcccagaggcggctgctgcggccccatgacccccagcagctgcggctggaagggcaaccccgccagctggtggcccatgccccccagaagagccgcccccagatgctgcgccgccaccggccccgccttcaccagaaccagagcctgcacccccggcaccggcaccagaaccctgagaccctggagctggaccgccggccccacctgctgctggcccagactgcccagcggcccctgcagcagcaccggccccgtggccgccagcagagacgcccagaccagccccagacccagaatgagcatgccccacgccaccagcagactggtgggcacctgcagctgcgccagccacgccaccctgggcaccccctggagctgcgccggcaccgccccctgcttcgtgtgctgcagcaacttccccagagccgtgcccaccagcagcagccactgcagcagccccggcaccagctggcccagctag

SEQ ID NO: 86794 - DNA, 1617 bp, synthetic construct
  misc_feature 1..1617: note = Description of Artificial Sequence: Synthetic coding sequence
  source 1..1617: mol_type = other DNA
atgggcggcgccggcatcctgctgctgctgctggccggcgccggcgtggtggtggcctggagaccccccaagggcaagtgccccctgagatgcagctgcagcaaggacagcgccctgtgcgagggcagccccgacctgcccgtgagcttcagccccaccctgctgagcctgagcctggtgagaaccggcgtgacccagctgaaggccggcagcttcctgagaatccccagcctgcacctgctgctgttcaccagcaacagcttcagcgtgatcgaggacgacgccttcgccggcctgagccacctgcagtacctgttcatcgaggacaacgagatcggcagcatcagcaagaacgccctgagaggcctgagaagcctgacccacctgagcctggccaacaaccacctggagaccctgcccagattcctgttcagaggcctggacaccctgacccacgtggacctgagaggcaaccccttccagtgcgactgcagagtgctgtggctgctgcagtggatgcccaccgtgaacgccagcgtgggcaccggcgcctgcgccggccccgccagcctgagccacatgcagctgcaccacctggaccccaagaccttcaagtgcagagccatcgagctgagctggttccagaccgtgggcgagagcgccctgagcgtggagcccttcagctaccagggcgagccccacatcgtgctggcccagcccttcgccggcagatgcctgatcctgagctgggactacagcctgcagagattcagacccgaggaggagctgcccgccgccagcgtggtgagctgcaagcccctggtgctgggccccagcctgttcgtgctggccgccagactgtggggcggcagccagctgtgggccagacccagccccggcctgagactggcccccacccagaccctggcccccagaagactgctgagacccaacgacgccgagctgctgtggctggagggccagccctgcttcgtggtggccgacgccagcaaggccggcagcaccaccctgctgtgcagagacggccccggcttctacccccaccagagcctgcacgcctggcacagagacaccgacgccgaggccctggagctggacggcagaccccacctgctgctggccagcgccagccagagacccgtgctgttccactggaccggcggcagattcgagagaagaaccgacatccccgaggccgaggacgtgtacgccaccagacacttccaggccggcggcgacgtgttcctgtgcctgaccagatacatcggcgacagcatggtggtgatgagatgggacggcagcatgttcagactgctgcagcagctgcccagcagaggcgcccacgtgttccagcccctgctgatcgccagagaccagctggccatcctgggcagcgacttcgccttcagccaggtgctgagactggagcccgacaagggcctgctggagcccctgcaggagctgggcccccccgccctggtggcccccagagccttcgcccacatcaccatggccggcagaagattcctgttcgccgcctgcttcaagggccccacccagatctaccagcaccacgagatcgacctgagcgcctag

SEQ ID NO: 86795 - DNA, 2091 bp, synthetic construct
  misc_feature 1..2091: note = Description of Artificial Sequence: Synthetic coding sequence
  source 1..2091: mol_type = other DNA
atggccacccccggcagcgagccccagcccttcgtgcccgccctgagcgtggccaccctgcaccccctgcaccacccccaccaccaccaccaccaccaccagcaccacggcggcaccggcgcccccggcggcgccggcggcggcggcggcggcagcggcggcttcaacctgcccctgaacagaggcctggagagagccctggaggaggccgccaacagcggcggcctgaacctgagcgccagaaagctgaaggagttccccagaaccgccgcccccggccacgacctgagcgacaccgtgcaggccgacctgagcaagaacagactggtggaggtgcccatggagctgtgccacttcgtgagcctggagatcctgaacctgtaccacaactgcatcagagtgatccccgaggccatcgtgaacctgcagatgctgacctacctgaacctgagcagaaaccagctgagcgccctgcccgcctgcctgtgcggcctgcccctgaaggtgctgatcgccagcaacaacaagctgggcagcctgcccgaggagatcggccagctgaagcagctgatggagctggacgtgagctgcaacgagatcaccgccctgccccagcagatcggccagctgaagagcctgagagagctgaacgtgagaagaaactacctgaaggtgctgccccaggagctggtggacctgagcctggtgaagttcgacttcagctgcaacaaggtgctggtgatccccatctgcttcagagagatgaagcagctgcaggtgctgctgctggagaacaaccccctgcagagcccccccgcccagatctgcaccaagggcaaggtgcacatcttcaagtacctgagcatccaggcctgccagatcaagaccgccgacagcctgtacctgcacaccatggagagaccccacctgcaccagcacgtggaggacggcaagaaggacagcgacagcggcgtgggcagcgacaacggcgacaagagactgagcgccaccgagcccagcgacgaggacaccgtgagcctgaacgtgcccatgagcaacatcatggaggaggagcagatcatcaaggaggacagctgccacagactgagccccgtgaagggcgagttccaccaggagttccagcccgagcccagcctgctgggcgacagcaccaacagcggcgaggagagagaccagttcaccgacagagccgacggcctgcacagcgagttcatgaactacaaggccagagccgaggactgcgaggagctgctgagaatcgaggaggacgtgcactggcagaccgagggcatcatcagcagcagcaaggaccaggacatggacatcgccatgatcgagcagctgagagaggccgtggacctgctgcaggaccccaacggcctgagcaccgacatcaccgagagaagcgtgctgaacctgtaccccatgggcagcgccgaggccctggagctgcaggacagcgccctgaacggccagatccagctggagaccagccccgtgtgcgaggtgcagagcgacctgaccctgcagagcaacggcagccagtacagccccaacgagatcagagagaacagccccgccgtgagccccaccaccaacagcaccgcccccttcggcctgaagcccagaagcgtgttcctgagaccccagagaaacctggagagcatcgacccccagttcaccatcagaagaaagatggagcagatgagagaggagaaggagctggtggagcagctgagagagagcatcgagatgagactgaaggtgagcctgcacgaggacctgggcgccgccctgatggacggcgtggtgctgtgccacctggtgaaccacatcagacccagaagcgtggccagcatccacgtgcccagccccgccgtgcccaagctgagcatggccaagtgcagaagaaacgtggagaacttcctggaggcctgcagaaagctgggcgtgcccgaggagaagctgtgcctgccccaccacatcctggaggagaagggcctggtgaaggtgggcatcaccatccaggccctgctggacatcaccgtgaccaaggccctgttcacctag

SEQ ID NO: 86796 - DNA, 2187 bp, synthetic construct
  misc_feature 1..2187: note = Description of Artificial Sequence: Synthetic coding sequence
  source 1..2187: mol_type = other DNA
atggccacccccggcagcgagccccagcccttcgtgcccgccctgagcgtggccaccctgcaccccctgcaccacccccaccaccaccaccaccaccaccagcaccacggcggcaccggcgcccccggcggcgccggcggcggcggcggcggcagcggcggcttcaacctgcccctgaacagaggcctggagagagccctggaggaggccgccaacagcggcggcctgaacctgagcgccagaaagctgaaggagttccccagaaccgccgcccccggccacgacctgagcgacaccgtgcaggccgacctgagcaagaacagactggtggaggtgcccatggagctgtgccacttcgtgagcctggagatcctgaacctgtaccacaactgcatcagagtgatccccgaggccatcgtgaacctgcagatgctgacctacctgaacctgagcagaaaccagctgagcgccctgcccgcctgcctgtgcggcctgcccctgaaggtgctgatcgccagcaacaacaagctgggcagcctgcccgaggagatcggccagctgaagcagctgatggagctggacgtgagctgcaacgagatcaccgccctgccccagcagatcggccagctgaagagcctgagagagctgaacgtgagaagaaactacctgaaggtgctgccccaggagctggtggacctgagcctggtgaagttcgacttcagctgcaacaaggtgctggtgatccccatctgcttcagagagatgaagcagctgcaggtgctgctgctggagaacaaccccctgcagagcccccccgcccagatctgcaccaagggcaaggtgcacatcttcaagtacctgagcatccaggcctgccagatcaagaccgccgacagcctgtacctgcacaccatggagagaccccacctgcaccagcacgtggaggacggcaagaaggacagcgacagcggcgtgggcagcgacaacggcgacaagagactgagcgccaccgagcccagcgacgaggacaccgtgagcctgaacgtgcccatgagcaacatcatggaggaggagcagatcatcaaggaggacagctgccacagactgagccccgtgaagggcgagttccaccaggagttccagcccgagcccagcctgctgggcgacagcaccaacagcggcgaggagagagaccagttcaccgacagagccgacggcctgcacagcgagttcatgaactacaaggccagagccgaggactgcgaggagctgctgagaatcgaggaggacgtgcactggcagaccgagggcatcatcagcagcagcaaggaccaggacatggacatcgccatgatcgagcagctgagagaggccgtggacctgctgcaggaccccaacggcctgagcaccgacatcaccgagagaagcgtgctgaacctgtaccccatgggcagcgccgaggccctggagctgcaggacagcgccctgaacggccagatccagctggagaccagccccgtgtgcgaggtgcagagcgacctgaccctgcagagcaacggcagccagtacagccccaacgagatcagagagaacagccccgccgtgagccccaccaccaacagcaccgcccccttcggcctgaagcccagaagcgtgttcctgagaccccagagaaacctggagagcatcgacccccagttcaccatcagaagaaagatggagcagatgagagaggagaaggagctggtggagcagctgagagagagcatcgagatgagactgaaggtgagcctgcacgaggacctgggcgccgccctgatggacggcgtggtgctgtgccacctggtgaaccacatcagacccagaagcgtggccagcatccacgtgcccagccccgccgtgcccaagctgagcatggccaagtgcagaagaaacgtggagaacttcctggaggcctgcagaaagctgggcgtgcccgaggccgacctgtgcagcccctgcgacatcctgcagctggacttcagacacatcagaaagaccgtggacaccctgctggccctgggcgagaaggcccccccccccaccagcgccctgagaagcagagacctgatcggcttctgcctggtgcacatcctgttcatcgtgctggtgtacatcacctaccactggaacgccctgagcgcctag

SEQ ID NO: 86797 - DNA, 2292 bp, synthetic construct
  misc_feature 1..2292: note = Description of Artificial Sequence: Synthetic coding sequence
  source 1..2292: mol_type = other DNA
atggccacccccggcagcgagccccagcccttcgtgcccgccctgagcgtggccaccctgcaccccctgcaccacccccaccaccaccaccaccaccaccagcaccacggcggcaccggcgcccccggcggcgccggcggcggcggcggcggcagcggcggcttcaacctgcccctgaacagaggcctggagagagccctggaggaggccgccaacagcggcggcctgaacctgagcgccagaaagctgaaggagttccccagaaccgccgcccccggccacgacctgagcgacaccgtgcaggccgacctgagcaagaacagactggtggaggtgcccatggagctgtgccacttcgtgagcctggagatcctgaacctgtaccacaactgcatcagagtgatccccgaggccatcgtgaacctgcagatgctgacctacctgaacctgagcagaaaccagctgagcgccctgcccgcctgcctgtgcggcctgcccctgaaggtgctgatcgccagcaacaacaagctgggcagcctgcccgaggagatcggccagctgaagcagctgatggagctggacgtgagctgcaacgagatcaccgccctgccccagcagatcggccagctgaagagcctgagagagctgaacgtgagaagaaactacctgaaggtgctgccccaggagctggtggacctgagcctggtgaagttcgacttcagctgcaacaaggtgctggtgatccccatctgcttcagagagatgaagcagctgcaggtgctgctgctggagaacaaccccctgcagagcccccccgcccagatctgcaccaagggcaaggtgcacatcttcaagtacctgagcatccaggcctgccagatcaagaccgccgacagcctgtacctgcacaccatggagagaccccacctgcaccagcacgtggaggacggcaagaaggacagcgacagcggcgtgggcagcgacaacggcgacaagagactgagcgccaccgagcccagcgacgaggacaccgtgagcctgaacgtgcccatgagcaacatcatggaggaggagcagatcatcaaggaggacagctgccacagactgagccccgtgaagggcgagttccaccaggagttccagcccgagcccagcctgctgggcgacagcaccaacagcggcgaggagagagaccagttcaccgacagagccgacggcctgcacagcgagttcatgaactacaaggccagagccgaggactgcgaggagctgctgagaatcgaggaggacgtgcactggcagaccgagggcatcatcagcagcagcaaggaccaggacatggacatcgccatgatcgagcagctgagagaggccgtggacctgctgcaggaccccaacggcctgagcaccgacatcaccgagagaagcgtgctgaacctgtaccccatgggcagcgccgaggccctggagctgcaggacagcgccctgaacggccagatccagctggagaccagccccgtgtgcgaggtgcagagcgacctgaccctgcagagcaacggcagccagtacagccccaacgagatcagagagaacagccccgccgtgagccccaccaccaacagcaccgcccccttcggcctgaagcccagaagcgaccccgccctgatcctgccccccatcagcttcaacaccctgacccaggcccagacctgggacagcagcagctacagcgtgcccagcgagggcgacagcgacaacgtgttcctgagaccccagagaaacctggagagcatcgacccccagttcaccatcagaagaaagatggagcagatgagagaggagaaggagctggtggagcagctgagagagagcatcgagatgagactgaaggtgagcctgcacgaggacctgggcgccgccctgatggacggcgtggtgctgtgccacctggtgaaccacatcagacccagaagcgtggccagcatccacgtgcccagccccgccgtgcccaagctgagcatggccaagtgcagaagaaacgtggagaacttcctggaggcctgcagaaagctgggcgtgcccgaggccgacctgtgcagcccctgcgacatcctgcagctggacttcagacacatcagaaagaccgtggacaccctgctggccctgggcgagaaggcccccccccccaccagcgccctgagaagcagagacctgatcggcttctgcctggtgcacatcctgttcatcgtgctggtgtacatcacctaccactggaacgccctgagcgcctag

SEQ ID NO: 86798 - DNA, 3282 bp, synthetic construct
  misc_feature 1..3282: note = Description of Artificial Sequence: Synthetic coding sequence
  source 1..3282: mol_type = other DNA
atggccagacccgtgagaggcggcctgggcgcccccagaagaagcccctgcctgctgctgctgtggctgctgctgctgagactggagcccgtgaccgccgccgccggccccagagccccctgcgccgccgcctgcacctgcgccggcgacagcctggactgcggcggcagaggcctggccgccctgcccggcgacctgcccagctggaccagaagcctgaacctgagctacaacaagctgagcgagatcgaccccgccggcttcgaggacctgcccaacctgcaggaggtgtacctgaacaacaacgagctgaccgccgtgcccagcctgggcgccgccagcagccacgtggtgagcctgttcctgcagcacaacaagatcagaagcgtggagggcagccagctgaaggcctacctgagcctggaggtgctggacctgagcctgaacaacatcaccgaggtgagaaacacctgcttcccccacggcccccccatcaaggagctgaacctggccggcaacagaatcggcaccctggagctgggcgccttcgacggcctgagcagaagcctgctgaccctgagactgagcaagaacagaatcacccagctgcccgtgagagccttcaagctgcccagactgacccagctggacctgaacagaaacagaatcagactgatcgagggcctgaccttccagggcctgaacagcctggaggtgctgaagctgcagagaaacaacatcagcaagctgaccgacggcgccttctggggcctgagcaagatgcacgtgctgcacctggagtacaacagcctggtggaggtgaacagcggcagcctgtacggcctgaccgccctgcaccagctgcacctgagcaacaacagcatcgccagaatccacagaaagggctggagcttctgccagaagctgcacgagctggtgctgagcttcaacaacctgaccagactggacgaggagagcctggccgagctgagcagcctgagcgtgctgagactgagccacaacagcatcagccacatcgccgagggcgccttcaagggcctgagaagcctgagagtgctggacctggaccacaacgagatcagcggcaccatcgaggacaccagcggcgccttcagcggcctggacagcctgagcaagctgaccctgttcggcaacaagatcaagagcgtggccaagagagccttcagcggcctggagggcctggagcacctgaacctgggcggcaacgccatcagaagcgtgcagttcgacgccttcgtgaagatgaagaacctgaaggagctgcacatcagcagcgacagcttcctgtgcgactgccagctgaagtggctgcccccctggctgatcggcagaatgctgcaggccttcgtgaccgccacctgcgcccaccccgagagcctgaagggccagagcatcttcagcgtgccccccgagagcttcgtgtgcgacgacttcctgaagccccagatcatcacccagcccgagaccaccatggccatggtgggcaaggacatcagattcacctgcagcgccgccagcagcagcagcagccccatgaccttcgcctggaagaaggacaacgaggtgctgaccaacgccgacatggagaacttcgtgcacgtgcacgcccaggacggcgaggtgatggagtacaccaccatcctgcacctgagacaggtgaccttcggccacgagggcagataccagtgcgtgatcaccaaccacttcggcagcacctacagccacaaggccagactgaccgtgaacgtgctgcccagcttcaccaagaccccccacgacatcaccatcagaaccaccaccatggccagactggagtgcgccgccaccggccaccccaacccccagatcgcctggcagaaggacggcggcaccgacttccccgccgccagagagagaagaatgcacgtgatgcccgacgacgacgtgttcttcatcaccgacgtgaagatcgacgacgccggcgtgtacagctgcaccgcccagaacagcgccggcagcatcagcgccaacgccaccctgaccgtgctggagacccccagcctggtggtgcccctggaggacagagtggtgagcgtgggcgagaccgtggccctgcagtgcaaggccaccggcaaccccccccccagaatcacctggttcaagggcgacagacccctgagcctgaccgagagacaccacctgacccccgacaaccagctgctggtggtgcagaacgtggtggccgaggacgccggcagatacacctgcgagatgagcaacaccctgggcaccgagagagcccacagccagctgagcgtgctgcccgccgccggctgcagaaaggacggcaccaccgtgggcatcttcaccatcgccgtggtgagcagcatcgtgctgaccagcctggtgtgggtgtgcatcatctaccagaccagaaagaagagcgaggagtacagcgtgaccaacaccgacgagaccgtggtgccccccgacgtgcccagctacctgagcagccagggcaccctgagcgacagacaggagaccgtggtgagaaccgagggcggcccccaggccaacggccacatcgagagcaacggcgtgtgccccagagacgccagccacttccccgagcccgacacccacagcgtggcctgcagacagcccaagctgtgcgccggcagcgcctaccacaaggagccctggaaggccatggagaaggccgagggcacccccggcccccacaagatggagcacggcggcagagtggtgtgcagcgactgcaacaccgaggtggactgctacagcagaggccaggccttccacccccagcccgtgagcagagacagcgcccagcccagcgcccccaacggccccgagcccggcggcagcgaccaggagcacagcccccaccaccagtgcagcagaaccgccgccggcagctgccccgagtgccagggcagcctgtaccccagcaaccacgacagaatgctgaccgccgtgaagaagaagcccatggccagcctggacggcaagggcgacagcagctggaccctggccagactgtaccaccccgacagcaccgagctgcagcccgccagcagcctgaccagcggcagccccgagagagccgaggcccagtacctgctggtgagcaacggccacctgcccaaggcctgcgacgccagccccgagagcacccccctgaccggccagctgcccggcaagcagagagtgcccctgctgctggcccccaagagctag

SEQ ID NO: 86799 - DNA, 2991 bp, synthetic construct
  misc_feature 1..2991: note = Description of Artificial Sequence: Synthetic coding sequence
  source 1..2991: mol_type = other DNA
aacctgagctacaacaagctgagcgagatcgaccccgccggcttcgaggacctgcccaacctgcaggaggtgtacctgaacaacaacgagctgaccgccgtgcccagcctgggcgccgccagcagccacgtggtgagcctgttcctgcagcacaacaagatcagaagcgtggagggcagccagctgaaggcctacctgagcctggaggtgctggacctgagcctgaacaacatcaccgaggtgagaaacacctgcttcccccacggcccccccatcaaggagctgaacctggccggcaacagaatcggcaccctggagctgggcgccttcgacggcctgagcagaagcctgctgaccctgagactgagcaagaacagaatcacccagctgcccgtgagagccttcaagctgcccagactgacccagctggacctgaacagaaacagaatcagactgatcgagggcctgaccttccagggcctgaacagcctggaggtgctgaagctgcagagaaacaacatcagcaagctgaccgacggcgccttctggggcctgagcaagatgcacgtgctgcacctggagtacaacagcctggtggaggtgaacagcggcagcctgtacggcctgaccgccctgcaccagctgcacctgagcaacaacagcatcgccagaatccacagaaagggctggagcttctgccagaagctgcacgagctggtgctgagcttcaacaacctgaccagactggacgaggagagcctggccgagctgagcagcctgagcgtgctgagactgagccacaacagcatcagccacatcgccgagggcgccttcaagggcctgagaagcctgagagtgctggacctggaccacaacgagatcagcggcaccatcgaggacaccagcggcgccttcagcggcctggacagcctgagcaagctgaacctgggcggcaacgccatcagaagcgtgcagttcgacgccttcgtgaagatgaagaacctgaaggagctgcacatcagcagcgacagcttcctgtgcgactgccagctgaagtggctgcccccctggctgatcggcagaatgctgcaggccttcgtgaccgccacctgcgcccaccccgagagcctgaagggccagagcatcttcagcgtgccccccgagagcttcgtgtgcgacgacttcctgaagccccagatcatcacccagcccgagaccaccatggccatggtgggcaaggacatcagattcacctgcagcgccgccagcagcagcagcagccccatgaccttcgcctggaagaaggacaacgaggtgctgaccaacgccgacatggagaacttcgtgcacgtgcacgcccaggacggcgaggtgatggagtacaccaccatcctgcacctgagacaggtgaccttcggccacgagggcagataccagtgcgtgatcaccaaccacttcggcagcacctacagccacaaggccagactgaccgtgaacgtgctgcccagcttcaccaagaccccccacgacatcaccatcagaaccaccaccatggccagactggagtgcgccgccaccggccaccccaacccccagatcgcctggcagaaggacggcggcaccgacttccccgccgccagagagagaagaatgcacgtgatgcccgacgacgacgtgttcttcatcaccgacgtgaagatcgacgacgccggcgtgtacagctgcaccgcccagaacagcgccggcagcatcagcgccaacgccaccctgaccgtgctggagacccccagcctggtggtgcccctggaggacagagtggtgagcgtgggcgagaccgtggccctgcagtgcaaggccaccggcaaccccccccccagaatcacctggttcaagggcgacagacccctgagcctgaccgagagacaccacctgacccccgacaaccagctgctggtggtgcagaacgtggtggccgaggacgccggcagatacacctgcgagatgagcaacaccctgggcaccgagagagcccacagccagctgagcgtgctgcccgccgccggctgcagaaaggacggcaccaccgtgggcatcttcaccatcgccgtggtgagcagcatcgtgctgaccagcctggtgtgggtgtgcatcatctaccagaccagaaagaagagcgaggagtacagcgtgaccaacaccgacgagaccgtggtgccccccgacgtgcccagctacctgagcagccagggcaccctgagcgacagacaggagaccgtggtgagaaccgagggcggcccccaggccaacggccacatcgagagcaacggcgtgtgccccagagacgccagccacttccccgagcccgacacccacagcgtggcctgcagacagcccaagctgtgcgccggcagcgcctaccacaaggagccctggaaggccatggagaaggccgagggcacccccggcccccacaagatggagcacggcggcagagtggtgtgcagcgactgcaacaccgaggtggactgctacagcagaggccaggccttccacccccagcccgtgagcagagacagcgcccagcccagcgcccccaacggccccgagcccggcggcagcgaccaggagcacagcccccaccaccagtgcagcagaaccgccgccggcagctgccccgagtgccagggcagcctgtaccccagcaaccacgacagaatgctgaccgccgtgaagaagaagcccatggccagcctggacggcaagggcgacagcagctggaccctggccagactgtaccaccccgacagcaccgagctgcagcccgccagcagcctgaccagcggcagccccgagagagccgaggcccagtacctgctggtgagcaacggccacctgcccaaggcctgcgacgccagccccgagagcacccccctgaccggccagctgcccggcaagcagagagtgcccctgctgctggcccccaagagctag

SEQ ID NO: 86800 - DNA, 3213 bp, synthetic construct
  misc_feature 1..3213: note = Description of Artificial Sequence: Synthetic coding sequence
  source 1..3213: mol_type = other DNA
atggccagacccgtgagaggcggcctgggcgcccccagaagaagcccctgcctgctgctgctgtggctgctgctgctgagactggagcccgtgaccgccgccgccggccccagagccccctgcgccgccgcctgcacctgcgccggcgacagcctggactgcggcggcagaggcctggccgccctgcccggcgacctgcccagctggaccagaagcctgaacctgagctacaacaagctgagcgagatcgaccccgccggcttcgaggacctgcccaacctgcaggaggtgtacctgaacaacaacgagctgaccgccgtgcccagcctgggcgccgccagcagccacgtggtgagcctgttcctgcagcacaacaagatcagaagcgtggagggcagccagctgaaggcctacctgagcctggaggtgctggacctgagcctgaacaacatcaccgaggtgagaaacacctgcttcccccacggcccccccatcaaggagctgaacctggccggcaacagaatcggcaccctggagctgggcgccttcgacggcctgagcagaagcctgctgaccctgagactgagcaagaacagaatcacccagctgcccgtgagagccttcaagctgcccagactgacccagctggacctgaacagaaacagaatcagactgatcgagggcctgaccttccagggcctgaacagcctggaggtgctgaagctgcagagaaacaacatcagcaagctgaccgacggcgccttctggggcctgagcaagatgcacgtgctgcacctggagtacaacagcctggtggaggtgaacagcggcagcctgtacggcctgaccgccctgcaccagctgcacctgagcaacaacagcatcgccagaatccacagaaagggctggagcttctgccagaagctgcacgagctggtgctgagcttcaacaacctgaccagactggacgaggagagcctggccgagctgagcagcctgagcgtgctgagactgagccacaacagcatcagccacatcgccgagggcgccttcaagggcctgagaagcctgagagtgctggacctggaccacaacgagatcagcggcaccatcgaggacaccagcggcgccttcagcggcctggacagcctgagcaagctgctgctgctggagcccagccagagcgccggctgcagcagccccagccagccccacatgagcgccggcggcagaaccctgttcggcaacaagatcaagagcgtggccaagagagccttcagcggcctggagggcctggagcacctgaacctgggcggcaacgccatcagaagcgtgcagttcgacgccttcgtgaagatgaagaacctgaaggagctgcacatcagcagcgacagcttcctgtgcgactgccagctgaagtggctgcccccctggctgatcggcagaatgctgcaggccttcgtgaccgccacctgcgcccaccccgagagcctgaagggccagagcatcttcagcgtgccccccgagagcttcgtgtgcgacgacttcctgaagccccagatcatcacccagcccgagaccaccatggccatggtgggcaaggacatcagattcacctgcagcgccgccagcagcagcagcagccccatgaccttcgcctggaagaaggacaacgaggtgctgaccaacgccgacatggagaacttcgtgcacgtgcacgcccaggacggcgaggtgatggagtacaccaccatcctgcacctgagacaggtgaccttcggccacgagggcagataccagtgcgtgatcaccaaccacttcggcagcacctacagccacaaggccagactgaccgtgaacgtgctgcccagcttcaccaagaccccccacgacatcaccatcagaaccaccaccatggccagactggagtgcgccgccaccggccaccccaacccccagatcgcctggcagaaggacggcggcaccgacttccccgccgcccagacccccagcctggtggtgcccctggaggacagagtggtgagcgtgggcgagaccgtggccctgcagtgcaaggccaccggcaaccccccccccagaatcacctggttcaagggcgacagacccctgagcctgaccgagagacaccacctgacccccgacaaccagctgctggtggtgcagaacgtggtggccgaggacgccggcagatacacctgcgagatgagcaacaccctgggcaccgagagagcccacagccagctgagcgtgctgcccgccgccggctgcagaaaggacggcaccaccgtgggcatcttcaccatcgccgtggtgagcagcatcgtgctgaccagcctggtgtgggtgtgcatcatctaccagaccagaaagaagagcgaggagtacagcgtgaccaacaccgacgagaccgtggtgccccccgacgtgcccagctacctgagcagccagggcaccctgagcgacagacaggagaccgtggtgagaaccgagggcggcccccaggccaacggccacatcgagagcaacggcgtgtgccccagagacgccagccacttccccgagcccgacacccacagcgtggcctgcagacagcccaagctgtgcgccggcagcgcctaccacaaggagccctggaaggccatggagaaggccgagggcacccccggcccccacaagatggagcacggcggcagagtggtgtgcagcgactgcaacaccgaggtggactgctacagcagaggccaggccttccacccccagcccgtgagcagagacagcgcccagcccagcgcccccaacggccccgagcccggcggcagcgaccaggagcacagcccccaccaccagtgcagcagaaccgccgccggcagctgccccgagtgccagggcagcctgtaccccagcaaccacgacagaatgctgaccgccgtgaagaagaagcccatggccagcctggacggcaagggcgacagcagctggaccctggccagactgtaccaccccgacagcaccgagctgcagcccgccagcagcctgaccagcggcagccccgagagagccgaggcccagtacctgctggtgagcaacggccacctgcccaaggcctgcgacgccagccccgagagcacccccctgaccggccagctgcccggcaagcagagagtgcccctgctgctggcccccaagagctag

SEQ ID NO: 86801 - DNA, 3198 bp, synthetic construct
  misc_feature 1..3198: note = Description of Artificial Sequence: Synthetic coding sequence
  source 1..3198: mol_type = other DNA
atggcccccgcccccctgggcgtgcccgaggagcagctgctgggctgcagaagcagagtgctgagcagactgctgttcatcgcccagaccgccctgctgctgctgcccgccgccggcgccggcctgtgccccgccccctgcagctgcagaatccccctgctggactgcagcagaagaaagctgcccgcccccagctggagagccctgagcggcctgctgccccccgacaccgccatcctggacttcagccacaacagactgagcaactggaacatcagcctggagagccagaccctgcaggaggtgaagatgaactacaacgagctgaccgagatcccctacttcggcgagcccaccagcaacatcaccctgctgagcctggtgcacaacatcatccccgagatcaacgcccaggccctgcagttctaccccgccctggagagcctggacctgagcagcaacatcatcagcgagatcaagaccagcagcttccccagaatgcagctgaagtacctgaacctgagcaacaacagaatcaccaccctggaggccggctgcttcgacaacctgagcagcagcctgctggtggtgaagctgaacagaaacagaatgagcatgatcccccccaagatcttcaagctgccccacctgcagttcctggagctgaagagaaacagaatcaagatcgtggagggcctgaccttccagggcctggacagcctgagaagcctgaagatgcagagaaacggcatcagcaagctgaaggacggcgccttcttcggcctgaacaacatggaggagctggagctggagcacaacaacctgaccagagtgaacaagggctggctgtacggcctgagaatgctgcagcagctgtacgtgagccagaacgccatcgagagaatcagccccgacgcctgggagttctgccagagactgagcgagctggacctgagctacaaccagctgaccagactggacgagagcgccttcgtgggcctgagcctgctggagagactgaacctgggcgacaacagagtgacccacatcgccgacggcgtgttcagattcctgagcaacctgcagaccctggacctgagaaacaacgagatcagctgggccatcgaggacgccagcgaggccttcgccggcctgaccagcctgaccaagctgatcctgcagggcaaccagatcaagagcatcaccaagaaggccttcatcggcctggagagcctggagcacctggacctgaacaacaacgccatcatgagcatccaggagaacgccttcagccagacccacctgaaggagctgatcctgaacaccagcagcctgctgtgcgactgccacctgaagtggctgctgcagtggctggtggacaacaacttccagcacagcgtgaacgtgagctgcgcccaccccgagtggctggccggccagagcatcctgaacgtggacctgaaggacttcgtgtgcgacgacttcctgaagccccagatcagaacccaccccgagaccatcatcgccctgagaggcatgaacgtgaccctgacctgcaccgccgtgagcagcagcgacagccccatgagcaccgtgtggagaaaggacagcgagatcctgtacgacgtggacaccgagaacttcgtgagatactggcagcaggccggcgaggccctggagtacaccagcatcctgcacctgttcaacgtgaacttcaccgacgagggcaagtaccagtgcatcgtgaccaaccacttcggcagcaactacagccagaaggccaagctgaccgtgaacgagatgcccagcttcctgaagacccccatggacctgaccatcagaaccggcgccatggccagactggagtgcgccgccgagggccaccccgccccccagatcagctggcagaaggacggcggcaccgacttccccgccgccagagagagaagaatgcacgtgatgcccgaggacgacgtgttcttcatcgccaacgtgaagatcgaggacatgggcatctacagctgcatggcccagaacaccgccggcggcctgagcgccaacgccagcctgaccgtgctggagacccccagcttcatcagacccctggaggacaagaccgtgaccagaggcgagaccgccgtgctgcagtgcatcgccggcggcagccccgcccccagactgaactggaccaaggacgacggccccctgctggtgaccgagagacacttcttcgccgccgccaaccagctgctgatcatcgtggacgccggcctggaggacgccggcaagtacacctgcatcatgagcaacaccctgggcaccgagagaggccacatctacctgaacgtgatcagcagccccaactgcgacagcagccagagcagcatcggccacgaggacgacggctggaccaccgtgggcatcgtgatcatcgtggtggtgtgctgcgtggtgggcaccagcctgatctgggtgatcgtgatctaccacatgagaagaaagaacgaggactacagcatcaccaacaccgaggagctgaacctgcccgccgacatccccagctacctgagcagccagggcaccctgagcgagccccaggagggctacagcaacagcgaggccggcagccaccagcagctgatgccccccgccaacggctacatccacaagggcaccgacggcggcaccggcaccagagtgatctgcagcgactgctacgacaacgccaacatctacagcagaaccagagagtactgcccctacacctacatcgccgaggaggacgtgctggaccagaccctgagcagcctgatggtgcagatgcccaaggagacctacctggtgcaccccccccaggacaccaccgccctggagagcctgatccccagcgccaacagagagcccagcgccttccccaccaaccacgagagaatcagcgagaagaagctgcccagcacccagatgagcggcgagaccctgcagagacccgtgtggaacatcaacagagagctgggcctgccccacccccccttcagccagcagcccgtgcacgagagcccccagctgcaccagaacgagggcctggccggcagagagcccgactgcagcgccagcagcatgagctgccacagactgcaggaccacgccttcgacttcagcagaaccagaaacatccaggacggcagcgagggcacctag

SEQ ID NO: 86802 - DNA, 876 bp, synthetic construct
  misc_feature 1..876: note = Description of Artificial Sequence: Synthetic coding sequence
  source 1..876: mol_type = other DNA
atggagagcgagagaagcaagagaatgggcaacgcctgcatccccctgaagagaatcgcctacttcctgtgcctgctgagcgccctgctgctgaccgagggcaagaagcccgccaagcccaagtgccccgccgtgtgcacctgcaccaaggacaacgccctgtgcgagaacgccagaagcatccccagaaccgtgccccccgacgtgatcagcctgagcttcgtgagaagcggcttcaccgagatcagcgagggcagcttcctgttcacccccagcctgcagctgctgctgttcaccagcaacagcttcgacgtgatcagcgacgacgccttcatcggcctgccccacctggagtacctgttcatcgagaacaacaacatcaagagcatcagcagacacaccttcagaggcctgaagagcctgatccacctgagcctggccaacaacaacctgcagaccctgcccaaggacatcttcaagggcctggacagcctgaccaacgtggacctgagaggcaacagcttcaactgcgactgcaagctgaagtggctggtggagtggctgggccacaccaacgccaccgtggaggacatctactgcgagggcccccccgagtacaagaagagaaagatcaacagcctgagcagcaaggacttcgactgcatcatcaccgagttcgccaagagccaggacctgccctaccagagcctgagcatcgacaccttcagctacctgaacgacgagtacgtggtgatcgcccagcccttcaccggcaagtgcatcttcctggagtgggaccacgtggagaagaccttcagaaactacgacaacatcaccgtgctgagagagatccacagattcaccaacatgagctag

SEQ ID NO: 86803 - DNA, 1674 bp, synthetic construct
  misc_feature 1..1674: note = Description of Artificial Sequence: Synthetic coding sequence
  source 1..1674: mol_type = other DNA
atggagagcgagagaagcaagagaatgggcaacgcctgcatccccctgaagagaatcgcctacttcctgtgcctgctgagcgccctgctgctgaccgagggcaagaagcccgccaagcccaagtgccccgccgtgtgcacctgcaccaaggacaacgccctgtgcgagaacgccagaagcatccccagaaccgtgccccccgacgtgatcagcctgagcttcgtgagaagcggcttcaccgagatcagcgagggcagcttcctgttcacccccagcctgcagctgctgctgttcaccagcaacagcttcgacgtgatcagcgacgacgccttcatcggcctgccccacctggagtacctgttcatcgagaacaacaacatcaagagcatcagcagacacaccttcagaggcctgaagagcctgatccacctgagcctggccaacaacaacctgcagaccctgcccaaggacatcttcaagggcctggacagcctgaccaacgtggacctgagaggcaacagcttcaactgcgactgcaagctgaagtggctggtggagtggctgggccacaccaacgccaccgtggaggacatctactgcgagggcccccccgagtacaagaagagaaagatcaacagcctgagcagcaaggacttcgactgcatcatcaccgagttcgccaagagccaggacctgccctaccagagcctgagcatcgacaccttcagctacctgaacgacgagtacgtggtgatcgcccagcccttcaccggcaagtgcatcttcctggagtgggaccacgtggagaagaccttcagaaactacgacaacatcaccggcaccagcaccgtggtgtgcaagcccatcgtgatcgagacccagctgtacgtgatcgtggcccagctgttcggcggcagccacatctacaagagagacagcttcgccaacaagttcatcaagatccaggacatcgagatcctgaagatcagaaagcccaacgacatcgagaccttcaagatcgagaacaactggtacttcgtggtggccgacagcagcaaggccggcttcaccaccatctacaagtggaacggcaacggcttctacagccaccagagcctgcacgcctggtacagagacaccgacgtggagtacctggagatcgtgagaaccccccagaccctgagaaccccccacctgatcctgagcagcagcagccagagacccgtgatctaccagtggaacaaggccacccagctgttcaccaaccagaccgacatccccaacatggaggacgtgtacgccgtgaagcacttcagcgtgaagggcgacgtgtacatctgcctgaccagattcatcggcgacagcaaggtgatgaagtggggcggcagcagcttccaggacatccagagaatgcccagcagaggcagcatggtgttccagcccctgcagatcaacaactaccagtacgccatcctgggcagcgactacagcttcacccaggtgtacaactgggacgccgagaaggccaagttcgtgaagttccaggagctgaacgtgcaggcccccagaagcttcacccacgtgagcatcaacaagagaaacttcctgttcgccagcagcttcaagggcaacacccagatctacaagcacgtgatcgtggacctgagcgcctag

SEQ ID NO: 86804 - DNA, 1530 bp, synthetic construct
  misc_feature 1..1530: note = Description of Artificial Sequence: Synthetic coding sequence
  source 1..1530: mol_type = other DNA
atggagagcgagagaagcaagagaatgggcaacgcctgcatccccctgaagagaatcgcctacttcctgtgcctgctgagcgccctgctgctgaccgagggcaagaagcccgccaagcccaagtgccccgccgtgtgcacctgcaccaaggacaacgccctgtgcgagaacgccagaagcatccccagaaccgtgccccccgacgtgatcagcctgagcttcgtgagaagcggcttcaccgagatcagcgagggcagcttcctgttcacccccagcctgcagctgctgagcctggccaacaacaacctgcagaccctgcccaaggacatcttcaagggcctggacagcctgaccaacgtggacctgagaggcaacagcttcaactgcgactgcaagctgaagtggctggtggagtggctgggccacaccaacgccaccgtggaggacatctactgcgagggcccccccgagtacaagaagagaaagatcaacagcctgagcagcaaggacttcgactgcatcatcaccgagttcgccaagagccaggacctgccctaccagagcctgagcatcgacaccttcagctacctgaacgacgagtacgtggtgatcgcccagcccttcaccggcaagtgcatcttcctggagtgggaccacgtggagaagaccttcagaaactacgacaacatcaccggcaccagcaccgtggtgtgcaagcccatcgtgatcgagacccagctgtacgtgatcgtggcccagctgttcggcggcagccacatctacaagagagacagcttcgccaacaagttcatcaagatccaggacatcgagatcctgaagatcagaaagcccaacgacatcgagaccttcaagatcgagaacaactggtacttcgtggtggccgacagcagcaaggccggcttcaccaccatctacaagtggaacggcaacggcttctacagccaccagagcctgcacgcctggtacagagacaccgacgtggagtacctggagatcgtgagaaccccccagaccctgagaaccccccacctgatcctgagcagcagcagccagagacccgtgatctaccagtggaacaaggccacccagctgttcaccaaccagaccgacatccccaacatggaggacgtgtacgccgtgaagcacttcagcgtgaagggcgacgtgtacatctgcctgaccagattcatcggcgacagcaaggtgatgaagtggggcggcagcagcttccaggacatccagagaatgcccagcagaggcagcatggtgttccagcccctgcagatcaacaactaccagtacgccatcctgggcagcgactacagcttcacccaggtgtacaactgggacgccgagaaggccaagttcgtgaagttccaggagctgaacgtgcaggcccccagaagcttcacccacgtgagcatcaacaagagaaacttcctgttcgccagcagcttcaagggcaacacccagatctacaagcacgtgatcgtggacctgagcgcctag

SEQ ID NO: 86805 - DNA, 777 bp, synthetic construct
  misc_feature 1..777: note = Description of Artificial Sequence: Synthetic coding sequence
  source 1..777: mol_type = other DNA
atgagcgcctaccccaagagctacaaccccttcgacgacgacggcgaggacgagggcgccagacccgccccctggagagacgccagagacctgcccgacggccccgacgcccccgccgacagacagcagtacctgagacaggaggtgctgagaagagccgaggccaccgccgccagcaccagcagaagcctggccctgatgtacgagagcgagaaggtgggcgtggccagcagcgaggagctggccagacagagaggcgtgctggagagaaccgagaagatggtggacaagatggaccaggacctgaagatcagccagaagcacatcaacagcatcaagagcgtgttcggcggcctggtgaactacttcaagagcaagcccgtggagaccccccccgagcagaacggcaccctgaccagccagcccaacaacagactgaaggaggccatcagcaccagcaaggagcaggaggccaagtaccaggccagccaccccaacctgagaaagctggacgacaccgaccccgtgcccagaggcgccggcagcgccatgagcaccgacgcctaccccaagaacccccacctgagagcctaccaccagaagatcgacagcaacctggacgagctgagcatgggcctgggcagactgaaggacatcgccctgggcatgcagaccgagatcgaggagcaggacgacatcctggacagactgaccaccaaggtggacaagctggacgtgaacatcaagagcaccgagagaaaggtgagacagctgtag

SEQ ID NO: 86806 - DNA, 2466 bp, synthetic construct
  misc_feature 1..2466: note = Description of Artificial Sequence: Synthetic coding sequence
  source 1..2466: mol_type = other DNA
atggccggccccggcagcaccggcggccagatcggcgccgccgccctggccggcggcgccagaagcaaggtggcccccagcgtggacttcgaccacagctgcagcgacagcgtggagtacctgaccctgaacttcggccccttcgagaccgtgcacagatggagaagactgcccccctgcgacgagttcgtgggcgccagaagaagcaagcacaccgtggtggcctacaaggacgccatctacgtgttcggcggcgacaacggcgccttcaccaccggcaccccccccgcccccagataccaccacagcgccgtggtgtacggcagcagcatgttcgtgttcggcggctacaccggcgacatctacagcaacagcaacctgaagaacaagaacgacctgttcgagtacaagttcgccaccggccagtggaccgagtggaagatcgagggcagactgcccgtggccagaagcgcccacggcgccaccgtgtacagcgacaagctgtggatcttcgccggctacgacggcaacgccagactgaacgacatgtggaccatcggcctgcaggacagagagctgacctgctgggaggaggtggcccagagcggcgagatcccccccagctgctgcaacttccccgtggccgtgtgcagagacaagatgttcgtgttcagcggccagagcggcgccaagatcaccaacaacctgttccagttcgagttcaaggacaagacctggaccagaatccccaccgagcacctgctgagaggcagccccccccccccccagagaagatacggccacaccatggtggccttcgacagacacctgtacgtgttcggcggcgccgccgacaacaccctgcccaacgagctgcactgctacgacgtggacttccagacctgggaggtggtgcagcccagcagcgacagcgaggtgggcggcgccgaggtgcccgagagagcctgcgccagcgaggaggtgcccaccctgacctacgaggagagagtgggcttcaagaagagcagagacgtgttcggcctggacttcggcaccaccagcgccaagcagcccacccagcccgccagcgagctgcccagcggcagactgttccacgccgccgccgtgatcagcgacgccatgtacatcttcggcggcaccgtggacaacaacatcagaagcggcgagatgtacagattccagttcagctgctaccccaagtgcaccctgcacgaggactacggcagactgtgggagagcagacagttctgcgacgtggagttcgtgctgggcgagaaggaggagtgcgtgcagggccacgtggccatcgtgaccgccagaagcagatggctgagaagaaagatcacccaggccagagagagactggcccagaagctggagcaggaggccgcccccgtgcccagagaggcccccggcgtggccgccggcggcgccagaccccccctgctgcacgtggccatcagagaggccgaggccagacccttcgaggtgctgatgcagttcctgtacaccgacaagatcaagtaccccagaaagggccacgtggaggacgtgctgctgatcatggacgtgtacaagctggccctgagcttccagctgtgcagactggagcagctgtgcagacagtacatcgaggccagcgtggacctgcagaacgtgctggtggtgtgcgagagcgccgccagactgcagctgagccagctgaaggagcactgcctgaacttcgtggtgaaggagagccacttcaaccaggtgatcatgatgaaggagttcgagagactgagcagccccctgatcgtggagatcgtgagaagaaagcagcagcccccccccagaacccccctggaccagcccgtggacatcggcaccagcctgatccaggacatgaaggcctacctggagggcgccggcgccgagttctgcgacatcaccctgctgctggacggccaccccagacccgcccacaaggccatcctggccgccagaagcagctacttcgaggccatgttcagaagcttcatgcccgaggacggccaggtgaacatcagcatcggcgagatggtgcccagcagacaggccttcgagagcatgctgagatacatctactacggcgaggtgaacatgccccccgaggacagcctgtacctgttcgccgccccctactactacggcttctacaacaacagactgcaggcctactgcaagcagaacctggagatgaacgtgaccgtgcagaacgtgctgcagatcctggaggccgccgacaagacccaggccctggacatgaagagacactgcctgcacatcatcgtgcaccagttcaccaaggtgagcaagctgcccaccctgagaagcctgagccagcagctgctgctggacatcatcgacagcctggccagccacatcagcgacaagcagtgcgccgagctgggcgccgacatctag

SEQ ID NO: 86807 - DNA, 2400 bp, synthetic construct
  misc_feature 1..2400: note = Description of Artificial Sequence: Synthetic coding sequence
  source 1..2400: mol_type = other DNA
atgaactacgaccccatcgtgagcaaggtggccgaggtgctggccagcggcagagccatcagaaagagagaggtggagagaagcaagcacaccgtggtggcctacaaggacgccatctacgtgttcggcggcgacaacggcaagaccatgctgaacgacctgctgagattcgacgtgaaggactgcagctggtgcagagccttcaccaccggcaccccccccgcccccagataccaccacagcgccgtggtgtacggcagcagcatgttcgtgttcggcggctacaccggcgacatctacagcaacagcaacctgaagaacaagaacgacctgttcgagtacaagttcgccaccggccagtggaccgagtggaagatcgagggcagactgcccgtggccagaagcgcccacggcgccaccgtgtacagcgacaagctgtggatcttcgccggctacgacggcaacgccagactgaacgacatgtggaccatcggcctgcaggacagagagctgacctgctgggaggaggtggcccagagcggcgagatcccccccagctgctgcaacttccccgtggccgtgtgcagagacaagatgttcgtgttcagcggccagagcggcgccaagatcaccaacaacctgttccagttcgagttcaaggacaagacctggaccagaatccccaccgagcacctgctgagaggcagccccccccccccccagagaagatacggccacaccatggtggccttcgacagacacctgtacgtgttcggcggcgccgccgacaacaccctgcccaacgagctgcactgctacgacgtggacttccagacctgggaggtggtgcagcccagcagcgacagcgaggtgggcggcgccgaggtgcccgagagagcctgcgccagcgaggaggtgcccaccctgacctacgaggagagagtgggcttcaagaagagcagagacgtgttcggcctggacttcggcaccaccagcgccaagcagcccacccagcccgccagcgagctgcccagcggcagactgttccacgccgccgccgtgatcagcgacgccatgtacatcttcggcggcaccgtggacaacaacatcagaagcggcgagatgtacagattccagttcagctgctaccccaagtgcaccctgcacgaggactacggcagactgtgggagagcagacagttctgcgacgtggagttcgtgctgggcgagaaggaggagtgcgtgcagggccacgtggccatcgtgaccgccagaagcagatggctgagaagaaagatcacccaggccagagagagactggcccagaagctggagcaggaggccgcccccgtgcccagagaggcccccggcgtggccgccggcggcgccagaccccccctgctgcacgtggccatcagagaggccgaggccagacccttcgaggtgctgatgcagttcctgtacaccgacaagatcaagtaccccagaaagggccacgtggaggacgtgctgctgatcatggacgtgtacaagctggccctgagcttccagctgtgcagactggagcagctgtgcagacagtacatcgaggccagcgtggacctgcagaacgtgctggtggtgtgcgagagcgccgccagactgcagctgagccagctgaaggagcactgcctgaacttcgtggtgaaggagagccacttcaaccaggtgatcatgatgaaggagttcgagagactgagcagccccctgatcgtggagatcgtgagaagaaagcagcagcccccccccagaacccccctggaccagcccgtggacatcggcaccagcctgatccaggacatgaaggcctacctggagggcgccggcgccgagttctgcgacatcaccctgctgctggacggccaccccagacccgcccacaaggccatcctggccgccagaagcagctacttcgaggccatgttcagaagcttcatgcccgaggacggccaggtgaacatcagcatcggcgagatggtgcccagcagacaggccttcgagagcatgctgagatacatctactacggcgaggtgaacatgccccccgaggacagcctgtacctgttcgccgccccctactactacggcttctacaacaacagactgcaggcctactgcaagcagaacctggagatgaacgtgaccgtgcagaacgtgctgcagatcctggaggccgccgacaagacccaggccctggacatgaagagacactgcctgcacatcatcgtgcaccagttcaccaaggtgagcaagctgcccaccctgagaagcctgagccagcagctgctgctggacatcatcgacagcctggccagccacatcagcgacaagcagtgcgccgagctgggcgccgacatctag

SEQ ID NO: 86808 - DNA, 1560 bp, synthetic construct; identical to SEQ ID NO: 85808
  misc_feature 1..1560: note = Description of Artificial Sequence: Synthetic coding sequence
  source 1..1560: mol_type = other DNA

SEQ ID NO: 86809 - DNA, 3036 bp, synthetic construct
  misc_feature 1..3036: note = Description of Artificial Sequence: Synthetic coding sequence
  source 1..3036: mol_type = other DNA
atgatcgagaacagcatgttcgaggaggagcccgacgtggtggacctggccaaggagccctgcctgcaccccctggagcccgacgaggtggagtacgagcccagaggcagcagactgctggtgagaggcctgggcgagcacgagatggaggaggacgaggaggactacgagagcagcgccaagctgctgggcatgagcttcatgaacagaagcagcggcctgagaaacagcgccaccggctacagacagagccccgacggcgcctgcagcgtgcccagcgccagaaccatggtggtgtgcgccttcgtgatcgtggtggccgtgagcgtgatcatggtgatctacctgctgcccagatgcaccttcaccaaggagggctgccacaagaagaaccagagcatcggcctgatccagcccttcgccaccaacggcaagctgttcccctgggcccagatcagactgcccaccgccgtggtgcccctgagatacgagctgagcctgcaccccaacctgaccagcatgaccttcagaggcagcgtgaccatcagcgtgcaggccctgcaggtgacctggaacatcatcctgcacagcaccggccacaacatcagcagagtgaccttcatgagcgccgtgagcagccaggagaagcaggccgagatcctggagtacgcctaccacggccagatcgccatcgtggcccccgaggccctgctggccggccacaactacaccctgaagatcgagtacagcgccaacatcagcagcagctactacggcttctacggcttcagctacaccgacgagagcaacgagaagaagtacttcgccgccacccagttcgagcccctggccgccagaagcgccttcccctgcttcgacgagcccgccttcaaggccaccttcatcatcaagatcatcagagacgagcagtacaccgccctgagcaacatgcccaagaagagcagcgtggtgctggacgacggcctggtgcaggacgagttcagcgagagcgtgaagatgagcacctacctggtggccttcatcgtgggcgagatgaagaacctgagccaggacgtgaacggcaccctggtgagcatctacgccgtgcccgagaagatcggccaggtgcactacgccctggagaccaccgtgaagctgctggagttcttccagaactacttcgagatccagtaccccctgaagaagctggacctggtggccatccccgacttcgaggccggcgccatggagaactggggcctgctgaccttcagagaggagaccctgctgtacgacagcaacaccagcagcatggccgacagaaagctggtgaccaagatcatcgcccacgagctggcccaccagtggttcggcaacctggtgaccatgaagtggtggaacgacctgtggctgaacgagggcttcgccaccttcatggagtacttcagcctggagaagatcttcaaggagctgagcagctacgaggacttcctggacgccagattcaagaccatgaagaaggacagcctgaacagcagccaccccatcagcagcagcgtgcagagcagcgagcagatcgaggagatgttcgacagcctgagctacttcaagggcagcagcctgctgctgatgctgaagacctacctgagcgaggacgtgttccagcacgccgtggtgctgtacctgcacaaccacagctacgccagcatccagagcgacgacctgtgggacagcttcaacgaggtgaccaaccagaccctggacgtgaagagaatgatgaagacctggaccctgcagaagggcttccccctggtgaccgtgcagaagaagggcaaggagctgttcatccagcaggagagattcttcctgaacatgaagcccgagatccagcccagcgacaccagctacctgtggcacatccccctgagctacgtgaccgagggcagaaactacagcaagtaccagagcgtgagcctgctggacaagaagagcggcgtgatcaacctgaccgaggaggtgctgtgggtgaaggtgaacatcaacatgaacggctactacatcgtgcactacgccgacgacgactgggaggccctgatccaccagctgaagatcaacccctacgtgctgagcgacaaggacagagccaacctgatcaacaacatcttcgagctggccggcctgggcaaggtgcccctgaagagagccttcgacctgatcaactacctgggcaacgagaaccacaccgcccccatcaccgaggccctgttccagaccgacctgatctacaacctgctggagaagctgggctacatggacctggccagcagactggtgaccagagtgttcaagctgctgcagaaccagatccagcagcagacctggaccgacgagggcacccccagcatgagagagctgagaagcgccctgctggagttcgcctgcacccacaacctgggcaactgcagcaccaccgccatgaagctgttcgacgactggatggccagcaacggcacccagagcctgcccaccgacgtgatgaccaccgtgttcaaggtgggcgccaagaccgacaagggctggagcttcctgctgggcaagtacatcagcatcggcagcgaggccgagaagaacaagatcctggaggccctggccagcagcgaggacgtgagaaagctgtactggctgatgaagagcagcctgaacggcgacaacttcagaacccagaagctgagcttcatcatcagaaccgtgggcagacacttccccggccacctgctggcctgggacttcgtgaaggagaactggaacaagctggtgcagaagttccccctgggcagctacaccatccagaacatcgtggccggcagcacctacctgttcagcaccaagacccacctgagcgaggtgcaggccttcttcgagaaccagagcgaggccaccttcagactgagatgcgtgcaggaggccctggaggtgatccagctgaacatccagtggatggagaagaacctgaagagcctgacctggtggctgtag

SEQ ID NO: 86810 - DNA, 3450 bp, synthetic construct
  misc_feature 1..3450: note = Description of Artificial Sequence: Synthetic coding sequence
  source 1..3450: mol_type = other DNA
atggccgagagaaagggcaccgccaaggtggacttcctgaagaagatcgagaaggagatccagcagaagtgggacaccgagagagtgttcgaggtgaacgccagcaacctggagaagcagaccagcaagggcaagtacttcgtgaccttcccctacccctacatgaacggcagactgcacctgggccacaccttcagcctgagcaagtgcgaggcctgcgccgacaagctgaagagagagatcgagctgtacggctgcccccccgacttccccgacgaggaggaggaggaggaggagaccagcgtgaagaccgaggacatcatcatcaaggacaaggccaagggcaagaagagcaaggccgccgccaaggccggcagcagcaagtaccagtggggcatcatgaagagcctgggcctgagcgacgaggagatcgtgaagttcagcgaggccgagcactggctggactacttcccccccctggccatccaggacctgaagagaatgggcctgaaggtggactggagaagaagcttcatcaccaccgacgtgaacccctactacgacagcttcgtgagatggcagttcctgaccctgagagagagaaacaagatcaagttcggcaagagatacaccatctacagccccaaggacggccagccctgcatggaccacgacagacagaccggcgagggcgtgggcccccaggagtacaccctgctgaagctgaaggtgctggagccctaccccagcaagctgagcggcctgaagggcaagaacatcttcctggtggccgccaccctgagacccgagaccatgttcggccagaccaactgctgggtgagacccgacatgaagtacatcggcttcgagaccgtgaacggcgacatcttcatctgcacccagaaggccgccagaaacatgagctaccagggcttcaccaaggacaacggcgtggtgcccgtggtgaaggagctgatgggcgaggagatcctgggcgccagcctgagcgcccccctgaccagctacaaggtgatctacgtgctgcccatgctgaccatcaaggaggacaagggcaccggcgtggtgaccagcgtgcccagcgacagccccgacgacatcgccgccctgagagacctgaagaagaagcaggccctgagagccaagtacggcatcagagacgacatggtgctgcccttcgagcccgtgcccgtgatcgagatccccggcttcggcaacctgagcgccgtgaccatctgcgacgagctgaagatccagagccagaacgacagagagaagctggccgaggccaaggagaagatctacctgaagggcttctacgagggcatcatgctggtggacggcttcaagggccagaaggtgcaggacgtgaagaagaccatccagaagaagatgatcgacgccggcgacgccctgatctacatggagcccgagaagcaggtgatgagcagaagcagcgacgagtgcgtggtggccctgtgcgaccagtggtacctggactacggcgaggagaactggaagaagcagaccagccagtgcctgaagaacctggagaccttctgcgaggagaccagaagaaacttcgaggccaccctgggctggctgcaggagcacgcctgcagcagaacctacggcctgggcacccacctgccctgggacgagcagtggctgatcgagagcctgagcgacagcaccatctacatggccttctacaccgtggcccacctgctgcagggcggcaacctgcacggccaggccgagagccccctgggcatcagaccccagcagatgaccaaggaggtgtgggactacgtgttcttcaaggaggcccccttccccaagacccagatcgccaaggagaagctggaccagctgaagcaggagttcgagttctggtaccccgtggacctgagagtgagcggcaaggacctggtgcccaaccacctgagctactacctgtacaaccacgtggccatgtggcccgagcagagcgacaagtggcccaccgccgtgagagccaacggccacctgctgctgaacagcgagaagatgagcaagagcaccggcaacttcctgaccctgacccaggccatcgacaagttcagcgccgacggcatgagactggccctggccgacgccggcgacaccgtggaggacgccaacttcgtggaggccatggccgacgccggcatcctgagactgtacacctgggtggagtgggtgaaggagatggtggccaactgggacagcctgagaagcggccccgccagcaccttcaacgacagagtgttcgccagcgagctgaacgccggcatcatcaagaccgaccagaactacgagaagatgatgttcaaggaggccctgaagaccggcttcttcgagttccaggccgccaaggacaagtacagagagctggccgtggagggcatgcacagagagctggtgttcagattcatcgaggtgcagaccctgctgctggcccccttctgcccccacctgtgcgagcacatctggaccctgctgggcaagcccgacagcatcatgaacgccagctggcccgtggccggccccgtgaacgaggtgctgatccacagcagccagtacctgatggaggtgacccacgacctgagactgagactgaagaactacatgatgcccgccaagggcaagaagaccgacaagcagcccctgcagaagcccagccactgcaccatctacgtggccaagaactaccccccctggcagcacaccaccctgagcgtgctgagaaagcacttcgaggccaacaacggcaagctgcccgacaacaaggtgatcgccagcgagctgggcagcatgcccgagctgaagaagtacatgaagaaggtgatgcccttcgtggccatgatcaaggagaacctggagaagatgggccccagaatcctggacctgcagctggagttcgacgagaaggccgtgctgatggagaacatcgtgtacctgaccaacagcctggagctggagcacatcgaggtgaagttcgccagcgaggccgaggacaagatcagagaggactgctgccccggcaagcccctgaacgtgttcagaatcgagcccggcgtgagcgtgagcctggtgaacccccagcccagcaacggccacttcagcaccaagatcgagatcagacagggcgacaactgcgacagcatcatcagaagactgatgaagatgaacagaggcatcaaggacctgagcaaggtgaagctgatgagattcgacgaccccctgctgggccccagaagagtgcccgtgctgggcaaggagtacaccgagaagacccccatcagcgagcacgccgtgttcaacgtggacctgatgagcaagaagatccacctgaccgagaacggcatcagagtggacatcggcgacaccatcatctacctggtgcactag

SEQ ID NO: 86811 - DNA, 480 bp, synthetic construct
  misc_feature 1..480: note = Description of Artificial Sequence: Synthetic coding sequence
  source 1..480: mol_type = other DNA
atggccgagagaaagggcaccgccaaggtggacttcctgaagaagatcgagaaggagatccagcagaagtgggacaccgagagagtgttcgaggtgaacgccagcaacctggagaagcagaccagcaagggcaagtacttcgtgaccttcccctacccctacatgaacggcagactgcacctgggccacaccttcagcctgagcaagtgcgagttcgccgtgggctaccagagactgaagggcaagtgctgcctgttccccttcggcctgcactgcaccggcatgcccatcaaggcctgcgccgacaagctgaagagagagatcgagctgtacggctgcccccccgacttccccgacgaggaggaggaggaggaggagaccagcgtgaagaccgaggacatcatcatcaaggacaaggccaagggcaagaagagcaaggccgccaagctggacctgctgaacaccagcggcgccctgtag

SEQ ID NO: 86812 - DNA, 3531 bp, synthetic construct
  misc_feature 1..3531: note = Description of Artificial Sequence: Synthetic coding sequence
  source 1..3531: mol_type = other DNA
atggccgagagaaagggcaccgccaaggtggacttcctgaagaagatcgagaaggagatccagcagaagtgggacaccgagagagtgttcgaggtgaacgccagcaacctggagaagcagaccagcaagggcaagtacttcgtgaccttcccctacccctacatgaacggcagactgcacctgggccacaccttcagcctgagcaagtgcgagttcgccgtgggctaccagagactgaagggcaagtgctgcctgttccccttcggcctgcactgcaccggcatgcccatcaaggcctgcgccgacaagctgaagagagagatcgagctgtacggctgcccccccgacttccccgacgaggaggaggaggaggaggagaccagcgtgaagaccgaggacatcatcatcaaggacaaggccaagggcaagaagagcaaggccgccgccaaggccggcagcagcaagtaccagtggggcatcatgaagagcctgggcctgagcgacgaggagatcgtgaagttcagcgaggccgagcactggctggactacttcccccccctggccatccaggacctgaagagaatgggcctgaaggtggactggagaagaagcttcatcaccaccgacgtgaacccctactacgacagcttcgtgagatggcagttcctgaccctgagagagagaaacaagatcaagttcggcaagagatacaccatctacagccccaaggacggccagccctgcatggaccacgacagacagaccggcgagggcgtgggcccccaggagtacaccctgctgaagctgaaggtgctggagccctaccccagcaagctgagcggcctgaagggcaagaacatcttcctggtggccgccaccctgagacccgagaccatgttcggccagaccaactgctgggtgagacccgacatgaagtacatcggcttcgagaccgtgaacggcgacatcttcatctgcacccagaaggccgccagaaacatgagctaccagggcttcaccaaggacaacggcgtggtgcccgtggtgaaggagctgatgggcgaggagatcctgggcgccagcctgagcgcccccctgaccagctacaaggtgatctacgtgctgcccatgctgaccatcaaggaggacaagggcaccggcgtggtgaccagcgtgcccagcgacagccccgacgacatcgccgccctgagagacctgaagaagaagcaggccctgagagccaagtacggcatcagagacgacatggtgctgcccttcgagcccgtgcccgtgatcgagatccccggcttcggcaacctgagcgccgtgaccatctgcgacgagctgaagatccagagccagaacgacagagagaagctggccgaggccaaggagaagatctacctgaagggcttctacgagggcatcatgctggtggacggcttcaagggccagaaggtgcaggacgtgaagaagaccatccagaagaagatgatcgacgccggcgacgccctgatctacatggagcccgagaagcaggtgatgagcagaagcagcgacgagtgcgtggtggccctgtgcgaccagtggtacctggactacggcgaggagaactggaagaagcagaccagccagtgcctgaagaacctggagaccttctgcgaggagaccagaagaaacttcgaggccaccctgggctggctgcaggagcacgcctgcagcagaacctacggcctgggcacccacctgccctgggacgagcagtggctgatcgagagcctgagcgacagcaccatctacatggccttctacaccgtggcccacctgctgcagggcggcaacctgcacggccaggccgagagccccctgggcatcagaccccagcagatgaccaaggaggtgtgggactacgtgttcttcaaggaggcccccttccccaagacccagatcgccaaggagaagctggaccagctgaagcaggagttcgagttctggtaccccgtggacctgagagtgagcggcaaggacctggtgcccaaccacctgagctactacctgtacaaccacgtggccatgtggcccgagcagagcgacaagtggcccaccgccgtgagagccaacggccacctgctgctgaacagcgagaagatgagcaagagcaccggcaacttcctgaccctgacccaggccatcgacaagttcagcgccgacggcatgagactggccctggccgacgccggcgacaccgtggaggacgccaacttcgtggaggccatggccgacgccggcatcctgagactgtacacctgggtggagtgggtgaaggagatggtggccaactgggacagcctgagaagcggccccgccagcaccttcaacgacagagtgttcgccagcgagctgaacgccggcatcatcaagaccgaccagaactacgagaagatgatgttcaaggaggccctgaagaccggcttcttcgagttccaggccgccaaggacaagtacagagagctggccgtggagggcatgcacagagagctggtgttcagattcatcgaggtgcagaccctgctgctggcccccttctgcccccacctgtgcgagcacatctggaccctgctgggcaagcccgacagcatcatgaacgccagctggcccgtggccggccccgtgaacgaggtgctgatccacagcagccagtacctgatggaggtgacccacgacctgagactgagactgaagaactacatgatgcccgccaagggcaagaagaccgacaagcagcccctgcagaagcccagccactgcaccatctacgtggccaagaactaccccccctggcagcacaccaccctgagcgtgctgagaaagcacttcgaggccaacaacggcaagctgcccgacaacaaggtgatcgccagcgagctgggcagcatgcccgagctgaagaagtacatgaagaaggtgatgcccttcgtggccatgatcaaggagaacctggagaagatgggccccagaatcctggacctgcagctggagttcgacgagaaggccgtgctgatggagaacatcgtgtacctgaccaacagcctggagctggagcacatcgaggtgaagttcgccagcgaggccgaggacaagatcagagaggactgctgccccggcaagcccctgaacgtgttcagaatcgagcccggcgtgagcgtgagcctggtgaacccccagcccagcaacggccacttcagcaccaagatcgagatcagacagggcgacaactgcgacagcatcatcagaagactgatgaagatgaacagaggcatcaaggacctgagcaaggtgaagctgatgagattcgacgaccccctgctgggccccagaagagtgcccgtgctgggcaaggagtacaccgagaagacccccatcagcgagcacgccgtgttcaacgtggacctgatgagcaagaagatccacctgaccgagaacggcatcagagtggacatcggcgacaccatcatctacctggtgcactag

SEQ ID NO: 86813 - DNA, 3369 bp, synthetic construct
  misc_feature 1..3369: note = Description of Artificial Sequence: Synthetic coding sequence
  source 1..3369: mol_type = other DNA
atgaacggcagactgcacctgggccacaccttcagcctgagcaagtgcgagttcgccgtgggctaccagagactgaagggcaagtgctgcctgttccccttcggcctgcactgcaccggcatgcccatcaaggcctgcgccgacaagctgaagagagagatcgagctgtacggctgcccccccgacttccccgacgaggaggaggaggaggaggagaccagcgtgaagaccgaggacatcatcatcaaggacaaggccaagggcaagaagagcaaggccgccgccaaggccggcagcagcaagtaccagtggggcatcatgaagagcctgggcctgagcgacgaggagatcgtgaagttcagcgaggccgagcactggctggactacttcccccccctggccatccaggacctgaagagaatgggcctgaaggtggactggagaagaagcttcatcaccaccgacgtgaacccctactacgacagcttcgtgagatggcagttcctgaccctgagagagagaaacaagatcaagttcggcaagagatacaccatctacagccccaaggacggccagccctgcatggaccacgacagacagaccggcgagggcgtgggcccccaggagtacaccctgctgaagctgaaggtgctggagccctaccccagcaagctgagcggcctgaagggcaagaacatcttcctggtggccgccaccctgagacccgagaccatgttcggccagaccaactgctgggtgagacccgacatgaagtacatcggcttcgagaccgtgaacggcgacatcttcatctgcacccagaaggccgccagaaacatgagctaccagggcttcaccaaggacaacggcgtggtgcccgtggtgaaggagctgatgggcgaggagatcctgggcgccagcctgagcgcccccctgaccagctacaaggtgatctacgtgctgcccatgctgaccatcaaggaggacaagggcaccggcgtggtgaccagcgtgcccagcgacagccccgacgacatcgccgccctgagagacctgaagaagaagcaggccctgagagccaagtacggcatcagagacgacatggtgctgcccttcgagcccgtgcccgtgatcgagatccccggcttcggcaacctgagcgccgtgaccatctgcgacgagctgaagatccagagccagaacgacagagagaagctggccgaggccaaggagaagatctacctgaagggcttctacgagggcatcatgctggtggacggcttcaagggccagaaggtgcaggacgtgaagaagaccatccagaagaagatgatcgacgccggcgacgccctgatctacatggagcccgagaagcaggtgatgagcagaagcagcgacgagtgcgtggtggccctgtgcgaccagtggtacctggactacggcgaggagaactggaagaagcagaccagccagtgcctgaagaacctggagaccttctgcgaggagaccagaagaaacttcgaggccaccctgggctggctgcaggagcacgcctgcagcagaacctacggcctgggcacccacctgccctgggacgagcagtggctgatcgagagcctgagcgacagcaccatctacatggccttctacaccgtggcccacctgctgcagggcggcaacctgcacggccaggccgagagccccctgggcatcagaccccagcagatgaccaaggaggtgtgggactacgtgttcttcaaggaggcccccttccccaagacccagatcgccaaggagaagctggaccagctgaagcaggagttcgagttctggtaccccgtggacctgagagtgagcggcaaggacctggtgcccaaccacctgagctactacctgtacaaccacgtggccatgtggcccgagcagagcgacaagtggcccaccgccgtgagagccaacggccacctgctgctgaacagcgagaagatgagcaagagcaccggcaacttcctgaccctgacccaggccatcgacaagttcagcgccgacggcatgagactggccctggccgacgccggcgacaccgtggaggacgccaacttcgtggaggccatggccgacgccggcatcctgagactgtacacctgggtggagtgggtgaaggagatggtggccaactgggacagcctgagaagcggccccgccagcaccttcaacgacagagtgttcgccagcgagctgaacgccggcatcatcaagaccgaccagaactacgagaagatgatgttcaaggaggccctgaagaccggcttcttcgagttccaggccgccaaggacaagtacagagagctggccgtggagggcatgcacagagagctggtgttcagattcatcgaggtgcagaccctgctgctggcccccttctgcccccacctgtgcgagcacatctggaccctgctgggcaagcccgacagcatcatgaacgccagctggcccgtggccggccccgtgaacgaggtgctgatccacagcagccagtacctgatggaggtgacccacgacctgagactgagactgaagaactacatgatgcccgccaagggcaagaagaccgacaagcagcccctgcagaagcccagccactgcaccatctacgtggccaagaactaccccccctggcagcacaccaccctgagcgtgctgagaaagcacttcgaggccaacaacggcaagctgcccgacaacaaggtgatcgccagcgagctgggcagcatgcccgagctgaagaagtacatgaagaaggtgatgcccttcgtggccatgatcaaggagaacctggagaagatgggccccagaatcctggacctgcagctggagttcgacgagaaggccgtgctgatggagaacatcgtgtacctgaccaacagcctggagctggagcacatcgaggtgaagttcgccagcgaggccgaggacaagatcagagaggactgctgccccggcaagcccctgaacgtgttcagaatcgagcccggcgtgagcgtgagcctggtgaacccccagcccagcaacggccacttcagcaccaagatcgagatcagacagggcgacaactgcgacagcatcatcagaagactgatgaagatgaacagaggcatcaaggacctgagcaaggtgaagctgatgagattcgacgaccccctgctgggccccagaagagtgcccgtgctgggcaaggagtacaccgagaagacccccatcagcgagcacgccgtgttcaacgtggacctgatgagcaagaagatccacctgaccgagaacggcatcagagtggacatcggcgacaccatcatctacctggtgcactag

SEQ ID NO: 86814 - DNA, 372 bp, synthetic construct
  misc_feature 1..372: note = Description of Artificial Sequence: Synthetic coding sequence
  source 1..372: mol_type = other DNA
atgtggcccgagcagagcgacaagtggcccaccgccgtgagagccaacggccacctgctgctgaacagcgagaagatgagcaagagcaccggcaacttcctgaccctgacccaggccatcgacaagttcagcgccgacggcatgagactggccctggccgacgccggcgacaccgtggaggacgccaacttcgtggaggccatggccgacgccggcatcctgagactgtacacctgggtggagtgggtgaaggagatggtggccaactgggacagcctgagaagcggccccgccagcaccttcaacgacagagtgttcgccagcgagctgaacgccggcatcatcaagaccgaccagaccatgaagagatag

SEQ ID NO: 86815 - DNA, 1458 bp, synthetic construct
  misc_feature 1..1458: note = Description of Artificial Sequence: Synthetic coding sequence
  source 1..1458: mol_type = other DNA
atgtggcccgagcagagcgacaagtggcccaccgccgtgagagccaacggccacctgctgctgaacagcgagaagatgagcaagagcaccggcaacttcctgaccctgacccaggccatcgacaagttcagcgccgacggcatgagactggccctggccgacgccggcgacaccgtggaggacgccaacttcgtggaggccatggccgacgccggcatcctgagactgtacacctgggtggagtgggtgaaggagatggtggccaactgggacagcctgagaagcggccccgccagcaccttcaacgacagagtgttcgccagcgagctgaacgccggcatcatcaagaccgaccagaactacgagaagatgatgttcaaggaggccctgaagaccggcttcttcgagttccaggccgccaaggacaagtacagagagctggccgtggagggcatgcacagagagctggtgttcagattcatcgaggtgcagaccctgctgctggcccccttctgcccccacctgtgcgagcacatctggaccctgctgggcaagcccgacagcatcatgaacgccagctggcccgtggccggccccgtgaacgaggtgctgatccacagcagccagtacctgatggaggtgacccacgacctgagactgagactgaagaactacatgatgcccgccaagggcaagaagaccgacaagcagcccctgcagaagcccagccactgcaccatctacgtggccaagaactaccccccctggcagcacaccaccctgagcgtgctgagaaagcacttcgaggccaacaacggcaagctgcccgacaacaaggtgatcgccagcgagctgggcagcatgcccgagctgaagaagtacatgaagaaggtgatgcccttcgtggccatgatcaaggagaacctggagaagatgggccccagaatcctggacctgcagctggagttcgacgagaaggccgtgctgatggagaacatcgtgtacctgaccaacagcctggagctggagcacatcgaggtgaagttcgccagcgaggccgaggacaagatcagagaggactgctgccccggcaagcccctgaacgtgttcagaatcgagcccggcgtgagcgtgagcctggtgaacccccagcccagcaacggccacttcagcaccaagatcgagatcagacagggcgacaactgcgacagcatcatcagaagactgatgaagatgaacagaggcatcaaggacctgagcaaggtgaagctgatgagattcgacgaccccctgctgggccccagaagagtgcccgtgctgggcaaggagtacaccgagaagacccccatcagcgagcacgccgtgttcaacgtggacctgatgagcaagaagatccacctgaccgagaacggcatcagagtggacatcggcgacaccatcatctacctggtgcactag

SEQ ID NO: 86816 - DNA, 3393 bp, synthetic construct
  misc_feature 1..3393: note = Description of Artificial Sequence: Synthetic coding sequence
  source 1..3393: mol_type = other DNA
atggccgagagaaagggcaccgccaaggtggacttcctgaagaagatcgagaaggagatccagcagaagtgggacaccgagagagtgttcgaggtgaacgccagcaacctggagaagcagaccagcaagggcaagtacttcgtgaccttcccctacccctacatgaacggcagactgcacctgggccacaccttcagcctgagcaagtgcgagttcgccgtgggctaccagagactgaagggcaagtgctgcctgttccccttcggcctgcactgcaccggcatgcccatcaagagcaaggccgccgccaaggccggcagcagcaagtaccagtggggcatcatgaagagcctgggcctgagcgacgaggagatcgtgaagttcagcgaggccgagcactggctggactacttcccccccctggccatccaggacctgaagagaatgggcctgaaggtggactggagaagaagcttcatcaccaccgacgtgaacccctactacgacagcttcgtgagatggcagttcctgaccctgagagagagaaacaagatcaagttcggcaagagatacaccatctacagccccaaggacggccagccctgcatggaccacgacagacagaccggcgagggcgtgggcccccaggagtacaccctgctgaagctgaaggtgctggagccctaccccagcaagctgagcggcctgaagggcaagaacatcttcctggtggccgccaccctgagacccgagaccatgttcggccagaccaactgctgggtgagacccgacatgaagtacatcggcttcgagaccgtgaacggcgacatcttcatctgcacccagaaggccgccagaaacatgagctaccagggcttcaccaaggacaacggcgtggtgcccgtggtgaaggagctgatgggcgaggagatcctgggcgccagcctgagcgcccccctgaccagctacaaggtgatctacgtgctgcccatgctgaccatcaaggaggacaagggcaccggcgtggtgaccagcgtgcccagcgacagccccgacgacatcgccgccctgagagacctgaagaagaagcaggccctgagagccaagtacggcatcagagacgacatggtgctgcccttcgagcccgtgcccgtgatcgagatccccggcttcggcaacctgagcgccgtgaccatctgcgacgagctgaagatccagagccagaacgacagagagaagctggccgaggccaaggagaagatctacctgaagggcttctacgagggcatcatgctggtggacggcttcaagggccagaaggtgcaggacgtgaagaagaccatccagaagaagatgatcgacgccggcgacgccctgatctacatggagcccgagaagcaggtgatgagcagaagcagcgacgagtgcgtggtggccctgtgcgaccagtggtacctggactacggcgaggagaactggaagaagcagaccagccagtgcctgaagaacctggagaccttctgcgaggagaccagaagaaacttcgaggccaccctgggctggctgcaggagcacgcctgcagcagaacctacggcctgggcacccacctgccctgggacgagcagtggctgatcgagagcctgagcgacagcaccatctacatggccttctacaccgtggcccacctgctgcagggcggcaacctgcacggccaggccgagagccccctgggcatcagaccccagcagatgaccaaggaggtgtgggactacgtgttcttcaaggaggcccccttccccaagacccagatcgccaaggagaagctggaccagctgaagcaggagttcgagttctggtaccccgtggacctgagagtgagcggcaaggacctggtgcccaaccacctgagctactacctgtacaaccacgtggccatgtggcccgagcagagcgacaagtggcccaccgccgtgagagccaacggccacctgctgctgaacagcgagaagatgagcaagagcaccggcaacttcctgaccctgacccaggccatcgacaagttcagcgccgacggcatgagactggccctggccgacgccggcgacaccgtggaggacgccaacttcgtggaggccatggccgacgccggcatcctgagactgtacacctgggtggagtgggtgaaggagatggtggccaactgggacagcctgagaagcggccccgccagcaccttcaacgacagagtgttcgccagcgagctgaacgccggcatcatcaagaccgaccagaactacgagaagatgatgttcaaggaggccctgaagaccggcttcttcgagttccaggccgccaaggacaagtacagagagctggccgtggagggcatgcacagagagctggtgttcagattcatcgaggtgcagaccctgctgctggcccccttctgcccccacctgtgcgagcacatctggaccctgctgggcaagcccgacagcatcatgaacgccagctggcccgtggccggccccgtgaacgaggtgctgatccacagcagccagtacctgatggaggtgacccacgacctgagactgagactgaagaactacatgatgcccgccaagggcaagaagaccgacaagcagcccctgcagaagcccagccactgcaccatctacgtggccaagaactaccccccctggcagcacaccaccctgagcgtgctgagaaagcacttcgaggccaacaacggcaagctgcccgacaacaaggtgatcgccagcgagctgggcagcatgcccgagctgaagaagtacatgaagaaggtgatgcccttcgtggccatgatcaaggagaacctggagaagatgggccccagaatcctggacctgcagctggagttcgacgagaaggccgtgctgatggagaacatcgtgtacctgaccaacagcctggagctggagcacatcgaggtgaagttcgccagcgaggccgaggacaagatcagagaggactgctgccccggcaagcccctgaacgtgttcagaatcgagcccggcgtgagcgtgagcctggtgaacccccagcccagcaacggccacttcagcaccaagatcgagatcagacagggcgacaactgcgacagcatcatcagaagactgatgaagatgaacagaggcatcaaggacctgagcaaggtgaagctgatgagattcgacgaccccctgctgggccccagaagagtgcccgtgctgggcaaggagtacaccgagaagacccccatcagcgagcacgccgtgttcaacgtggacctgatgagcaagaagatccacctgaccgagaacggcatcagagtggacatcggcgacaccatcatctacctggtgcactag

SEQ ID NO: 86817 - DNA, 2712 bp, synthetic construct
  misc_feature 1..2712: note = Description of Artificial Sequence: Synthetic coding sequence
  source 1..2712: mol_type = other DNA
atggccagcgtgtggcagagactgggcttctacgccagcctgctgaagagacagctgaacggcggccccgacgtgatcaagtgggagagaagagtgatccccggctgcaccagaagcatctacagcgccaccggcaagtggaccaaggagtacaccctgcagaccagaaaggacgtggagaagtggtggcaccagagaatcaaggagcaggccagcaagatcagcgaggccgacaagagcaagcccaagttctacgtgctgagcatgttcccctaccccagcggcaagctgcacatgggccacgtgagagtgtacaccatcagcgacaccatcgccagattccagaagatgagaggcatgcaggtgatcaaccccatgggctgggacgccttcggcctgcccgccgagaacgccgccgtggagagaaacctgcacccccagagctggacccagagcaacatcaagcacatgagaaagcagctggacagactgggcctgtgcttcagctgggacagagagatcaccacctgcctgcccgactactacaagtggacccagtacctgttcatcaagctgtacgaggccggcctggcctaccagaaggaggccctggtgaactgggaccccgtggaccagaccgtgctggccaacgagcaggtggacgagcacggctgcagctggagaagcggcgccaaggtggagcagaagtacctgagacagtggttcatcaagaccaccgcctacgccaaggccatgcaggacgccctggccgacctgcccgagtggtacggcatcaagggcatgcaggcccactggatcggcgactgcgtgggctgccacctggacttcaccctgaaggtgcacggccaggccaccggcgagaagctgaccgcctacaccgccacccccgaggccatctacggcaccagccacgtggccatcagccccagccacagactgctgcacggccacagcagcctgaaggaggccctgagaatggccctggtgcccggcaaggactgcctgacccccgtgatggccgtgaacatgctgacccagcaggaggtgcccgtggtgatcctggccaaggccgacctggagggcagcctggacagcaagatcggcatccccagcaccagcagcgaggacaccatcctggcccagaccctgggcctggcctacagcgaggtgatcgagaccctgcccgacggcaccgagagactgagcagcagcgccgagttcaccggcatgaccagacaggacgccttcctggccctgacccagaaggccagaggcaagagagtgggcggcgacgtgaccagcgacaagctgaaggactggctgatcagcagacagagatactggggcacccccatccccatcgtgcactgccccgtgtgcggccccacccccgtgcccctggaggacctgcccgtgaccctgcccaacatcgccagcttcaccggcaagggcggcccccccctggccatggccagcgagtgggtgaactgcagctgccccagatgcaagggcgccgccaagagagagaccgacaccatggacaccttcgtggacagcgcctggtactacttcagatacaccgacccccacaacccccacagccccttcaacaccgccgtggccgactactggatgcccgtggacctgtacatcggcggcaaggagcacgccgtgatgcacctgttctacgccagattcttcagccacttctgccacgaccagaagatggtgaagcacagagagcccttccacaagctgctggcccagggcctgatcaagggccagaccttcagactgcccagcggccagtacctgcagagagaggaggtggacctgaccggcagcgtgcccgtgcacgccaagaccaaggagaagctggaggtgacctgggagaagatgagcaagagcaagcacaacggcgtggaccccgaggaggtggtggagcagtacggcatcgacaccatcagactgtacatcctgttcgccgccccccccgagaaggacatcctgtgggacgtgaagaccgacgccctgcccggcgtgctgagatggcagcagagactgtggaccctgaccaccagattcatcgaggccagagccagcggcaagagcccccagccccagctgctgagcaacaaggagaaggccgaggccagaaagctgtgggagtacaagaacagcgtgatcagccaggtgaccacccacttcaccgaggacttcagcctgaacagcgccatcagccagctgatgggcctgagcaacgccctgagccaggccagccagagcgtgatcctgcacagccccgagttcgaggacgccctgtgcgccctgatggtgatggccgcccccctggccccccacgtgaccagcgagatctgggccggcctggccctggtgcccagaaagctgtgcgcccactacacctgggacgccagcgtgctgctgcaggcctggcccgccgtggaccccgagttcctgcagcagcccgaggtggtgcagatggccgtgctgatcaacaacaaggcctgcggcaagatccccgtgccccagcaggtggccagagaccaggacaaggtgcacgagttcgtgctgcagagcgagctgggcgtgagactgctgcagggcagaagcatcaagaagagcttcctgagccccagaaccgccctgatcaacttcctggtgcaggactag

SEQ ID NO: 86818 - DNA, 2583 bp, synthetic construct
  misc_feature 1..2583: note = Description of Artificial Sequence: Synthetic coding sequence
  source 1..2583: mol_type = other DNA
atggccagcgtgtggcagagactgggcttctacgccagcctgctgaagagacagctgaacggcggccccgacgtgatcaagtgggagagaagagtgatccccggctgcaccagaagcatctacagcgccaccggcaagtggaccaaggagtacaccctgcagaccagaaaggacgtggagaagtggtggcaccagagaatcaaggagcaggccagcaagatcagcgaggccgacgtgatcaaccccatgggctgggacgccttcggcctgcccgccgagaacgccgccgtggagagaaacctgcacccccagagctggacccagagcaacatcaagcacatgagaaagcagctggacagactgggcctgtgcttcagctgggacagagagatcaccacctgcctgcccgactactacaagtggacccagtacctgttcatcaagctgtacgaggccggcctggcctaccagaaggaggccctggtgaactgggaccccgtggaccagaccgtgctggccaacgagcaggtggacgagcacggctgcagctggagaagcggcgccaaggtggagcagaagtacctgagacagtggttcatcaagaccaccgcctacgccaaggccatgcaggacgccctggccgacctgcccgagtggtacggcatcaagggcatgcaggcccactggatcggcgactgcgtgggctgccacctggacttcaccctgaaggtgcacggccaggccaccggcgagaagctgaccgcctacaccgccacccccgaggccatctacggcaccagccacgtggccatcagccccagccacagactgctgcacggccacagcagcctgaaggaggccctgagaatggccctggtgcccggcaaggactgcctgacccccgtgatggccgtgaacatgctgacccagcaggaggtgcccgtggtgatcctggccaaggccgacctggagggcagcctggacagcaagatcggcatccccagcaccagcagcgaggacaccatcctggcccagaccctgggcctggcctacagcgaggtgatcgagaccctgcccgacggcaccgagagactgagcagcagcgccgagttcaccggcatgaccagacaggacgccttcctggccctgacccagaaggccagaggcaagagagtgggcggcgacgtgaccagcgacaagctgaaggactggctgatcagcagacagagatactggggcacccccatccccatcgtgcactgccccgtgtgcggccccacccccgtgcccctggaggacctgcccgtgaccctgcccaacatcgccagcttcaccggcaagggcggcccccccctggccatggccagcgagtgggtgaactgcagctgccccagatgcaagggcgccgccaagagagagaccgacaccatggacaccttcgtggacagcgcctggtactacttcagatacaccgacccccacaacccccacagccccttcaacaccgccgtggccgactactggatgcccgtggacctgtacatcggcggcaaggagcacgccgtgatgcacctgttctacgccagattcttcagccacttctgccacgaccagaagatggtgaagcacagagagcccttccacaagctgctggcccagggcctgatcaagggccagaccttcagactgcccagcggccagtacctgcagagagaggaggtggacctgaccggcagcgtgcccgtgcacgccaagaccaaggagaagctggaggtgacctgggagaagatgagcaagagcaagcacaacggcgtggaccccgaggaggtggtggagcagtacggcatcgacaccatcagactgtacatcctgttcgccgccccccccgagaaggacatcctgtgggacgtgaagaccgacgccctgcccggcgtgctgagatggcagcagagactgtggaccctgaccaccagattcatcgaggccagagccagcggcaagagcccccagccccagctgctgagcaacaaggagaaggccgaggccagaaagctgtgggagtacaagaacagcgtgatcagccaggtgaccacccacttcaccgaggacttcagcctgaacagcgccatcagccagctgatgggcctgagcaacgccctgagccaggccagccagagcgtgatcctgcacagccccgagttcgaggacgccctgtgcgccctgatggtgatggccgcccccctggccccccacgtgaccagcgagatctgggccggcctggccctggtgcccagaaagctgtgcgcccactacacctgggacgccagcgtgctgctgcaggcctggcccgccgtggaccccgagttcctgcagcagcccgaggtggtgcagatggccgtgctgatcaacaacaaggcctgcggcaagatccccgtgccccagcaggtggccagagaccaggacaaggtgcacgagttcgtgctgcagagcgagctgggcgtgagactgctgcagggcagaagcatcaagaagagcttcctgagccccagaaccgccctgatcaacttcctggtgcaggactag

SEQ ID NO: 86819 - DNA, 2712 bp, synthetic construct; identical to SEQ ID NO: 86817
  misc_feature 1..2712: note = Description of Artificial Sequence: Synthetic coding sequence
  source 1..2712: mol_type = other DNA

SEQ ID NO: 86820 - DNA, 345 bp, synthetic construct
  misc_feature 1..345: note = Description of Artificial Sequence: Synthetic coding sequence
  source 1..345: mol_type = other DNA
atggccagcgtgtggcagagactgggcttctacgccagcctgctgaagagacagctgaacggcggccccgacgtgatcaagtgggagagaagagtgatccccggctgcaccagaagcatctacagcgccaccggcaagtggaccaaggagtacaccctgcagaccagaaaggacgtggagaagtggtggcaccagagaatcaaggagcaggccagcaagatcagcgaggccgacaagagcaagcccaagttctacgtgctgagcatgttcccctaccccagcggcaagctgcacatgggccacgtgagagtgtacaccatcagcgacaccatcgccagattctag

SEQ ID NO: 86821 - DNA, 609 bp, synthetic construct
  misc_feature 1..609: note = Description of Artificial Sequence: Synthetic coding sequence
  source 1..609: mol_type = other DNA
atgaaggtgctggccgccggcgtggtgcccctgctgctggtgctgcactggaagcacggcgccggcagccccctgcccatcacccccgtgaacgccacctgcgccatcagacacccctgccacaacaacctgatgaaccagatcagaagccagctggcccagctgaacggcagcgccaacgccctgttcatcctgtactacaccgcccagggcgagcccttccccaacaacctggacaagctgtgcggccccaacgtgaccgacttcccccccttccacgccaacggcaccgagaaggccaagctggtggagctgtacagaatcgtggtgtacctgggcaccagcctgggcaacatcaccagagaccagaagatcctgaaccccagcgccctgagcctgcacagcaagctgaacgccaccgccgacatcctgagaggcctgctgagcaacgtgctgtgcagactgtgcagcaagtaccacgtgggccacgtggacgtgacctacggccccgacaccagcggcaaggacgtgttccagaagaagaagctgggctgccagctgctgggcaagtacaagcagatcatcgccgtgctggcccaggccttctag

SEQ ID NO: 86822 - DNA, 3294 bp, synthetic construct
  misc_feature 1..3294: note = Description of Artificial Sequence: Synthetic coding sequence
  source 1..3294: mol_type = other DNA
atgatggacatctacgtgtgcctgaagagacccagctggatggtggacaacaagagaatgagaaccgccagcaacttccagtggctgctgagcaccttcatcctgctgtacctgatgaaccaggtgaacagccagaagaagggcgccccccacgacctgaagtgcgtgaccaacaacctgcaggtgtggaactgcagctggaaggcccccagcggcaccggcagaggcaccgactacgaggtgtgcatcgagaacagaagcagaagctgctaccagctggagaagaccagcatcaagatccccgccctgagccacggcgactacgagatcaccatcaacagcctgcacgacttcggcagcagcaccagcaagttcaccctgaacgagcagaacgtgagcctgatccccgacacccccgagatcctgaacctgagcgccgacttcagcaccagcaccctgtacctgaagtggaacgacagaggcagcgtgttcccccacagaagcaacgtgatctgggagatcaaggtgctgagaaaggagagcatggagctggtgaagctggtgacccacaacaccaccctgaacggcaaggacaccctgcaccactggagctgggccagcgacatgcccctggagtgcgccatccacttcgtggagatcagatgctacatcgacaacctgcacttcagcggcctggaggagtggagcgactggagccccgtgaagaacatcagctggatccccgacagccagaccaaggtgttcccccaggacaaggtgatcctggtgggcagcgacatcaccttctgctgcgtgagccaggagaaggtgctgagcgccctgatcggccacaccaactgccccctgatccacctggacggcgagaacgtggccatcaagatcagaaacatcagcgtgagcgccagcagcggcaccaacgtggtgttcaccaccgaggacaacatcttcggcaccgtgatcttcgccggctacccccccgacaccccccagcagctgaactgcgagacccacgacctgaaggagatcatctgcagctggaaccccggcagagtgaccgccctggtgggccccagagccaccagctacaccctggtggagagcttcagcggcaagtacgtgagactgaagagagccgaggcccccaccaacgagagctaccagctgctgttccagatgctgcccaaccaggagatctacaacttcaccctgaacgcccacaaccccctgggcagaagccagagcaccatcctggtgaacatcaccgagaaggtgtacccccacacccccaccagcttcaaggtgaaggacatcaacagcaccgccgtgaagctgagctggcacctgcccggcaacttcgccaagatcaacttcctgtgcgagatcgagatcaagaagagcaacagcgtgcaggagcagagaaacgtgaccatcaagggcgtggagaacagcagctacctggtggccctggacaagctgaacccctacaccctgtacaccttcagaatcagatgcagcaccgagaccttctggaagtggagcaagtggagcaacaagaagcagcacctgaccaccgaggccagccccagcaagggccccgacacctggagagagtggagcagcgacggcaagaacctgatcatctactggaagcccctgcccatcaacgaggccaacggcaagatcctgagctacaacgtgagctgcagcagcgacgaggagacccagagcctgagcgagatccccgacccccagcacaaggccgagatcagactggacaagaacgactacatcatcagcgtggtggccaagaacagcgtgggcagcagcccccccagcaagatcgccagcatggagatccccaacgacgacctgaagatcgagcaggtggtgggcatgggcaagggcatcctgctgacctggcactacgaccccaacatgacctgcgactacgtgatcaagtggtgcaacagcagcagaagcgagccctgcctgatggactggagaaaggtgcccagcaacagcaccgagaccgtgatcgagagcgacgagttcagacccggcatcagatacaacttcttcctgtacggctgcagaaaccagggctaccagctgctgagaagcatgatcggctacatcgaggagctggcccccatcgtggcccccaacttcaccgtggaggacaccagcgccgacagcatcctggtgaagtgggaggacatccccgtggaggagctgagaggcttcctgagaggctacctgttctacttcggcaagggcgagagagacaccagcaagatgagagtgctggagagcggcagaagcgacatcaaggtgaagaacatcaccgacatcagccagaagaccctgagaatcgccgacctgcagggcaagaccagctaccacctggtgctgagagcctacaccgacggcggcgtgggccccgagaagagcatgtacgtggtgaccaaggagaacagcgtgggcctgatcatcgccatcctgatccccgtggccgtggccgtgatcgtgggcgtggtgaccagcatcctgtgctacagaaagagagagtggatcaaggagaccttctaccccgacatccccaaccccgagaactgcaaggccctgcagttccagaagagcgtgtgcgagggcagcagcgccctgaagaccctggagatgaacccctgcacccccaacaacgtggaggtgctggagaccagaagcgccttccccaagatcgaggacaccgagatcatcagccccgtggccgagagacccgaggacagaagcgacgccgagcccgagaaccacgtggtggtgagctactgcccccccatcatcgaggaggagatccccaaccccgccgccgacgaggccggcggcaccgcccaggtgatctacatcgacgtgcagagcatgtaccagccccaggccaagcccgaggaggagcaggagaacgaccccgtgggcggcgccggctacaagccccagatgcacctgcccatcaacagcaccgtggaggacatcgccgccgaggaggacctggacaagaccgccggctacagaccccaggccaacgtgaacacctggaacctggtgagccccgacagccccagaagcatcgacagcaacagcgagatcgtgagcttcggcagcccctgcagcatcaacagcagacagttcctgatcccccccaaggacgaggacagccccaagagcaacggcggcggctggagcttcaccaacttcttccagaacaagcccaacgactag

SEQ ID NO: 86823 - DNA, 3294 bp, synthetic construct; identical to SEQ ID NO: 86822
  misc_feature 1..3294: note = Description of Artificial Sequence: Synthetic coding sequence
  source 1..3294: mol_type = other DNA

SEQ ID NO: 86824 - DNA, 381 bp, synthetic construct
  misc_feature 1..381: note = Description of Artificial Sequence: Synthetic coding sequence
  source 1..381: mol_type = other DNA
atgatggacatctacgtgtgcctgaagagacccagctggatggtggacaacaagagaatgagaaccgccagcaacttccagtggctgctgagcaccttcatcctgctgtacctgatgaaccaggtgaacagccagaagaagggcgccccccacgacctgaagtgcgtgaccaacaacctgcaggtgtggaactgcagctggaaggcccccagcggcaccggcagaggcaccgactacgaggtgtgcatcgagaacagaagcagaagctgctaccagctggagaagaccagcatcaagatccccgccctgagccacggcgactacgagatcaccatcaacagcctgcacgacttcggcagcagcaccagcaagttcacctag

SEQ ID NO: 86825 - DNA, 228 bp, synthetic construct
  misc_feature 1..228: note = Description of Artificial Sequence: Synthetic coding sequence
  source 1..228: mol_type = other DNA
atgatggacatctacgtgtgcctgaagagacccagctggatggtggacaacaagagaatgagaaccgccagcaacttccagtggctgctgagcaccttcatcctgctgtacctgatgaaccaggtgaacagccagaagaagggcgccccccacgacctgaagtgcgtgaccaacaacctgcaggtgtggaactgcagctggaaggcccccagcggcaccggcagatag

SEQ ID NO: 86826 - DNA, 456 bp, synthetic construct
  misc_feature 1..456: note = Description of Artificial Sequence: Synthetic coding sequence
  source 1..456: mol_type = other DNA
atgttcagcaccaaggccctgctgctggccggcctgatcagcaccgccctggccggcccctgggccaacatctgcgccggcaagagcagcaacgagatcagaacctgcgacagacacggctgcggccagtacagcgcccagagaagccagagaccccaccagggcgtggacatcctgtgcagcgccggcagcaccgtgtacgcccccttcaccggcatgatcgtgggccaggagaagccctaccagaacaagaacgccatcaacaacggcgtgagaatcagcggcagaggcttctgcgtgaagatgttctacatcaagcccatcaagtacaagggccccatcaagaagggcgagaagctgggcaccctgctgcccctgcagaaggtgtaccccggcatccagagccacgtgcacatcgagaactgcgacagcagcgaccccaccgcctacctgtag

SEQ ID NO: 86827 - DNA, 1128 bp, synthetic construct
  misc_feature 1..1128: note = Description of Artificial Sequence: Synthetic coding sequence
  source 1..1128: mol_type = other DNA
atgacccccatcctgaccgtgctgatctgcctgggcctgagcctggaccccagaacccacgtgcaggccggccccctgcccaagcccaccctgtgggccgagcccggcagcgtgatcacccagggcagccccgtgaccctgagatgccagggcagcctggagacccaggagtaccacctgtacagagagaagaagaccgccctgtggatcaccagaatcccccaggagctggtgaagaagggccagttccccatcctgagcatcacctgggagcacgccggcagatactgctgcatctacggcagccacaccgccggcctgagcgagagcagcgaccccctggagctggtggtgaccggcgcctacagcaagcccaccctgagcgccctgcccagccccgtggtgaccagcggcggcaacgtgaccatccagtgcgacagccaggtggccttcgacggcttcatcctgtgcgtgagcaagaagcccagcctgagcgtgcagcccggccccgtggtggcccccggcgagaagctgaccttccagtgcggcagcgacgccggctacgacagattcgtgctgtacaaggagtggggcagagacttcctgcagagacccggcagacagccccaggccggcctgagccaggccaacttcaccctgggccccgtgagcagaagctacggcggccagtacacctgcagcggcgcctacaacctgagcagcgagtggagcgcccccagcgaccccctggacatcctgatcaccggccagatcagagccagacccttcctgagcgtgagacccggccccaccgtggccagcggcgagaacgtgaccctgctgtgccagagccagggcggcatgcacaccttcctgctgaccaaggagggcgccgccgacagccccctgagactgaagagcaagagacagagccacaagtaccaggccgagttccccatgagccccgtgaccagcgcccacgccggcacctacagatgctacggcagcctgagcagcaacccctacctgctgacccaccccagcgaccccctggagctggtggtgagcggcgccgccgagaccctgagccccccccagaacaagagcgacagcaaggccggcgagtag

SEQ ID NO: 86828 - DNA, 1956 bp, synthetic construct
  misc_feature 1..1956: note = Description of Artificial Sequence: Synthetic coding sequence
  source 1..1956: mol_type = other DNA
atgacccccatcctgaccgtgctgatctgcctgggcctgagcctgggccccagaacccacgtgcaggccggccacctgcccaagcccaccctgtgggccgagcccggcagcgtgatcacccagggcagccccgtgaccctgagatgccagggcggccaggagacccaggagtacagactgtacagagagaagaagaccgccctgtggatcaccagaatcccccaggagctggtgaagaagggccagttccccatccccagcatcacctgggagcacgccggcagatacagatgctactacggcagcgacaccgccggcagaagcgagagcagcgaccccctggagctggtggtgaccggcgcctacatcaagcccaccctgagcgcccagcccagccccgtggtgaacagcggcggcaacgtgatcctgcagtgcgacagccaggtggccttcgacggcttcagcctgtgcaaggagggcgaggacgagcacccccagtgcctgaacagccagccccacgccagaggcagcagcagagccatcttcagcgtgggccccgtgagccccagcagaagatggtggtacagatgctacgcctacgacagcaacagcccctacgagtggagcctgcccagcgacctgctggagctgctggtgctgggcgtgagcaagaagcccagcctgagcgtgcagcccggccccatcgtggcccccgaggagaccctgaccctgcagtgcggcagcgacgccggctacaacagattcgtgctgtacaaggacggcgagagagacttcctgcagctggccggcgcccagccccaggccggcctgagccaggccaacttcaccctgggccccgtgagcagaagctacggcggccagtacagatgctacggcgcccacaacctgagcagcgagtggagcgcccccagcgaccccctggacatcctgatcgccggccagttctacgacagagtgagcctgagcgtgcagcccggccccaccgtggccagcggcgagaacgtgaccctgctgtgccagagccagggctggatgcagaccttcctgctgaccaaggagggcgccgccgacgacccctggagactgagaagcacctaccagagccagaagtaccaggccgagttccccatgggccccgtgaccagcgcccacgccggcacctacagatgctacggcagccagagcagcaagccctacctgctgacccaccccagcgaccccctggagctggtggtgagcggccccagcggcggccccagcagccccaccaccggccccaccagcaccagcgccggccccgaggaccagcccctgacccccaccggcagcgacccccagagcggcctgggcagacacctgggcgtggtgatcggcatcctggtggccgtgatcctgctgctgctgctgctgctgctgctgttcctgatcctgagacacagaagacagggcaagcactggaccagcacccagagaaaggccgacttccagcaccccgccggcgccgtgggccccgagcccaccgacagaggcctgcagtggagaagcagccccgccgccgacgcccaggaggagaacctgtacgccgccgtgaagcacacccagcccgaggacggcgtggagatggacaccagaagcccccacgacgaggacccccaggccgtgacctacgccgaggtgaagcacagcagacccagaagagagatggccagcccccccagccccctgagcggcgagttcctggacaccaaggacagacaggccgaggaggacagacagatggacaccgaggccgccgccagcgaggccccccaggacgtgacctacgcccagctgcacagcctgaccctgagaagagaggccaccgagcccccccccagccaggagggccccagccccgccgtgcccagcatctacgccaccctggccatccactag

SEQ ID NO: 86829 - DNA, 1956 bp, synthetic construct
  misc_feature 1..1956: note = Description of Artificial Sequence: Synthetic coding sequence
  source 1..1956: mol_type = other DNA
atgacccccatcctgaccgtgctgatctgcctgggcctgagcctgggccccagaacccacgtgcaggccggccacctgcccaagcccaccctgtgggccgagcccggcagcgtgatcacccagggcagccccgtgaccctgagatgccagggcggccaggagacccaggagtacagactgtacagagagaagaagaccgccctgtggatcaccagaatcccccaggagctggtgaagaagggccagttccccatccccagcatcacctgggagcacgccggcagatacagatgctactacggcagcgacaccgccggcagaagcgagagcagcgaccccctggagctggtggtgaccggcgcctacatcaagcccaccctgagcgcccagcccagccccgtggtgaacagcggcggcaacgtgatcctgcagtgcgacagccaggtggccttcgacggcttcagcctgtgcaaggagggcgaggacgagcacccccagtgcctgaacagccagccccacgccagaggcagcagcagagccatcttcagcgtgggccccgtgagccccagcagaagatggtggtacagatgctacgcctacgacagcaacagcccctacgagtggagcctgcccagcgacctgctggagctgctggtgctgggcgtgagcaagaagcccagcctgagcgtgcagcccggccccatcgtggcccccgaggagaccctgaccctgcagtgcggcagcgacgccggctacaacagattcgtgctgtacaaggacggcgagagagacttcctgcagctggccggcgcccagccccaggccggcctgagccaggccaacttcaccctgggccccgtgagcagaagctacggcggccagtacagatgctacggcgcccacaacctgagcagcgagtggagcgcccccagcgaccccctggacatcctgatcgccggccagttctacgacagagtgagcctgagcgtgcagcccggccccaccgtggccagcggcgagaacgtgaccctgctgtgccagagccagggctggatgcagaccttcctgctgaccaaggagggcgccgccgacgacccctggagactgagaagcacctaccagagccagaagtaccaggccgagttccccatgggccccgtgaccagcgcccacgccggcacctacagatgctacggcagccagagcagcaagccctacctgctgacccaccccagcgaccccctggagctggtggtgagcggccccagcggcggccccagcagccccaccaccggccccaccagcaccagcggccccgaggaccagcccctgacccccaccggcagcgacccccagagcggcctgggcagacacctgggcgtggtgatcggcatcctggtggccgtgatcctgctgctgctgctgctgctgctgctgttcctgatcctgagacacagaagacagggcaagcactggaccagcacccagagaaaggccgacttccagcaccccgccggcgccgtgggccccgagcccaccgacagaggcctgcagtggagaagcagccccgccgccgacgcccaggaggagaacctgtacgccgccgtgaagcacacccagcccgaggacggcgtggagatggacaccagacagagcccccacgacgaggacccccaggccgtgacctacgccgaggtgaagcacagcagacccagaagagagatggccagcccccccagccccctgagcggcgagttcctggacaccaaggacagacaggccgaggaggacagacagatggacaccgaggccgccgccagcgaggccccccaggacgtgacctacgcccagctgcacagcctgaccctgagaagagaggccaccgagcccccccccagccaggagggccccagccccgccgtgcccagcatctacgccaccctggccatccactag

SEQ ID NO: 86830 - DNA, 1794 bp, synthetic construct
  misc_feature 1..1794: note = Description of Artificial Sequence: Synthetic coding sequence
  source 1..1794: mol_type = other DNA
atgacccccatcgtgaccgtgctgatctgcctgggcctgagcctgggccccagaacccacgtgcagaccggcaccatccccaagcccaccctgtgggccgagcccgacagcgtgatcacccagggcagccccgtgaccctgagctgccagggcagcctggaggcccaggagtacagactgtacagagagaagaagagcgccagctggatcaccagaatcagacccgagctggtgaagaacggccagttccacatccccagcatcacctgggagcacaccggcagatacggctgccagtactacagcagagccagatggagcgagctgagcgaccccctggtgctggtgatgaccggcgcctaccccaagcccaccctgagcgcccagcccagccccgtggtgaccagcggcggcagagtgaccctgcagtgcgagagccaggtggccttcggcggcttcatcctgtgcaaggagggcgaggaggagcacccccagtgcctgaacagccagccccacgccagaggcagcagcagagccatcttcagcgtgggccccgtgagccccaacagaagatggagccacagatgctacggctacgacctgaacagcccctacgtgtggagcagccccagcgacctgctggagctgctggtgcccggcgtgagcaagaagcccagcctgagcgtgcagcccggccccgtggtggcccccggcgagagcctgaccctgcagtgcgtgagcgacgtgggctacgacagattcgtgctgtacaaggagggcgagagagacctgagacagctgcccggcagacagccccaggccggcctgagccaggccaacttcaccctgggccccgtgagcagaagctacggcggccagtacagatgctacggcgcccacaacctgagcagcgagtgcagcgcccccagcgaccccctggacatcctgatcaccggccagatcagaggcacccccttcatcagcgtgcagcccggccccaccgtggccagcggcgagaacgtgaccctgctgtgccagagctggagacagttccacaccttcctgctgaccaaggccggcgccgccgacgcccccctgagactgagaagcatccacgagtaccccaagtaccaggccgagttccccatgagccccgtgaccagcgcccacgccggcacctacagatgctacggcagcctgaacagcgacccctacctgctgagccaccccagcgagcccctggagctggtggtgagcggccccagcatgggcagcagccccccccccaccggccccatcagcacccccggccccgaggaccagcccctgacccccaccggcagcgacccccagagcggcctgggcagacacctgggcgtggtgatcggcatcctggtggccgtggtgctgctgctgctgctgctgctgctgctgttcctgatcctgagacacagaagacagggcaagcactggaccagcacccagagaaaggccgacttccagcaccccgccggcgccgtgggccccgagcccaccgacagaggcctgcagtggagaagcagccccgccgccgacgcccaggaggagaacctgtacgccgccgtgaaggacacccagcccgaggacggcgtggagatggacaccagagccgccgccagcgaggccccccaggacgtgacctacgcccagctgcacagcctgaccctgagaagaaaggccaccgagcccccccccagccaggagagagagccccccgccgagcccagcatctacgccaccctggccatccactag

SEQ ID NO: 86831 - DNA, 1899 bp, synthetic construct
  misc_feature 1..1899: note = Description of Artificial Sequence: Synthetic coding sequence
  source 1..1899: mol_type = other DNA
atgacccccgccctgaccgccctgctgtgcctgggcctgagcctgggccccagaaccagagtgcaggccggccccttccccaagcccaccctgtgggccgagcccggcagcgtgatcagctggggcagccccgtgaccatctggtgccagggcagccaggaggcccaggagtacagactgcacaaggagggcagccccgagcccctggacagaaacaaccccctggagcccaagaacaaggccagattcagcatccccagcatgaccgagcaccacgccggcagatacagatgccactactacagcagcgccggctggagcgagcccagcgaccccctggagatggtgatgaccggcgcctacagcaagcccaccctgagcgccctgcccagccccgtggtggccagcggcggcaacatgaccctgagatgcggcagccagaagggctaccaccacttcgtgctgatgaaggagggcgagcaccagctgcccagaaccctggacagccagcagctgcacagcagaggcttccaggccctgttccccgtgggccccgtgacccccagccacagatggagattcacctgctactactactacaccaacaccccctgggtgtggagccaccccagcgaccccctggagatcctgcccagcggcgtgagcagaaagcccagcctgctgaccctgcagggccccgtgctggcccccggccagagcctgaccctgcagtgcggcagcgacgtgggctacaacagattcgtgctgtacaaggagggcgagagagacttcctgcagagacccggccagcagccccaggccggcctgagccaggccaacttcaccctgggccccgtgagccccagcaacggcggccagtacagatgctacggcgcccacaacctgagcagcgagtggagcgcccccagcgaccccctgaacatcctgatggccggccagatctacgacaccgtgagcctgagcgcccagcccggccccaccgtggccagcggcgagaacgtgaccctgctgtgccagagctggtggcagttcgacaccttcctgctgaccaaggagggcgccgcccacccccccctgagactgagaagcatgtacggcgcccacaagtaccaggccgagttccccatgagccccgtgaccagcgcccacgccggcacctacagatgctacggcagctacagcagcaacccccacctgctgagccaccccagcgagcccctggagctggtggtgagcggccacagcggcggcagcagcctgccccccaccggcccccccagcacccccggcctgggcagatacctggaggtgctgatcggcgtgagcgtggccttcgtgctgctgctgttcctgctgctgttcctgctgctgagaagacagagacacagcaagcacagaaccagcgaccagagaaagaccgacttccagagacccgccggcgccgccgagaccgagcccaaggacagaggcctgctgagaagaagcagccccgccgccgacgtgcaggaggagaacctgtacgccgccgtgaaggacacccagagcgaggacagagtggagctggacagccagcagagcccccacgacgaggacccccaggccgtgacctacgcccccgtgaagcacagcagccccagaagagagatggccagcccccccagcagcctgagcggcgagttcctggacaccaaggacagacaggtggaggaggacagacagatggacaccgaggccgccgccagcgaggccagccaggacgtgacctacgcccagctgcacagcctgaccctgagaagaaaggccaccgagcccccccccagccaggagggcgagccccccgccgagcccagcatctacgccaccctggccatccactag

SEQ ID NO: 86832 - DNA, 1344 bp, synthetic construct
  misc_feature 1..1344: note = Description of Artificial Sequence: Synthetic coding sequence
  source 1..1344: mol_type = other DNA
atgatccccaccttcaccgccctgctgtgcctgggcctgagcctgggccccagaacccacatgcaggccggccccctgcccaagcccaccctgtgggccgagcccggcagcgtgatcagctggggcaacagcgtgaccatctggtgccagggcaccctggaggccagagagtacagactggacaaggaggagagccccgccccctgggacagacagaaccccctggagcccaagaacaaggccagattcagcatccccagcatgaccgaggactacgccggcagatacagatgctactacagaagccccgtgggctggagccagcccagcgaccccctggagctggtgatgaccggcgcctacagcaagcccaccctgagcgccctgcccagccccctggtgaccagcggcaagagcgtgaccctgctgtgccagagcagaagccccatggacaccttcctgctgatcaaggagagagccgcccaccccctgctgcacctgagaagcgagcacggcgcccagcagcaccaggccgagttccccatgagccccgtgaccagcgtgcacggcggcacctacagatgcttcagcagccacggcttcagccactacctgctgagccaccccagcgaccccctggagctgatcgtgagcggcagcctggaggaccccagacccagccccaccagaagcgtgagcaccgccgccggccccgaggaccagcccctgatgcccaccggcagcgtgccccacagcggcctgagaagacactgggaggtgctgatcggcgtgctggtggtgagcatcctgctgctgagcctgctgctgttcctgctgctgcagcactggagacagggcaagcacagaaccctggcccagagacaggccgacttccagagaccccccggcgccgccgagcccgagcccaaggacggcggcctgcagagaagaagcagccccgccgccgacgtgcagggcgagaacttctgcgccgccgtgaagaacacccagcccgaggacggcgtggagatggacaccagaagcccccacgacgaggacccccaggccgtgacctacgccaaggtgaagcacagcagacccagaagagagatggccagcccccccagccccctgagcggcgagttcctggacaccaaggacagacaggccgaggaggacagacagatggacaccgaggccgccgccagcgaggccccccaggacgtgacctacgcccagctgcacagcttcaccctgagacagaaggccaccgagcccccccccagccaggagggcgccagccccgccgagcccagcgtgtacgccaccctggccatccactag

SEQ ID NO: 86833 - DNA, 1476 bp, synthetic construct
  misc_feature 1..1476: note = Description of Artificial Sequence: Synthetic coding sequence
  source 1..1476: mol_type = other DNA
atgaccctgaccctgagcgtgctgatctgcctgggcctgagcgtgggccccagaacctgcgtgcaggccggcaccctgcccaagcccaccctgtgggccgagcccgccagcgtgatcgccagaggcaagcccgtgaccctgtggtgccagggccccctggagaccgaggagtacagactggacaaggagggcctgccctgggccagaaagagacagaaccccctggagcccggcgccaaggccaagttccacatccccagcaccgtgtacgacagcgccggcagatacagatgctactacgagacccccgccggctggagcgagcccagcgaccccctggagctggtggccaccggcgtgagcagaaagcccagcctgctgatcccccagggcagcgtggtggccagaggcggcagcctgaccctgcagtgcagaagcgacgtgggctacgacatcttcgtgctgtacaaggagggcgagcacgacctggtgcagggcagcggccagcagccccaggccggcctgagccaggccaacttcaccctgggccccgtgagcagaagccacggcggccagtacagatgctacggcgcccacaacctgagccccagatggagcgcccccagcgaccccctggacatcctgatcgccggcctgatccccgacatccccgccctgagcgtgcagcccggccccaaggtggccagcggcgagaacgtgaccctgctgtgccagagctggcaccagatcgacaccttcttcctgaccaaggagggcgccgcccacccccccctgtgcctgaagagcaagtaccagagctacagacaccaggccgagttcagcatgagccccgtgaccagcgcccagggcggcacctacagatgctacagcgccatcagaagctacccctacctgctgagcagccccagctacccccaggagctggtggtgagcggccccagcggcgaccccagcctgagccccaccggcagcacccccacccccgccggccccgaggaccagcccctgacccccaccggcctggacccccagagcggcctgggcagacacctgggcgtggtgaccggcgtgagcgtggccttcgtgctgctgctgttcctgctgctgttcctgctgctgagacacagacaccagagcaagcacagaaccagcgcccacttctacagacccgccggcgccgccggccccgagcccaaggaccagggcctgcagaagagagccagccccgtggccgacatccaggaggagatcctgaacgccgccgtgaaggacacccagcccaaggacggcgtggagatggacgccagagccgccgccagcgaggccccccaggacgtgacctacgcccagctgcacagcctgaccctgagaagagaggccaccgagcccccccccagccaggagagagagccccccgccgagcccagcatctacgcccccctggccatccactag

SEQ ID NO: 86834 - DNA, 1470 bp, synthetic construct
  misc_feature 1..1470: note = Description of Artificial Sequence: Synthetic coding sequence
  source 1..1470: mol_type = other DNA
atgacccccatcgtgaccgtgctgatctgcctgagactgagcctgggccccagaacccacgtgcaggccggcaccctgcccaagcccaccctgtgggccgagcccggcagcgtgatcacccagggcagccccgtgaccctgtggtgccagggcatcctggagacccaggagtacagactgtacagagagaagaagaccgccccctggatcaccagaatcccccaggagatcgtgaagaagggccagttccccatccccagcatcacctgggagcacaccggcagatacagatgcttctacggcagccacaccgccggctggagcgagcccagcgaccccctggagctggtggtgaccggcgcctacatcaagcccaccctgagcgccctgcccagccccgtggtgaccagcggcggcaacgtgaccctgcactgcgtgagccaggtggccttcggcagcttcatcctgtgcaaggagggcgaggacgagcacccccagtgcctgaacagccagcccagaacccacggctggagcagagccatcttcagcgtgggccccgtgagccccagcagaagatggagctacagatgctacgcctacgacagcaacagcccccacgtgtggagcctgcccagcgacctgctggagctgctggtgctgggcgtgagcaagaagcccagcctgagcgtgcagcccggccccatcgtggcccccggcgagagcctgaccctgcagtgcgtgagcgacgtgagctacgacagattcgtgctgtacaaggagggcgagagagacttcctgcagctgcccggcccccagccccaggccggcctgagccaggccaacttcaccctgggccccgtgagcagaagctacggcggccagtacagatgcagcggcgcctacaacctgagcagcgagtggagcgcccccagcgaccccctggacatcctgatcgccggccagttcagaggcagacccttcatcagcgtgcaccccggccccaccgtggccagcggcgagaacgtgaccctgctgtgccagagctggggccccttccacaccttcctgctgaccaaggccggcgccgccgacgcccccctgagactgagaagcatccacgagtaccccaagtaccaggccgagttccccatgagccccgtgaccagcgcccacagcggcacctacagatgctacggcagcctgagcagcaacccctacctgctgagccaccccagcgacagcctggagctgatggtgagcggcgccgccgagaccctgagccccccccagaacaagagcgacagcaaggccggcgccgccaacaccctgagccccagccagaacaagaccgccagccacccccaggactacaccgtggagaacctgatcagaatgggcatcgccggcctggtgctggtggtgctgggcatcctgctgttcgaggcccagcacagccagagaagcctgtag

SEQ ID NO: 86835 - DNA, 1401 bp, synthetic construct
  misc_feature 1..1401: note = Description of Artificial Sequence: Synthetic coding sequence
  source 1..1401: mol_type = other DNA
atgacccccatcctgaccgtgctgatctgcctgggcctgagcctgggccccagaacccacgtgcaggccggccacctgcccaagcccaccctgtgggccgagcccggcagcgtgatcatccagggcagccccgtgaccctgagatgccagggcagcctgcaggccgaggagtaccacctgtacagagagaacaagagcgccagctgggtgagaagaatccaggagcccggcaagaacggccagttccccatccccagcatcacctgggagcacgccggcagataccactgccagtactacagccacaaccacagcagcgagtacagcgaccccctggagctggtggtgaccggcgcctacagcaagcccaccctgagcgccctgcccagccccgtggtgaccctgggcggcaacgtgaccctgcagtgcgtgagccaggtggccttcgacggcttcatcctgtgcaaggagggcgaggacgagcacccccagagactgaacagccacagccacgccagaggctggagctgggccatcttcagcgtgggccccgtgagccccagcagaagatggagctacagatgctacgcctacgacagcaacagcccctacgtgtggagcctgcccagcgacctgctggagctgctggtgcccggcgtgagcaagaagcccagcctgagcgtgcagcccggccccatggtggcccccggcgagagcctgaccctgcagtgcgtgagcgacgtgggctacgacagattcgtgctgtacaaggagggcgagagagacttcctgcagagacccggctggcagccccaggccggcctgagccaggccaacttcaccctgggccccgtgagccccagccacggcggccagtacagatgctacagcgcccacaacctgagcagcgagtggagcgcccccagcgaccccctggacatcctgatcaccggccagttctacgacagacccagcctgagcgtgcagcccgtgcccaccgtggcccccggcaagaacgtgaccctgctgtgccagagcagaggccagttccacaccttcctgctgaccaaggagggcgccggccacccccccctgcacctgagaagcgagcaccaggcccagcagaaccaggccgagttcagaatgggccccgtgaccagcgcccacgtgggcacctacagatgctacagcagcctgagcagcaacccctacctgctgagcctgcccagcgaccccctggagctggtggtgagcgccagcctgggccagcacccccaggactacaccgtggagaacctgatcagaatgggcgtggccggcctggtgctggtggtgctgggcatcctgctgttcgaggcccagcacagccagagaagcctgcaggacgccgccggcagatag

SEQ ID NO: 86836 - DNA, 1452 bp, synthetic construct
  misc_feature 1..1452: note = Description of Artificial Sequence: Synthetic coding sequence
  source 1..1452: mol_type = other DNA
atgacccccatcctgaccgtgctgatctgcctgggcctgagcctgggccccagaacccacgtgcaggccggccacctgcccaagcccaccctgtgggccgagcccggcagcgtgatcatccagggcagccccgtgaccctgagatgccagggcagcctgcaggccgaggagtaccacctgtacagagagaacaagagcgccagctgggtgagaagaatccaggagcccggcaagaacggccagttccccatccccagcatcacctgggagcacgccggcagataccactgccagtactacagccacaaccacagcagcgagtacagcgaccccctggagctggtggtgaccggcgcctacagcaagcccaccctgagcgccctgcccagccccgtggtgaccctgggcggcaacgtgaccctgcagtgcgtgagccaggtggccttcgacggcttcatcctgtgcaaggagggcgaggacgagcacccccagagactgaacagccacagccacgccagaggctggagctgggccatcttcagcgtgggccccgtgagccccagcagaagatggagctacagatgctacgcctacgacagcaacagcccctacgtgtggagcctgcccagcgacctgctggagctgctggtgcccggcgtgagcaagaagcccagcctgagcgtgcagcccggccccatggtggcccccggcgagagcctgaccctgcagtgcgtgagcgacgtgggctacgacagattcgtgctgtacaaggagggcgagagagacttcctgcagagacccggctggcagccccaggccggcctgagccaggccaacttcaccctgggccccgtgagccccagccacggcggccagtacagatgctacagcgcccacaacctgagcagcgagtggagcgcccccagcgaccccctggacatcctgatcaccggccagttctacgacagacccagcctgagcgtgcagcccgtgcccaccgtggcccccggcaagaacgtgaccctgctgtgccagagcagaggccagttccacaccttcctgctgaccaaggagggcgccggccacccccccctgcacctgagaagcgagcaccaggcccagcagaaccaggccgagttcagaatgggccccgtgaccagcgcccacgtgggcacctacagatgctacagcagcctgagcagcaacccctacctgctgagcctgcccagcgaccccctggagctggtggtgagcgaggccgccgagaccctgagccccagccagaacaagaccgacagcaccaccaccagcctgggccagcacccccaggactacaccgtggagaacctgatcagaatgggcgtggccggcctggtgctggtggtgctgggcatcctgctgttcgaggcccagcacagccagagaagcctgcaggacgccgccggcagatag

SEQ ID NO: 86837 - DNA, 1452 bp, synthetic construct; identical to SEQ ID NO: 86836
  misc_feature 1..1452: note = Description of Artificial Sequence: Synthetic coding sequence
  source 1..1452: mol_type = other DNA

SEQ ID NO: 86838 - DNA, 984 bp, synthetic construct
  misc_feature 1..984: note = Description of Artificial Sequence: Synthetic coding sequence
  source 1..984: mol_type = other DNA
atgacccccatcctgaccgtgctgatctgcctgggcctgagcctgggccccagaacccacgtgcaggccggccacctgcccaagcccaccctgtgggccgagcccggcagcgtgatcatccagggcagccccgtgaccctgagatgccagggcagcctgcaggccgaggagtaccacctgtacagagagaacaagagcgccagctgggtgagaagaatccaggagcccggcaagaacggccagttccccatccccagcatcacctgggagcacgccggcagataccactgccagtactacagccacaaccacagcagcgagtacagcgaccccctggagctggtggtgaccggcgcctacagcaagcccaccctgagcgccctgcccagccccgtggtgaccctgggcggcaacgtgaccctgcagtgcgtgagccaggtggccttcgacggcttcatcctgtgcaaggagggcgaggacgagcacccccagagactgaacagccacagccacgccagaggctggagctgggccatcttcagcgtgggccccgtgagccccagcagaagatggagctacagatgctacgcctacgacagcaacagcccctacgtgtggagcctgcccagcgacctgctggagctgctggtgcccggcgtgagcaagaagcccagcctgagcgtgcagcccggccccatggtggcccccggcgagagcctgaccctgcagtgcgtgagcgacgtgggctacgacagattcgtgctgtacaaggagggcgagagagacttcctgcagagacccggctggcagccccaggccggcctgagccaggccaacttcaccctgggccccgtgagccccagccacggcggccagtacagatgctacagcgcccacaacctgagcagcgagtggagcgcccccagcgaccccctggacatcctgatcaccggccagttctacgacagacccagcctgagctag

SEQ ID NO: 86839 - DNA, 1320 bp, synthetic construct
  misc_feature 1..1320: note = Description of Artificial Sequence: Synthetic coding sequence
  source 1..1320: mol_type = other DNA
atgacccccatcctgaccgtgctgatctgcctgggcctgagcctggaccccagaacccacgtgcaggccggccccctgcccaagcccaccctgtgggccgagcccggcagcgtgatcacccagggcagccccgtgaccctgagatgccagggcagcctggagacccaggagtaccacctgtacagagagaagaagaccgccctgtggatcaccagaatcccccaggagctggtgaagaagggccagttccccatcctgagcatcacctgggagcacgccggcagatactgctgcatctacggcagccacaccgccggcctgagcgagagcagcgaccccctggagctggtggtgaccggcgcctacagcaagcccaccctgagcgccctgcccagccccgtggtgaccagcggcggcaacgtgaccatccagtgcgacagccaggtggccttcgacggcttcatcctgtgcaaggagggcgaggacgagcacccccagtgcctgaacagccacagccacgccagaggcagcagcagagccatcttcagcgtgggccccgtgagccccagcagaagatggagctacagatgctacggctacgacagcagagccccctacgtgtggagcctgcccagcgacctgctgggcctgctggtgcccggcgtgagcaagaagcccagcctgagcgtgcagcccggccccgtggtggcccccggcgagaagctgaccttccagtgcggcagcgacgccggctacgacagattcgtgctgtacaaggagtggggcagagacttcctgcagagacccggcagacagccccaggccggcctgagccaggccaacttcaccctgggccccgtgagcagaagctacggcggccagtacacctgcagcggcgcctacaacctgagcagcgagtggagcgcccccagcgaccccctggacatcctgatcaccggccagatcagagccagacccttcctgagcgtgagacccggccccaccgtggccagcggcgagaacgtgaccctgctgtgccagagccagggcggcatgcacaccttcctgctgaccaaggagggcgccgccgacagccccctgagactgaagagcaagagacagagccacaagtaccaggccgagttccccatgagccccgtgaccagcgcccacgccggcacctacagatgctacggcagcctgagcagcaacccctacctgctgacccaccccagcgaccccctggagctggtggtgagcggcgccgccgagaccctgagccccccccagaacaagagcgacagcaaggccggcgagtag

SEQ ID NO: 86840 - DNA, 1371 bp, synthetic construct
  misc_feature 1..1371: note = Description of Artificial Sequence: Synthetic coding sequence
  source 1..1371: mol_type = other DNA
atgcacagaggcctgatccacccccagagcagcgccgtgggcggcgacgccatgacccccatcctgaccgtgctgatctgcctgggcctgagcctggaccccagaacccacgtgcaggccggccccctgcccaagcccaccctgtgggccgagcccggcagcgtgatcacccagggcagccccgtgaccctgagatgccagggcagcctggagacccaggagtaccacctgtacagagagaagaagaccgccctgtggatcaccagaatcccccaggagctggtgaagaagggccagttccccatcctgagcatcacctgggagcacgccggcagatactgctgcatctacggcagccacaccgccggcctgagcgagagcagcgaccccctggagctggtggtgaccggcgcctacagcaagcccaccctgagcgccctgcccagccccgtggtgaccagcggcggcaacgtgaccatccagtgcgacagccaggtggccttcgacggcttcatcctgtgcaaggagggcgaggacgagcacccccagtgcctgaacagccacagccacgccagaggcagcagcagagccatcttcagcgtgggccccgtgagccccagcagaagatggagctacagatgctacggctacgacagcagagccccctacgtgtggagcctgcccagcgacctgctgggcctgctggtgcccggcgtgagcaagaagcccagcctgagcgtgcagcccggccccgtggtggcccccggcgagaagctgaccttccagtgcggcagcgacgccggctacgacagattcgtgctgtacaaggagtggggcagagacttcctgcagagacccggcagacagccccaggccggcctgagccaggccaacttcaccctgggccccgtgagcagaagctacggcggccagtacacctgcagcggcgcctacaacctgagcagcgagtggagcgcccccagcgaccccctggacatcctgatcaccggccagatcagagccagacccttcctgagcgtgagacccggccccaccgtggccagcggcgagaacgtgaccctgctgtgccagagccagggcggcatgcacaccttcctgctgaccaaggagggcgccgccgacagccccctgagactgaagagcaagagacagagccacaagtaccaggccgagttccccatgagccccgtgaccagcgcccacgccggcacctacagatgctacggcagcctgagcagcaacccctacctgctgacccaccccagcgaccccctggagctggtggtgagcggcgccgccgagaccctgagccccccccagaacaagagcgacagcaaggccggcgagtag

SEQ ID NO: 86841 - DNA, 1959 bp, synthetic construct
  misc_feature 1..1959: note = Description of Artificial Sequence: Synthetic coding sequence
  source 1..1959: mol_type = other DNA
atgacccccatcctgaccgtgctgatctgcctgggcctgagcctgggccccagaacccacgtgcaggccggccacctgcccaagcccaccctgtgggccgagcccggcagcgtgatcacccagggcagccccgtgaccctgagatgccagggcggccaggagacccaggagtacagactgtacagagagaagaagaccgccctgtggatcaccagaatcccccaggagctggtgaagaagggccagttccccatccccagcatcacctgggagcacgccggcagatacagatgctactacggcagcgacaccgccggcagaagcgagagcagcgaccccctggagctggtggtgaccggcgcctacatcaagcccaccctgagcgcccagcccagccccgtggtgaacagcggcggcaacgtgatcctgcagtgcgacagccaggtggccttcgacggcttcagcctgtgcaaggagggcgaggacgagcacccccagtgcctgaacagccagccccacgccagaggcagcagcagagccatcttcagcgtgggccccgtgagccccagcagaagatggtggtacagatgctacgcctacgacagcaacagcccctacgagtggagcctgcccagcgacctgctggagctgctggtgctgggcgtgagcaagaagcccagcctgagcgtgcagcccggccccatcgtggcccccgaggagaccctgaccctgcagtgcggcagcgacgccggctacaacagattcgtgctgtacaaggacggcgagagagacttcctgcagctggccggcgcccagccccaggccggcctgagccaggccaacttcaccctgggccccgtgagcagaagctacggcggccagtacagatgctacggcgcccacaacctgagcagcgagtggagcgcccccagcgaccccctggacatcctgatcgccggccagttctacgacagagtgagcctgagcgtgcagcccggccccaccgtggccagcggcgagaacgtgaccctgctgtgccagagccagggctggatgcagaccttcctgctgaccaaggagggcgccgccgacgacccctggagactgagaagcacctaccagagccagaagtaccaggccgagttccccatgggccccgtgaccagcgcccacgccggcacctacagatgctacggcagccagagcagcaagccctacctgctgacccaccccagcgaccccctggagctggtggtgagcggccccagcggcggccccagcagccccaccaccggccccaccagcaccagcgccggccccgaggaccagcccctgacccccaccggcagcgacccccagagcggcctgggcagacacctgggcgtggtgatcggcatcctggtggccgtgatcctgctgctgctgctgctgctgctgctgttcctgatcctgagacacagaagacagggcaagcactggaccagcacccagagaaaggccgacttccagcaccccgccggcgccgtgggccccgagcccaccgacagaggcctgcagtggagaagcagccccgccgccgacgcccaggaggagaacctgtacgccgccgtgaagcacacccagcccgaggacggcgtggagatggacaccagacagagcccccacgacgaggacccccaggccgtgacctacgccgaggtgaagcacagcagacccagaagagagatggccagcccccccagccccctgagcggcgagttcctggacaccaaggacagacaggccgaggaggacagacagatggacaccgaggccgccgccagcgaggccccccaggacgtgacctacgcccagctgcacagcctgaccctgagaagagaggccaccgagcccccccccagccaggagggccccagccccgccgtgcccagcatctacgccaccctggccatccactag

SEQ ID NO: 86842 - DNA, 1953 bp, synthetic construct
  misc_feature 1..1953: note = Description of Artificial Sequence: Synthetic coding sequence
  source 1..1953: mol_type = other DNA
atgacccccatcctgaccgtgctgatctgcctgggcctgagcctgggccccagaacccacgtgcaggccggccacctgcccaagcccaccctgtgggccgagcccggcagcgtgatcacccagggcagccccgtgaccctgagatgccagggcggccaggagacccaggagtacagactgtacagagagaagaagaccgccctgtggatcaccagaatcccccaggagctggtgaagaagggccagttccccatccccagcatcacctgggagcacgccggcagatacagatgctactacggcagcgacaccgccggcagaagcgagagcagcgaccccctggagctggtggtgaccggcgcctacatcaagcccaccctgagcgcccagcccagccccgtggtgaacagcggcggcaacgtgatcctgcagtgcgacagccaggtggccttcgacggcttcagcctgtgcaaggagggcgaggacgagcacccccagtgcctgaacagccagccccacgccagaggcagcagcagagccatcttcagcgtgggccccgtgagccccagcagaagatggtggtacagatgctacgcctacgacagcaacagcccctacgagtggagcctgcccagcgacctgctggagctgctggtgctgggcgtgagcaagaagcccagcctgagcgtgcagcccggccccatcgtggcccccgaggagaccctgaccctgcagtgcggcagcgacgccggctacaacagattcgtgctgtacaaggacggcgagagagacttcctgcagctggccggcgcccagccccaggccggcctgagccaggccaacttcaccctgggccccgtgagcagaagctacggcggccagtacagatgctacggcgcccacaacctgagcagcgagtggagcgcccccagcgaccccctggacatcctgatcgccggccagttctacgacagagtgagcctgagcgtgcagcccggccccaccgtggccagcggcgagaacgtgaccctgctgtgccagagccagggctggatgcagaccttcctgctgaccaaggagggcgccgccgacgacccctggagactgagaagcacctaccagagccagaagtaccaggccgagttccccatgggccccgtgaccagcgcccacgccggcacctacagatgctacggcagccagagcagcaagccctacctgctgacccaccccagcgaccccctggagctggtggtgagcggccccagcggcggccccagcagccccaccaccggccccaccagcaccagcggccccgaggaccagcccctgacccccaccggcagcgacccccagagcggcctgggcagacacctgggcgtggtgatcggcatcctggtggccgtgatcctgctgctgctgctgctgctgctgctgttcctgatcctgagacacagaagacagggcaagcactggaccagcacccagagaaaggccgacttccagcaccccgccggcgccgtgggccccgagcccaccgacagaggcctgcagtggagaagcagccccgccgccgacgcccaggaggagaacctgtacgccgccgtgaagcacacccagcccgaggacggcgtggagatggacaccagaagcccccacgacgaggacccccaggccgtgacctacgccgaggtgaagcacagcagacccagaagagagatggccagcccccccagccccctgagcggcgagttcctggacaccaaggacagacaggccgaggaggacagacagatggacaccgaggccgccgccagcgaggccccccaggacgtgacctacgcccagctgcacagcctgaccctgagaagagaggccaccgagcccccccccagccaggagggccccagccccgccgtgcccagcatctacgccaccctggccatccactag

SEQ ID NO: 86843 - DNA, 1953 bp, synthetic construct; identical to SEQ ID NO: 86842
  misc_feature 1..1953: note = Description of Artificial Sequence: Synthetic coding sequence
  source 1..1953: mol_type = other DNA

SEQ ID NO: 86844 - DNA, 1905 bp, synthetic construct
  misc_feature 1..1905: note = Description of Artificial Sequence: Synthetic coding sequence
  source 1..1905: mol_type = other DNA
atgacccccatcctgaccgtgctgatctgcctgggcctgagcctgggccccagaacccacgtgcaggccggccacctgcccaagcccaccctgtgggccgagcccggcagcgtgatcacccagggcagccccgtgaccctgagatgccagggcggccaggagacccaggagtacagactgtacagagagaagaagaccgccctgtggatcaccagaatcccccaggagctggtgaagaagggccagttccccatccccagcatcacctgggagcacgccggcagatacagatgctactacggcagcgacaccgccggcagaagcgagagcagcgaccccctggagctggtggtgaccggcgcctacatcaagcccaccctgagcgcccagcccagccccgtggtgaacagcggcggcaacgtgatcctgcagtgcgacagccaggtggccttcgacggcttcagcctgtgcaaggagggcgaggacgagcacccccagtgcctgaacagccagccccacgccagaggcagcagcagagccatcttcagcgtgggccccgtgagccccagcagaagatggtggtacagatgctacgcctacgacagcaacagcccctacgagtggagcctgcccagcgacctgctggagctgctggtgctgggcgtgagcaagaagcccagcctgagcgtgcagcccggccccatcgtggcccccgaggagaccctgaccctgcagtgcggcagcgacgccggctacaacagattcgtgctgtacaaggacggcgagagagacttcctgcagctggccggcgcccagccccaggccggcctgagccaggccaacttcaccctgggccccgtgagcagaagctacggcggccagtacagatgctacggcgcccacaacctgagcagcgagtggagcgcccccagcgaccccctggacatcctgatcgccggccagttctacgacagagtgagcctgagcgtgcagcccggccccaccgtggccagcggcgagaacgtgaccctgctgtgccagagccagggctggatgcagaccttcctgctgaccaaggagggcgccgccgacgacccctggagactgagaagcacctaccagagccagaagtaccaggccgagttccccatgggccccgtgaccagcgcccacgccggcacctacagatgctacggcagccagagcagcaagccctacctgctgacccaccccagcgaccccctggagctggtggtgagcgccggccccgaggaccagcccctgacccccaccggcagcgacccccagagcggcctgggcagacacctgggcgtggtgatcggcatcctggtggccgtgatcctgctgctgctgctgctgctgctgctgttcctgatcctgagacacagaagacagggcaagcactggaccagcacccagagaaaggccgacttccagcaccccgccggcgccgtgggccccgagcccaccgacagaggcctgcagtggagaagcagccccgccgccgacgcccaggaggagaacctgtacgccgccgtgaagcacacccagcccgaggacggcgtggagatggacaccagaagcccccacgacgaggacccccaggccgtgacctacgccgaggtgaagcacagcagacccagaagagagatggccagcccccccagccccctgagcggcgagttcctggacaccaaggacagacaggccgaggaggacagacagatggacaccgaggccgccgccagcgaggccccccaggacgtgacctacgcccagctgcacagcctgaccctgagaagagaggccaccgagcccccccccagccaggagggccccagccccgccgtgcccagcatctacgccaccctggccatccactag

SEQ ID NO: 86845 - DNA, 1953 bp, synthetic construct; identical to SEQ ID NO: 86842
  misc_feature 1..1953: note = Description of Artificial Sequence: Synthetic coding sequence
  source 1..1953: mol_type = other DNA

SEQ ID NO: 86846 - DNA, 1533 bp, synthetic construct
  misc_feature 1..1533: note = Description of Artificial Sequence: Synthetic coding sequence
  source 1..1533: mol_type = other DNA
atgacccccatcctgaccgtgctgatctgcctgggcctgagcctgggccccagaacccacgtgcaggccggccacctgcccaagcccaccctgtgggccgagcccggcagcgtgatcacccagggcagccccgtgaccctgagatgccagggcggccaggagacccaggagtacagactgtacagagagaagaagaccgccctgtggatcaccagaatcccccaggagctggtgaagaagggccagttccccatccccagcatcacctgggagcacgccggcagatacagatgctactacggcagcgacaccgccggcagaagcgagagcagcgaccccctggagctggtggtgaccggcgcctacatcaagcccaccctgagcgcccagcccagccccgtggtgaacagcggcggcaacgtgatcctgcagtgcgacagccaggtggccttcgacggcttcagcctgtgcaaggagggcgaggacgagcacccccagtgcctgaacagccagccccacgccagaggcagcagcagagccatcttcagcgtgggccccgtgagccccagcagaagatggtggtacagatgctacgcctacgacagcaacagcccctacgagtggagcctgcccagcgacctgctggagctgctggtgctgggcgtgagcaagaagcccagcctgagcgtgcagcccggccccatcgtggcccccgaggagaccctgaccctgcagtgcggcagcgacgccggctacaacagattcgtgctgtacaaggacggcgagagagacttcctgcagctggccggcgcccagccccaggccggcctgagccaggccaacttcaccctgggccccgtgagcagaagctacggcggccagtacagatgctacggcgcccacaacctgagcagcgagtggagcgcccccagcgaccccctggacatcctgatcgccggccagttctacgacagagtgagcctgagcgtgcagcccggccccaccgtggccagcggcgagaacgtgaccctgctgtgccagagccagggctggatgcagaccttcctgctgaccaaggagggcgccgccgacgacccctggagactgagaagcacctaccagagccagaagtaccaggccgagttccccatgggccccgtgaccagcgcccacgccggcacctacagatgctacggcagccagagcagcaagccctacctgctgacccaccccagcgaccccctggagctggtggtgagcggccccagcggcggccccagcagccccaccaccggccccaccagcaccagcggccccgaggaccagcccctgacccccaccggcagcgacccccagagcggcctgggcagacacctgggcgtggtgatcggcatcctggtggccgtgatcctgctgctgctgctgctgctgctgctgttcctgatcctgagacacagaagacagggcaagcactggaccagcagccccgcccagctgcccatgcccagaaagaagaccagcatgctgccctag

SEQ ID NO: 86847 - DNA, 1797 bp, synthetic construct
  misc_feature 1..1797: note = Description of Artificial Sequence: Synthetic coding sequence
  source 1..1797: mol_type = other DNA
atgacccccatcgtgaccgtgctgatctgcctgggcctgagcctgggccccagaacccacgtgcagaccggcaccatccccaagcccaccctgtgggccgagcccgacagcgtgatcacccagggcagccccgtgaccctgagctgccagggcagcctggaggcccaggagtacagactgtacagagagaagaagagcgccagctggatcaccagaatcagacccgagctggtgaagaacggccagttccacatccccagcatcacctgggagcacaccggcagatacggctgccagtactacagcagagccagatggagcgagctgagcgaccccctggtgctggtgatgaccggcgcctaccccaagcccaccctgagcgcccagcccagccccgtggtgaccagcggcggcagagtgaccctgcagtgcgagagccaggtggccttcggcggcttcatcctgtgcaaggagggcgaggaggagcacccccagtgcctgaacagccagccccacgccagaggcagcagcagagccatcttcagcgtgggccccgtgagccccaacagaagatggagccacagatgctacggctacgacctgaacagcccctacgtgtggagcagccccagcgacctgctggagctgctggtgcccggcgtgagcaagaagcccagcctgagcgtgcagcccggccccgtggtggcccccggcgagagcctgaccctgcagtgcgtgagcgacgtgggctacgacagattcgtgctgtacaaggagggcgagagagacctgagacagctgcccggcagacagccccaggccggcctgagccaggccaacttcaccctgggccccgtgagcagaagctacggcggccagtacagatgctacggcgcccacaacctgagcagcgagtgcagcgcccccagcgaccccctggacatcctgatcaccggccagatcagaggcacccccttcatcagcgtgcagcccggccccaccgtggccagcggcgagaacgtgaccctgctgtgccagagctggagacagttccacaccttcctgctgaccaaggccggcgccgccgacgcccccctgagactgagaagcatccacgagtaccccaagtaccaggccgagttccccatgagccccgtgaccagcgcccacgccggcacctacagatgctacggcagcctgaacagcgacccctacctgctgagccaccccagcgagcccctggagctggtggtgagcggccccagcatgggcagcagccccccccccaccggccccatcagcacccccgccggccccgaggaccagcccctgacccccaccggcagcgacccccagagcggcctgggcagacacctgggcgtggtgatcggcatcctggtggccgtggtgctgctgctgctgctgctgctgctgctgttcctgatcctgagacacagaagacagggcaagcactggaccagcacccagagaaaggccgacttccagcaccccgccggcgccgtgggccccgagcccaccgacagaggcctgcagtggagaagcagccccgccgccgacgcccaggaggagaacctgtacgccgccgtgaaggacacccagcccgaggacggcgtggagatggacaccagagccgccgccagcgaggccccccaggacgtgacctacgcccagctgcacagcctgaccctgagaagaaaggccaccgagcccccccccagccaggagagagagccccccgccgagcccagcatctacgccaccctggccatccactag

SEQ ID NO: 86848 - DNA, 1449 bp, synthetic construct
  misc_feature 1..1449: note = Description of Artificial Sequence: Synthetic coding sequence
  source 1..1449: mol_type = other DNA
atgaccggcgcctaccccaagcccaccctgagcgcccagcccagccccgtggtgaccagcggcggcagagtgaccctgcagtgcgagagccaggtggccttcggcggcttcatcctgtgcaaggagggcgaggaggagcacccccagtgcctgaacagccagccccacgccagaggcagcagcagagccatcttcagcgtgggccccgtgagccccaacagaagatggagccacagatgctacggctacgacctgaacagcccctacgtgtggagcagccccagcgacctgctggagctgctggtgcccggcgtgagcaagaagcccagcctgagcgtgcagcccggccccgtggtggcccccggcgagagcctgaccctgcagtgcgtgagcgacgtgggctacgacagattcgtgctgtacaaggagggcgagagagacctgagacagctgcccggcagacagccccaggccggcctgagccaggccaacttcaccctgggccccgtgagcagaagctacggcggccagtacagatgctacggcgcccacaacctgagcagcgagtgcagcgcccccagcgaccccctggacatcctgatcaccggccagatcagaggcacccccttcatcagcgtgcagcccggccccaccgtggccagcggcgagaacgtgaccctgctgtgccagagctggagacagttccacaccttcctgctgaccaaggccggcgccgccgacgcccccctgagactgagaagcatccacgagtaccccaagtaccaggccgagttccccatgagccccgtgaccagcgcccacgccggcacctacagatgctacggcagcctgaacagcgacccctacctgctgagccaccccagcgagcccctggagctggtggtgagcggccccagcatgggcagcagccccccccccaccggccccatcagcacccccgccggccccgaggaccagcccctgacccccaccggcagcgacccccagagcggcctgggcagacacctgggcgtggtgatcggcatcctggtggccgtggtgctgctgctgctgctgctgctgctgctgttcctgatcctgagacacagaagacagggcaagcactggaccagcacccagagaaaggccgacttccagcaccccgccggcgccgtgggccccgagcccaccgacagaggcctgcagtggagaagcagccccgccgccgacgcccaggaggagaacctgtacgccgccgtgaaggacacccagcccgaggacggcgtggagatggacaccagagccgccgccagcgaggccccccaggacgtgacctacgcccagctgcacagcctgaccctgagaagaaaggccaccgagcccccccccagccaggagagagagccccccgccgagcccagcatctacgccaccctggccatccactag

SEQ ID NO: 86849 - DNA, 1932 bp, synthetic construct
  misc_feature 1..1932: note = Description of Artificial Sequence: Synthetic coding sequence
  source 1..1932: mol_type = other DNA
atgacccccgccctgaccgccctgctgtgcctgggcctgagcctgggccccagaaccagagtgcaggccggccccttccccaagcccaccctgtgggccgagcccggcagcgtgatcagctggggcagccccgtgaccatctggtgccagggcagccaggaggcccaggagtacagactgcacaaggagggcagccccgagcccctggacagaaacaaccccctggagcccaagaacaaggccagattcagcatccccagcatgaccgagcaccacgccggcagatacagatgccactactacagcagcgccggctggagcgagcccagcgaccccctggagatggtgatgaccggcgcctacagcaagcccaccctgagcgccctgcccagccccgtggtggccagcggcggcaacatgaccctgagatgcggcagccagaagggctaccaccacttcgtgctgatgaaggagggcgagcaccagctgcccagaaccctggacagccagcagctgcacagcagaggcttccaggccctgttccccgtgggccccgtgacccccagccacagatggagattcacctgctactactactacaccaacaccccctgggtgtggagccaccccagcgaccccctggagatcctgcccagcggcgtgagcagaaagcccagcctgctgaccctgcagggccccgtgctggcccccggccagagcctgaccctgcagtgcggcagcgacgtgggctacaacagattcgtgctgtacaaggagggcgagagagacttcctgcagagacccggccagcagccccaggccggcctgagccaggccaacttcaccctgggccccgtgagccccagcaacggcggccagtacagatgctacggcgcccacaacctgagcagcgagtggagcgcccccagcgaccccctgaacatcctgatggccggccagatctacgacaccgtgagcctgagcgcccagcccggccccaccgtggccagcggcgagaacgtgaccctgctgtgccagagctggtggcagttcgacaccttcctgctgaccaaggagggcgccgcccacccccccctgagactgagaagcatgtacggcgcccacaagtaccaggccgagttccccatgagccccgtgaccagcgcccacgccggcacctacagatgctacggcagctacagcagcaacccccacctgctgagccaccccagcgagcccctggagctggtggtgagcggccccgaggaccagcccctgaacccccccggcagcggcccccagaacccccccggcctgggcagcggcgccggcaccagagccgccggcctgggcagatacctggaggtgctgatcggcgtgagcgtggccttcgtgctgctgctgttcctgctgctgttcctgctgctgagaagacagagacacagcaagcacagaaccagcgaccagagaaagaccgacttccagagacccgccggcgccgccgagaccgagcccaaggacagaggcctgctgagaagaagcagccccgccgccgacgtgcaggaggagaacctgtacgccgccgtgaaggacacccagagcgaggacagagtggagctggacagccagagcccccacgacgaggacccccaggccgtgacctacgcccccgtgaagcacagcagccccagaagagagatggccagcccccccagcagcctgagcggcgagttcctggacaccaaggacagacaggtggaggaggacagacagatggacaccgaggccgccgccagcgaggccagccaggacgtgacctacgcccagctgcacagcctgaccctgagaagaaaggccaccgagcccccccccagccaggagggcgagccccccgccgagcccagcatctacgccaccctggccatccactag

SEQ ID NO: 86850 - DNA, 1896 bp, synthetic construct
  misc_feature 1..1896: note = Description of Artificial Sequence: Synthetic coding sequence
  source 1..1896: mol_type = other DNA
atgacccccgccctgaccgccctgctgtgcctgggcctgagcctgggccccagaaccagagtgcaggccggccccttccccaagcccaccctgtgggccgagcccggcagcgtgatcagctggggcagccccgtgaccatctggtgccagggcagccaggaggcccaggagtacagactgcacaaggagggcagccccgagcccctggacagaaacaaccccctggagcccaagaacaaggccagattcagcatccccagcatgaccgagcaccacgccggcagatacagatgccactactacagcagcgccggctggagcgagcccagcgaccccctggagatggtgatgaccggcgcctacagcaagcccaccctgagcgccctgcccagccccgtggtggccagcggcggcaacatgaccctgagatgcggcagccagaagggctaccaccacttcgtgctgatgaaggagggcgagcaccagctgcccagaaccctggacagccagcagctgcacagcagaggcttccaggccctgttccccgtgggccccgtgacccccagccacagatggagattcacctgctactactactacaccaacaccccctgggtgtggagccaccccagcgaccccctggagatcctgcccagcggcgtgagcagaaagcccagcctgctgaccctgcagggccccgtgctggcccccggccagagcctgaccctgcagtgcggcagcgacgtgggctacaacagattcgtgctgtacaaggagggcgagagagacttcctgcagagacccggccagcagccccaggccggcctgagccaggccaacttcaccctgggccccgtgagccccagcaacggcggccagtacagatgctacggcgcccacaacctgagcagcgagtggagcgcccccagcgaccccctgaacatcctgatggccggccagatctacgacaccgtgagcctgagcgcccagcccggccccaccgtggccagcggcgagaacgtgaccctgctgtgccagagctggtggcagttcgacaccttcctgctgaccaaggagggcgccgcccacccccccctgagactgagaagcatgtacggcgcccacaagtaccaggccgagttccccatgagccccgtgaccagcgcccacgccggcacctacagatgctacggcagctacagcagcaacccccacctgctgagccaccccagcgagcccctggagctggtggtgagcggccacagcggcggcagcagcctgccccccaccggcccccccagcacccccggcctgggcagatacctggaggtgctgatcggcgtgagcgtggccttcgtgctgctgctgttcctgctgctgttcctgctgctgagaagacagagacacagcaagcacagaaccagcgaccagagaaagaccgacttccagagacccgccggcgccgccgagaccgagcccaaggacagaggcctgctgagaagaagcagccccgccgccgacgtgcaggaggagaacctgtacgccgccgtgaaggacacccagagcgaggacagagtggagctggacagccagagcccccacgacgaggacccccaggccgtgacctacgcccccgtgaagcacagcagccccagaagagagatggccagcccccccagcagcctgagcggcgagttcctggacaccaaggacagacaggtggaggaggacagacagatggacaccgaggccgccgccagcgaggccagccaggacgtgacctacgcccagctgcacagcctgaccctgagaagaaaggccaccgagcccccccccagccaggagggcgagccccccgccgagcccagcatctacgccaccctggccatccactag

SEQ ID NO: 86851 - DNA, 1947 bp, synthetic construct
  misc_feature 1..1947: note = Description of Artificial Sequence: Synthetic coding sequence
  source 1..1947: mol_type = other DNA
atgacccccgccctgaccgccctgctgtgcctgggcctgagcctgggccccagaaccagagtgcaggccggccccttccccaagcccaccctgtgggccgagcccggcagcgtgatcagctggggcagccccgtgaccatctggtgccagggcagcctggaggcccaggagtaccagctggacaaggagggcagccccgagcccctggacagaaacaaccccctggagcccaagaacaaggccagattcagcatccccagcatgacccagcaccacgccggcagatacagatgccactactacagcagcgccggctggagcgagcccagcgaccccctggagctggtgatgaccggcgcctacagcaagcccaccctgagcgccctgcccagccccgtggtggccagcggcggcaacatgaccctgagatgcggcagccagaagggctaccaccacttcgtgctgatgaaggagggcgagcaccagctgcccagaaccctggacagccagcagctgcacagcagaggcttccaggccctgttccccgtgggccccgtgacccccagccacagatggagattcacctgctactactactacaccaacaccccctgggtgtggagccaccccagcgaccccctggagatcctgcccagcggcgtgagcagaaagcccagcctgctgaccctgcagggccccgtgctggcccccggccagagcctgaccctgcagtgcggcagcgacgtgggctacaacagattcgtgctgtacaaggagggcgagagagacttcctgcagagacccggccagcagccccaggccggcctgagccaggccaacttcaccctgggccccgtgagccccagcaacggcggccagtacagatgctacggcgcccacaacctgagcagcgagtggagcgcccccagcgaccccctgaacatcctgatggccggccagatctacgacaccgtgagcctgagcgcccagcccggccccaccgtggccagcggcgagaacgtgaccctgctgtgccagagctggtggcagttcgacaccttcctgctgaccaaggagggcgccgcccacccccccctgagactgagaagcatgtacggcgcccacaagtaccaggccgagttccccatgagccccgtgaccagcgcccacgccggcacctacagatgctacggcagctacagcagcaacccccacctgctgagccaccccagcgagcccctggagctggtggtgagcggccacagcggcggcagcagcctgccccccaccggcccccccagcacccccggcggccccgaggaccagcccctgaacccccccggcagcggcccccagaacagactgggcagatacctggaggtgctgatcggcgtgagcgtggccttcgtgctgctgctgttcctgctgctgttcctgctgctgagaagacagagacacagcaagcacagaaccagcgaccagagaaagaccgacttccagagacccgccggcgccgccgagaccgagcccaaggacagaggcctgctgagaagaagcagccccgccgccgacgtgcaggaggagaacctgtacgccgccgtgaaggacacccagagcgaggacagagtggagctggacagccagagcccccacgacgaggacccccaggccgtgacctacgcccccgtgaagcacagcagccccagaagagagatggccagcccccccagcagcctgagcggcgagttcctggacaccaaggacagacaggtggaggaggacagacagatggacaccgaggccgccgccagcgaggccagccaggacgtgacctacgcccagctgcacagcctgaccctgagaagaaaggccaccgagcccccccccagccaggagggcgagccccccgccgagcccagcatctacgccaccctggccatccactag

SEQ ID NO: 86852 - DNA, 1896 bp, synthetic construct; identical to SEQ ID NO: 86850
  misc_feature 1..1896: note = Description of Artificial Sequence: Synthetic coding sequence
  source 1..1896: mol_type = other DNA

SEQ ID NO: 86853 - DNA, 477 bp, synthetic construct
  misc_feature 1..477: note = Description of Artificial Sequence: Synthetic coding sequence
  source 1..477: mol_type = other DNA
atgacccccgccctgaccgccctgctgtgcctgggcctgagcctgggccccagaaccagagtgcaggccggccccttccccaagcccaccctgtgggccgagcccggcagcgtgatcagctggggcagccccgtgaccatctggtgccagggcagccaggaggcccaggagtacagactgcacaaggagggcagccccgagcccctggacagaaacaaccccctggagcccaagaacaaggccagattcagcatccccagcatgaccgagcaccacgccggcagatacagatgccactactacagcagcgccggctggagcgagcccagcgaccccctggagatggtgatgaccggcgcctacagcaagcccaccctgagcgccctgcccagccccgtggtggccagcggcggcaacatgaccctgagatgcggcagccagaagggctaccaccacttcgtgctgatgaaggagtag

SEQ ID NO: 86854 - DNA, 1347 bp, synthetic construct
  misc_feature 1..1347: note = Description of Artificial Sequence: Synthetic coding sequence
  source 1..1347: mol_type = other DNA
atgatccccaccttcaccgccctgctgtgcctgggcctgagcctgggccccagaacccacatgcaggccggccccctgcccaagcccaccctgtgggccgagcccggcagcgtgatcagctggggcaacagcgtgaccatctggtgccagggcaccctggaggccagagagtacagactggacaaggaggagagccccgccccctgggacagacagaaccccctggagcccaagaacaaggccagattcagcatccccagcatgaccgaggactacgccggcagatacagatgctactacagaagccccgtgggctggagccagcccagcgaccccctggagctggtgatgaccggcgcctacagcaagcccaccctgagcgccctgcccagccccctggtgaccagcggcaagagcgtgaccctgctgtgccagagcagaagccccatggacaccttcctgctgatcaaggagagagccgcccaccccctgctgcacctgagaagcgagcacggcgcccagcagcaccaggccgagttccccatgagccccgtgaccagcgtgcacggcggcacctacagatgcttcagcagccacggcttcagccactacctgctgagccaccccagcgaccccctggagctgatcgtgagcggcagcctggaggaccccagacccagccccaccagaagcgtgagcaccgccgccggccccgaggaccagcccctgatgcccaccggcagcgtgccccacagcggcctgagaagacactgggaggtgctgatcggcgtgctggtggtgagcatcctgctgctgagcctgctgctgttcctgctgctgcagcactggagacagggcaagcacagaaccctggcccagagacaggccgacttccagagaccccccggcgccgccgagcccgagcccaaggacggcggcctgcagagaagaagcagccccgccgccgacgtgcagggcgagaacttctgcgccgccgtgaagaacacccagcccgaggacggcgtggagatggacaccagacagagcccccacgacgaggacccccaggccgtgacctacgccaaggtgaagcacagcagacccagaagagagatggccagcccccccagccccctgagcggcgagttcctggacaccaaggacagacaggccgaggaggacagacagatggacaccgaggccgccgccagcgaggccccccaggacgtgacctacgcccagctgcacagcttcaccctgagacagaaggccaccgagcccccccccagccaggagggcgccagccccgccgagcccagcgtgtacgccaccctggccatccactag

SEQ ID NO: 86855 - DNA, 1347 bp, synthetic construct; identical to SEQ ID NO: 86854
  misc_feature 1..1347: note = Description of Artificial Sequence: Synthetic coding sequence
  source 1..1347: mol_type = other DNA

SEQ ID NO: 86856 - DNA, 1773 bp, synthetic construct
  misc_feature 1..1773: note = Description of Artificial Sequence: Synthetic coding sequence
  source 1..1773: mol_type = other DNA
atgaccctgaccctgagcgtgctgatctgcctgggcctgagcgtgggccccagaacctgcgtgcaggccggcaccctgcccaagcccaccctgtgggccgagcccgccagcgtgatcgccagaggcaagcccgtgaccctgtggtgccagggccccctggagaccgaggagtacagactggacaaggagggcctgccctgggccagaaagagacagaaccccctggagcccggcgccaaggccaagttccacatccccagcaccgtgtacgacagcgccggcagatacagatgctactacgagacccccgccggctggagcgagcccagcgaccccctggagctggtggccaccggcttctacgccgagcccaccctgctggccctgcccagccccgtggtggccagcggcggcaacgtgaccctgcagtgcgacaccctggacggcctgctgaccttcgtgctggtggaggaggagcagaagctgcccagaaccctgtacagccagaagctgcccaagggccccagccaggccctgttccccgtgggccccgtgacccccagctgcagatggagattcagatgctactactactacagaaagaacccccaggtgtggagcaaccccagcgacctgctggagatcctggtgcccggcgtgagcagaaagcccagcctgctgatcccccagggcagcgtggtggccagaggcggcagcctgaccctgcagtgcagaagcgacgtgggctacgacatcttcgtgctgtacaaggagggcgagcacgacctggtgcagggcagcggccagcagccccaggccggcctgagccaggccaacttcaccctgggccccgtgagcagaagccacggcggccagtacagatgctacggcgcccacaacctgagccccagatggagcgcccccagcgaccccctggacatcctgatcgccggcctgatccccgacatccccgccctgagcgtgcagcccggccccaaggtggccagcggcgagaacgtgaccctgctgtgccagagctggcaccagatcgacaccttcttcctgaccaaggagggcgccgcccacccccccctgtgcctgaagagcaagtaccagagctacagacaccaggccgagttcagcatgagccccgtgaccagcgcccagggcggcacctacagatgctacagcgccatcagaagctacccctacctgctgagcagccccagctacccccaggagctggtggtgagcggccccagcggcgaccccagcctgagccccaccggcagcacccccacccccggccccgaggaccagcccctgacccccaccggcctggacccccagagcggcctgggcagacacctgggcgtggtgaccggcgtgagcgtggccttcgtgctgctgctgttcctgctgctgttcctgctgctgagacacagacaccagagcaagcacagaaccagcgcccacttctacagacccgccggcgccgccggccccgagcccaaggaccagggcctgcagaagagagccagccccgtggccgacatccaggaggagatcctgaacgccgccgtgaaggacacccagcccaaggacggcgtggagatggacgccagagccgccgccagcgaggccccccaggacgtgacctacgcccagctgcacagcctgaccctgagaagagaggccaccgagcccccccccagccaggagagagagccccccgccgagcccagcatctacgcccccctggccatccactag

SEQ ID NO: 86857 - DNA, 1776 bp, synthetic construct
  misc_feature 1..1776: note = Description of Artificial Sequence: Synthetic coding sequence
  source 1..1776: mol_type = other DNA
atgaccctgaccctgagcgtgctgatctgcctgggcctgagcgtgggccccagaacctgcgtgcaggccggcaccctgcccaagcccaccctgtgggccgagcccgccagcgtgatcgccagaggcaagcccgtgaccctgtggtgccagggccccctggagaccgaggagtacagactggacaaggagggcctgccctgggccagaaagagacagaaccccctggagcccggcgccaaggccaagttccacatccccagcaccgtgtacgacagcgccggcagatacagatgctactacgagacccccgccggctggagcgagcccagcgaccccctggagctggtggccaccggcttctacgccgagcccaccctgctggccctgcccagccccgtggtggccagcggcggcaacgtgaccctgcagtgcgacaccctggacggcctgctgaccttcgtgctggtggaggaggagcagaagctgcccagaaccctgtacagccagaagctgcccaagggccccagccaggccctgttccccgtgggccccgtgacccccagctgcagatggagattcagatgctactactactacagaaagaacccccaggtgtggagcaaccccagcgacctgctggagatcctggtgcccggcgtgagcagaaagcccagcctgctgatcccccagggcagcgtggtggccagaggcggcagcctgaccctgcagtgcagaagcgacgtgggctacgacatcttcgtgctgtacaaggagggcgagcacgacctggtgcagggcagcggccagcagccccaggccggcctgagccaggccaacttcaccctgggccccgtgagcagaagccacggcggccagtacagatgctacggcgcccacaacctgagccccagatggagcgcccccagcgaccccctggacatcctgatcgccggcctgatccccgacatccccgccctgagcgtgcagcccggccccaaggtggccagcggcgagaacgtgaccctgctgtgccagagctggcaccagatcgacaccttcttcctgaccaaggagggcgccgcccacccccccctgtgcctgaagagcaagtaccagagctacagacaccaggccgagttcagcatgagccccgtgaccagcgcccagggcggcacctacagatgctacagcgccatcagaagctacccctacctgctgagcagccccagctacccccaggagctggtggtgagcggccccagcggcgaccccagcctgagccccaccggcagcacccccacccccgccggccccgaggaccagcccctgacccccaccggcctggacccccagagcggcctgggcagacacctgggcgtggtgaccggcgtgagcgtggccttcgtgctgctgctgttcctgctgctgttcctgctgctgagacacagacaccagagcaagcacagaaccagcgcccacttctacagacccgccggcgccgccggccccgagcccaaggaccagggcctgcagaagagagccagccccgtggccgacatccaggaggagatcctgaacgccgccgtgaaggacacccagcccaaggacggcgtggagatggacgccagagccgccgccagcgaggccccccaggacgtgacctacgcccagctgcacagcctgaccctgagaagagaggccaccgagcccccccccagccaggagagagagccccccgccgagcccagcatctacgcccccctggccatccactag

SEQ ID NO: 86858 - DNA, 1869 bp, synthetic construct
  misc_feature 1..1869: note = Description of Artificial Sequence: Synthetic coding sequence
  source 1..1869: mol_type = other DNA
atgaccctgaccctgagcgtgctgatctgcctgggcctgagcgtgggccccagaacctgcgtgcaggccggcaccctgcccaagcccaccctgtgggccgagcccgccagcgtgatcgccagaggcaagcccgtgaccctgtggtgccagggccccctggagaccgaggagtacagactggacaaggagggcctgccctgggccagaaagagacagaaccccctggagcccggcgccaaggccaagttccacatccccagcaccgtgtacgacagcgccggcagatacagatgctactacgagacccccgccggctggagcgagcccagcgaccccctggagctggtggccaccgccctgcccagccccgtggtggccagcggcggcaacgtgaccctgcagtgcgacaccctggacggcctgctgaccttcgtgctggtggaggaggagcagaagctgcccagaaccctgtacagccagaagctgcccaagggccccagccaggccctgttccccgtgggccccgtgacccccagctgcagatggagattcagatgctactactactacagaaagaacccccaggtgtggagcaaccccagcgacctgctggagatcctggtgcccggcgtgagcagaaagcccagcctgctgatcccccagggcagcgtggtggccagaggcggcagcctgaccctgcagtgcagaagcgacgtgggctacgacatcttcgtgctgtacaaggagggcgagcacgacctggtgcagggcagcggccagcagccccaggccggcctgagccaggccaacttcaccctgggccccgtgagcagaagccacggcggccagtacagatgctacggcgcccacaacctgagccccagatggagcgcccccagcgaccccctggacatcctgatcgccggcctgatccccgacatccccgccctgagcgtgcagcccggccccaaggtggccagcggcgagaacgtgaccctgctgtgccagagctggcaccagatcgacaccttcttcctgaccaaggagggcgccgcccacccccccctgtgcctgaagagcaagtaccagagctacagacaccaggccgagttcagcatgagccccgtgaccagcgcccagggcggcacctacagatgctacagcgccatcagaagctacccctacctgctgagcagccccagctacccccaggagctggtggtgagcggccccagcggcgaccccagcctgagccccaccggcagcacccccacccccgccggccccgaggaccagcccctgacccccaccggcctggacccccagagcggcctgggcagacacctgggcgtggtgaccggcgtgagcgtggccttcgtgctgctgctgttcctgctgctgttcctgctgctgagacacagacaccagagcaagcacagaaccagcgcccacttctacagacccgccggcgccgccggccccgagcccaaggaccagggcctgcagaagagagccagccccgtggccgacatccaggaggagatcctgaacgccgccgtgaaggacacccagcccaaggacggcgtggagatggacgccagacagagcccccacgacgaggacccccaggccgtgacctacgccgaggtgaagcacagcagacccagaagagagatggccagcccccccagccccctgagcggcgagttcctggacaccaaggacagacaggccgaggaggacagacagatggacaccgagagagtgctgagcagccccggcccccaggccagcccccccccccccagaagcctgcccctgaccctgcccagatgcagactgctgcacctgaagccccccagaatgtag

SEQ ID NO: 86859 - DNA, 2595 bp, synthetic construct
  misc_feature 1..2595: note = Description of Artificial Sequence: Synthetic coding sequence
  source 1..2595: mol_type = other DNA
atgggctgctggggccagctgctggtgtggttcggcgccgccggcgccatcctgtgcagcagccccggcagccaggagaccttcctgagaagcagccccctgcccctggccagccccagccccagagaccccaaggtgagcgccccccccagcatcctggagcccgccagccccctgaacagccccggcaccgagggcagctggctgttcagcacctgcggcgccagcggcagacacggccccacccagacccagtgcgacggcgcctacgccggcaccagcgtggtggtgaccgtgggcgccgccggccagctgagaggcgtgcagctgtggagagtgcccggccccggccagtacctgatcagcgcctacggcgccgccggcggcaagggcgccaagaaccacctgagcagagcccacggcgtgttcgtgagcgccatcttcagcctgggcctgggcgagagcctgtacatcctggtgggccagcagggcgaggacgcctgccccggcggcagccccgagagccagctggtgtgcctgggcgagagcagagccgtggaggagcacgccgccatggacggcagcgagggcgtgcccggcagcagaagatgggccggcggcggcggcggcggcggcggcgccacctacgtgttcagagtgagagccggcgagctggagcccctgctggtggccgccggcggcggcggcagagcctacctgagacccagagacagaggcagaacccaggccagccccgagaagctggagaacagaagcgaggcccccggcagcggcggcagaggcggcgccgccggcggcggcggcggctggaccagcagagcccccagcccccaggccggcagaagcctgcaggagggcgccgagggcggccagggctgcagcgaggcctgggccaccctgggctgggccgccgccggcggcttcggcggcggcggcggcgcctgcaccgccggcggcggcggcggcggctacagaggcggcgacgccagcgagaccgacaacctgtgggccgacggcgaggacggcgtgagcttcatccaccccagcagcgagctgttcctgcagcccctggccgtgaccgagaaccacggcgaggtggagatcagaagacacctgaactgcagccactgccccctgagagactgccagtggcaggccgagctgcagctggccgagtgcctgtgccccgagggcatggagctggccgtggacaacgtgacctgcatggacctgcacaagccccccggccccctggtgctgatggtggccgtggtggccaccagcaccctgagcctgctgatggtgtgcggcgtgctgatcctggtgaagcagaagaagtggcagggcctgcaggagatgagactgcccagccccgagctggagctgagcaagctgagaaccagcgccatcagaaccgcccccaacccctactactgccaggtgggcctgggccccgcccagagctggcccctgccccccggcgtgaccgaggtgagccccgccaacgtgaccctgctgagagccctgggccacggcgccttcggcgaggtgtacgagggcctggtgatcggcctgcccggcgacagcagccccctgcaggtggccatcaagaccctgcccgagctgtgcagcccccaggacgagctggacttcctgatggaggccctgatcatcagcaagttcagacaccagaacatcgtgagatgcgtgggcctgagcctgagagccacccccagactgatcctgctggagctgatgagcggcggcgacatgaagagcttcctgagacacagcagaccccacctgggccagcccagccccctggtgatgagagacctgctgcagctggcccaggacatcgcccagggctgccactacctggaggagaaccacttcatccacagagacatcgccgccagaaactgcctgctgagctgcgccggccccagcagagtggccaagatcggcgacttcggcatggccagagacatctacagagccagctactacagaagaggcgacagagccctgctgcccgtgaagtggatgccccccgaggccttcctggagggcatcttcaccagcaagaccgacagctggagcttcggcgtgctgctgtgggagatcttcagcctgggctacatgccctaccccggcagaaccaaccaggaggtgctggacttcgtggtgggcggcggcagaatggacccccccagaggctgccccggccccgtgtacagaatcatgacccagtgctggcagcacgagcccgagctgagacccagcttcgccagcatcctggagagactgcagtactgcacccaggaccccgacgtgctgaacagcctgctgcccatggagctgggccccacccccgaggaggagggcaccagcggcctgggcaacagaagcctggagtgcctgagacccccccagccccaggagctgagccccgagaagctgaagagctggggcggcagccccctgggcccctggctgagcagcggcctgaagcccctgaagagcagaggcctgcagccccagaacctgtggaaccccacctacagaagctag

SEQ ID NO: 86860 - DNA, 2412 bp, synthetic construct
  misc_feature 1..2412: note = Description of Artificial Sequence: Synthetic coding sequence
  source 1..2412: mol_type = other DNA
atgggctgctggggccagctgctggtgtggttcggcgccgccggcgccatcctgtgcagcagccccggcagccaggagaccttcctgagaagcagccccctgcccctggccagccccagccccagagaccccaaggtgagcgccccccccagcatcctggagcccgccagccccctgaacagccccggcaccgagggcagctggctgttcagcacctgcggcgccagcggcagacacggccccacccagacccagtgcgacggcgcctacgccggcaccagcgtggtggtgaccgtgggcgccgccggccagctgagaggcgtgcagctgtggagagtgcccggccccggccagtacctgatcagcgcctacggcgccgccggcggcaagggcgccaagaaccacctgagcagagcccacggcgtgttcgtgagcgccatcttcagcctgggcctgggcgagagcctgtacatcctggtgggccagcagggcgaggacgcctgccccggcggcagccccgagagccagctggtgtgcctgggcgagagcagagccgtggaggagcacgccgccatggacggcagcgagggcgtgcccggcagcagaagatgggccggcggcggcggcggcggcggcggcgccacctacgtgttcagagtgagagccggcgagctggagcccctgctggtggccgccggcggcggcggcagagcctacctgagacccagagacagaggcagaacccaggccagccccgagaagctggagaacagaagcgaggcccccggcagcggcggcagaggcggcgccgccggcggcgacgccagcgagaccgacaacctgtgggccgacggcgaggacggcgtgagcttcatccaccccagcagcgagctgttcctgcagcccctggccgtgaccgagaaccacggcgaggtggagatcagaagacacctgaactgcagccactgccccctgagagactgccagtggcaggccgagctgcagctggccgagtgcctgtgccccgagggcatggagctggccgtggacaacgtgacctgcatggacctgcacaagccccccggccccctggtgctgatggtggccgtggtggccaccagcaccctgagcctgctgatggtgtgcggcgtgctgatcctggtgaagcagaagaagtggcagggcctgcaggagatgagactgcccagccccgagctggagctgagcaagctgagaaccagcgccatcagaaccgcccccaacccctactactgccaggtgggcctgggccccgcccagagctggcccctgccccccggcgtgaccgaggtgagccccgccaacgtgaccctgctgagagccctgggccacggcgccttcggcgaggtgtacgagggcctggtgatcggcctgcccggcgacagcagccccctgcaggtggccatcaagaccctgcccgagctgtgcagcccccaggacgagctggacttcctgatggaggccctgatcatcagcaagttcagacaccagaacatcgtgagatgcgtgggcctgagcctgagagccacccccagactgatcctgctggagctgatgagcggcggcgacatgaagagcttcctgagacacagcagaccccacctgggccagcccagccccctggtgatgagagacctgctgcagctggcccaggacatcgcccagggctgccactacctggaggagaaccacttcatccacagagacatcgccgccagaaactgcctgctgagctgcgccggccccagcagagtggccaagatcggcgacttcggcatggccagagacatctacagagccagctactacagaagaggcgacagagccctgctgcccgtgaagtggatgccccccgaggccttcctggagggcatcttcaccagcaagaccgacagctggagcttcggcgtgctgctgtgggagatcttcagcctgggctacatgccctaccccggcagaaccaaccaggaggtgctggacttcgtggtgggcggcggcagaatggacccccccagaggctgccccggccccgtgtacagaatcatgacccagtgctggcagcacgagcccgagctgagacccagcttcgccagcatcctggagagactgcagtactgcacccaggaccccgacgtgctgaacagcctgctgcccatggagctgggccccacccccgaggaggagggcaccagcggcctgggcaacagaagcctggagtgcctgagacccccccagccccaggagctgagccccgagaagctgaagagctggggcggcagccccctgggcccctggctgagcagcggcctgaagcccctgaagagcagaggcctgcagccccagaacctgtggaaccccacctacagaagctag

SEQ ID NO: 86861 - DNA, 1437 bp, synthetic construct
  misc_feature 1..1437: note = Description of Artificial Sequence: Synthetic coding sequence
  source 1..1437: mol_type = other DNA
atgggctgctggggccagctgctggtgtggttcggcgccgccggcgccatcctgtgcagcagccccggcagccaggagaccttcctgagaagcagccccctgcccctggccagccccagccccagagaccccaaggtgagcgccccccccagcatcctggagcccgccagccccctgaacagccccggcaccgagggcagctggctgttcagcacctgcggcgccagcggcagacacggccccacccagacccagtgcgacggcgcctacgccggcaccagcgtggtggtgaccgtgggcgccgccggccagctgagaggcgtgcagctgtggagagtgcccggccccggccagtacctgatcagcgcctacggcgccgccggcggcaagggcgccaagaaccacctgagcagagcccacggcgtgttcgtgagcgccatcttcagcctgggcctgggcgagagcctgtacatcctggtgggccagcagggcgaggacgcctgccccggcggcagccccgagagccagctggtgtgcctgggcgagagcagagccgtggaggagcacgccgccatggacggcagcgagggcgtgcccggcagcagaagatgggccggcggcggcggcggcggcggcggcgccacctacgtgttcagagtgagagccggcgagctggagcccctgctggtggccgccggcggcggcggcagagcctacctgagacccagagacagaggcagaacccaggccagccccgagaagctggagaacagaagcgaggcccccggcagcggcggcagaggcggcgccgccggcggcggcggcggctggaccagcagagcccccagcccccaggccggcagaagcctgcaggagggcgccgagggcggccagggctgcagcgaggcctgggccaccctgggctgggccgccgccggcggcttcggcggcggcggcggcgcctgcaccgccggcggcggcggcggcggctacagaggcggcgacgccagcgagaccgacaacctgtgggccgacggcgaggacggcgtgagcttcatccaccccagcagcgagctgttcctgcagcccctggccgtgaccgagaaccacggcgaggtggagatcagaagacacctgaactgcagccactgccccctgagagactgccagtggcaggccgagctgcagctggccgagtgcctgtgccccgagggcatggagctggccgtggacaacgtgacctgcatggacctgcacaagccccccggccccctggtgctgatggtggccgtggtggccaccagcaccctgagcctgctgatggtgtgcggcgtgctgatcctgggcaccaagagactggccggcaccgtggacagcagactgctgctgagcagcgagctgggctgggtgagcgccggcggcggcagaagaagatag

SEQ ID NO: 86862 - DNA, 2205 bp, synthetic construct
  misc_feature 1..2205: note = Description of Artificial Sequence: Synthetic coding sequence
  source 1..2205: mol_type = other DNA
atgggctgctggggccagctgctggtgtggttcggcgccgccggcgccatcctgtgcagcagccccggcagccaggagaccttcctgagaagcagccccctgcccctggccagccccagccccagagaccccaaggtgagcgccccccccagcatcctggagcccgccagccccctgaacagccccggcaccgagggcagctggctgttcagcacctgcggcgccagcggcagacacggccccacccagacccagtgcgacggcgcctacgccggcaccagcgtggtggtgaccgtgggcgccgccggccagctgagaggcgtgcagctgtggagagtgcccggccccggccagtacctgatcagcgcctacggcgccgccggcggcaagggcgccaagaaccacctgagcagagcccacggcgtgttcgtgagcgccatcttcagcctgggcctgggcgagagcctgtacatcctggtgggccagcagggcgaggacgcctgccccggcggcagccccgagagccagctggtgtgcctgggcgagagcagagccgtggaggagcacgccgccatggacggcagcgagggcgtgcccggcagcagaagatgggccggcggcggcggcggcggcggcggcgccacctacgtgttcagagtgagagccggcgagctggagcccctgctggtggccgccggcggcggcggcagagcctacctgagacccagagacagaggcagaacccaggccagccccgagaagctggagaacagaagcgaggcccccggcagcggcggcagaggcggcgccgccggcggcgacgccagcgagaccgacaacctgtgggccgacggcgaggacggcgtgagcttcatccaccccagcagcgagctgttcctgcagcccctggccgtgaccgagaaccacggcgaggtggagatcagaagacacctgaactgcagccactgccccctgagagactgccagtggcaggccgagctgcagctggccgagtgcctgtgccccgagggcatggagctggccgtggacaacgtgacctgcatggacctgcacaagccccccggccccctggtgctgatggtggccgtggtggccaccagcaccctgagcctgctgatggtgtgcggcgtgctgatcctgggcggcgcctggcccggccccgtgctggccagcgccaccagatgccacagaggcttccccagccagtgctacagcgcccagaccctgcccgagctgtgcagcccccaggacgagctggacttcctgatggaggccctgatcatcagcaagttcagacaccagaacatcgtgagatgcgtgggcctgagcctgagagccacccccagactgatcctgctggagctgatgagcggcggcgacatgaagagcttcctgagacacagcagaccccacctgggccagcccagccccctggtgatgagagacctgctgcagctggcccaggacatcgcccagggctgccactacctggaggagaaccacttcatccacagagacatcgccgccagaaactgcctgctgagctgcgccggccccagcagagtggccaagatcggcgacttcggcatggccagagacatctacagagccagctactacagaagaggcgacagagccctgctgcccgtgaagtggatgccccccgaggccttcctggagggcatcttcaccagcaagaccgacagctggagcttcggcgtgctgctgtgggagatcttcagcctgggctacatgccctaccccggcagaaccaaccaggaggtgctggacttcgtggtgggcggcggcagaatggacccccccagaggctgccccggccccgtgtacagaatcatgacccagtgctggcagcacgagcccgagctgagacccagcttcgccagcatcctggagagactgcagtactgcacccaggaccccgacgtgctgaacagcctgctgcccatggagctgggccccacccccgaggaggagggcaccagcggcctgggcaacagaagcctggagtgcctgagacccccccagccccaggagctgagccccgagaagctgaagagctggggcggcagccccctgggcccctggctgagcagcggcctgaagcccctgaagagcagaggcctgcagccccagaacctgtggaaccccacctacagaagctag

SEQ ID NO: 86863 - DNA, 180 bp, synthetic construct
  misc_feature 1..180: note = Description of Artificial Sequence: Synthetic coding sequence
  source 1..180: mol_type = other DNA
atgctgagcagaaacgacgacatctgcatctacggcggcctgggcctgggcggcctgctgctgctggccgtggtgctgctgagcgcctgcctgtgctggctgcacagaagaggccccggcctgctgagagccggcacccccctgtgcatcagcgccgaggccgccagcgcccagcagtag

SEQ ID NO: 86864 - DNA, 201 bp, synthetic construct
  misc_feature 1..201: note = Description of Artificial Sequence: Synthetic coding sequence
  source 1..201: mol_type = other DNA
atgctgagcagaaacgacgacatctgcatctacggcggcctgggcctgggcggcctgctgctgctggccgtggtgctgctgagcgcctgcctgtgctggctgcacagaagagcccccagcgtgctggtgcccggccccggcctgctgagagccggcacccccctgtgcatcagcgccgaggccgccagcgcccagcagtag

SEQ ID NO: 86865 - DNA, 222 bp, synthetic construct
  misc_feature 1..222: note = Description of Artificial Sequence: Synthetic coding sequence
  source 1..222: mol_type = other DNA
atgctgagcagaaacgacgtgaagagactggagagaagctggcacctgctgagctggagccaggcccagggcagcagcgagcaggagctgcactacgccagcctgcagagactgcccgtgcccagcagcgagggccccgacctgagaggcagagacaagagaggcaccaaggaggaccccagagccgactacgcctgcatcgccgagaacaagcccacctag

SEQ ID NO: 86866 - DNA, 201 bp, synthetic construct
  misc_feature 1..201: note = Description of Artificial Sequence: Synthetic coding sequence
  source 1..201: mol_type = other DNA
atgctgagcagaaacgacgtgaagagactggagagaagctgggcccagggcagcagcgagcaggagctgcactacgccagcctgcagagactgcccgtgcccagcagcgagggccccgacctgagaggcagagacaagagaggcaccaaggaggaccccagagccgactacgcctgcatcgccgagaacaagcccacctag

SEQ ID NO: 86867 - DNA, 108 bp, synthetic construct
  misc_feature 1..108: note = Description of Artificial Sequence: Synthetic coding sequence
  source 1..108: mol_type = other DNA
atgctgagcagaaacgacgcccccagcgtgctggtgcccggccccggcctgctgagagccggcacccccctgtgcatcagcgccgaggccgccagcgcccagcagtag

SEQ ID NO: 86868 - DNA, 315 bp, synthetic construct
  misc_feature 1..315: note = Description of Artificial Sequence: Synthetic coding sequence
  source 1..315: mol_type = other DNA
atgctgagcagaaacgacgacatctgcatctacggcggcctgggcctgggcggcctgctgctgctggccgtggtgctgctgagcgcctgcctgtgctggctgcacagaagagtgaagagactggagagaagctggcacctgctgagctggagccaggcccagggcagcagcgagcaggagctgcactacgccagcctgcagagactgcccgtgcccagcagcgagggccccgacctgagaggcagagacaagagaggcaccaaggaggaccccagagccgactacgcctgcatcgccgagaacaagcccacctag

SEQ ID NO: 86869 - DNA, 42 bp, synthetic construct
  misc_feature 1..42: note = Description of Artificial Sequence: Synthetic coding sequence
  source 1..42: mol_type = other DNA
atgctgagcagaaacgacgaggccgccagcgcccagcagtag

SEQ ID NO: 86870 - DNA, 108 bp, synthetic construct; identical to SEQ ID NO: 86867
  misc_feature 1..108: note = Description of Artificial Sequence: Synthetic coding sequence
  source 1..108: mol_type = other DNA

SEQ ID NO: 86871 - DNA, 276 bp, synthetic construct
  misc_feature 1..276: note = Description of Artificial Sequence: Synthetic coding sequence
  source 1..276: mol_type = other DNA
atgatctacgtgagcaccggcgcctggggctgggccggcagctgcttctggcagtggagcttctgcccccccgcctgcgtgggctgcatcgaggagcacctgctgagctggagccaggcccagggcagcagcgagcaggagctgcactacgccagcctgcagagactgcccgtgcccagcagcgagggccccgacctgagaggcagagacaagagaggcaccaaggaggaccccagagccgactacgcctgcatcgccgagaacaagcccacctag

SEQ ID NO: 86872 - DNA, 156 bp, synthetic construct
  misc_feature 1..156: note = Description of Artificial Sequence: Synthetic coding sequence
  source 1..156: mol_type = other DNA
atgctgagcagaaacgacgtgaagagactggagagaagctggagactgcccgtgcccagcagcgagggccccgacctgagaggcagagacaagagaggcaccaaggaggaccccagagccgactacgcctgcatcgccgagaacaagcccacctag

SEQ ID NO: 86873 - DNA, 192 bp, synthetic construct
  misc_feature 1..192: note = Description of Artificial Sequence: Synthetic coding sequence
  source 1..192: mol_type = other DNA
atgcacctgtgcagaggctgccagtgccccgccgtgagagacctgaccagcggcgccgagaccagagaggcccccagaagaatccaggagctgaccatgcccgccctgctgagaaccaacccccccgagcaccccagacacctgccccagcccagaagagtggacagagtgcccctgtggagcagccagtag

SEQ ID NO: 86874 - DNA, 222 bp, synthetic construct; identical to SEQ ID NO: 86865
  misc_feature 1..222: note = Description of Artificial Sequence: Synthetic coding sequence
  source 1..222: mol_type = other DNA

SEQ ID NO: 86875 - DNA, 108 bp, synthetic construct; identical to SEQ ID NO: 86867
  misc_feature 1..108: note = Description of Artificial Sequence: Synthetic coding sequence
  source 1..108: mol_type = other DNA

SEQ ID NO: 86876 - DNA, 201 bp, synthetic construct; identical to SEQ ID NO: 86864
  misc_feature 1..201: note = Description of Artificial Sequence: Synthetic coding sequence
  source 1..201: mol_type = other DNA

SEQ ID NO: 86877 - DNA, 315 bp, synthetic construct; identical to SEQ ID NO: 86868
  misc_feature 1..315: note = Description of Artificial Sequence: Synthetic coding sequence
  source 1..315: mol_type = other DNA

SEQ ID NO: 86878 - DNA, 135 bp, synthetic construct
  misc_feature 1..135: note = Description of Artificial Sequence: Synthetic coding sequence
  source 1..135: mol_type = other DNA
atgctgagcagaaacgacgacatctgcatctacggcggcctgggcctgggcggcctgctgctgctggccgtggtgctgctgagcgcctgcctgtgctggctgcacagaagagaggccgccagcgcccagcagtag

SEQ ID NO: 86879 - DNA, 201 bp, synthetic construct
  misc_feature 1..201: note = Description of Artificial Sequence: Synthetic coding sequence
  source 1..201: mol_type = other DNA
atgctgagcagaaacgacgacatctgcatctacggcggcctgggcctgggcggcctgctgctgctggccgtggtgctgctgagcgcctgcctgtgctggctgcacagaagagtgaagagactggagagaagctggagactgcccgtgcccagcagcgagggccccgacctgagaggcagagacaagagaggcaccaagtag

SEQ ID NO: 86880 - DNA, 201 bp, synthetic construct; identical to SEQ ID NO: 86866
  misc_feature 1..201: note = Description of Artificial Sequence: Synthetic coding sequence
  source 1..201: mol_type = other DNA

SEQ ID NO: 86881 - DNA, 294 bp, synthetic construct
  misc_feature 1..294: note = Description of Artificial Sequence: Synthetic coding sequence
  source 1..294: mol_type = other DNA
atgctgagcagaaacgacgacatctgcatctacggcggcctgggcctgggcggcctgctgctgctggccgtggtgctgctgagcgcctgcctgtgctggctgcacagaagagtgaagagactggagagaagctgggcccagggcagcagcgagcaggagctgcactacgccagcctgcagagactgcccgtgcccagcagcgagggccccgacctgagaggcagagacaagagaggcaccaaggaggaccccagagccgactacgcctgcatcgccgagaacaagcccacctag

SEQ ID NO: 86882 - DNA, 180 bp, synthetic construct; identical to SEQ ID NO: 86863
  misc_feature 1..180: note = Description of Artificial Sequence: Synthetic coding sequence
  source 1..180: mol_type = other DNA

SEQ ID NO: 86883 - DNA, 87 bp, synthetic construct
  misc_feature 1..87: note = Description of Artificial Sequence: Synthetic coding sequence
  source 1..87: mol_type = other DNA
atgctgagcagaaacgacggccccggcctgctgagagccggcacccccctgtgcatcagcgccgaggccgccagcgcccagcagtag

SEQ ID NO: 86884 - DNA, 87 bp, synthetic construct; identical to SEQ ID NO: 86883
  misc_feature 1..87: note = Description of Artificial Sequence: Synthetic coding sequence
  source 1..87: mol_type = other DNA

SEQ ID NO: 86885 - DNA, 87 bp, synthetic construct; identical to SEQ ID NO: 86883
  misc_feature 1..87: note = Description of Artificial Sequence: Synthetic coding sequence
  source 1..87: mol_type = other DNA

SEQ ID NO: 86886 - DNA, 87 bp, synthetic construct; identical to SEQ ID NO: 86883
  misc_feature 1..87: note = Description of Artificial Sequence: Synthetic coding sequence
  source 1..87: mol_type = other DNA

SEQ ID NO: 86887 - DNA, 42 bp, synthetic construct; identical to SEQ ID NO: 86869
  misc_feature 1..42: note = Description of Artificial Sequence: Synthetic coding sequence
  source 1..42: mol_type = other DNA

SEQ ID NO: 86888 - DNA, 249 bp, synthetic construct
  misc_feature 1..249: note = Description of Artificial Sequence: Synthetic coding sequence
  source 1..249: mol_type = other DNA
atgctgagcagaaacgacgacatctgcatctacggcggcctgggcctgggcggcctgctgctgctggccgtggtgctgctgagcgcctgcctgtgctggctgcacagaagagtgaagagactggagagaagctggagactgcccgtgcccagcagcgagggccccgacctgagaggcagagacaagagaggcaccaaggaggaccccagagccgactacgcctgcatcgccgagaacaagcccacctag

SEQ ID NO: 86889 - DNA, 201 bp, synthetic construct; identical to SEQ ID NO: 86866
  misc_feature 1..201: note = Description of Artificial Sequence: Synthetic coding sequence
  source 1..201: mol_type = other DNA

SEQ ID NO: 86890 - DNA, 201 bp, synthetic construct; identical to SEQ ID NO: 86866
  misc_feature 1..201: note = Description of Artificial Sequence: Synthetic coding sequence
  source 1..201: mol_type = other DNA

SEQ ID NO: 86891 - DNA, 294 bp, synthetic construct; identical to SEQ ID NO: 86881
  misc_feature 1..294: note = Description of Artificial Sequence: Synthetic coding sequence
  source 1..294: mol_type = other DNA

SEQ ID NO: 86892 - DNA, 156 bp, synthetic construct; identical to SEQ ID NO: 86872
  misc_feature 1..156: note = Description of Artificial Sequence: Synthetic coding sequence
  source 1..156: mol_type = other DNA

SEQ ID NO: 86893 - DNA, 294 bp, synthetic construct; identical to SEQ ID NO: 86881
  misc_feature 1..294: note = Description of Artificial Sequence: Synthetic coding sequence
  source 1..294: mol_type = other DNA

SEQ ID NO: 86894 - DNA, 315 bp, synthetic construct; identical to SEQ ID NO: 86868
  misc_feature 1..315: note = Description of Artificial Sequence: Synthetic coding sequence
  source 1..315: mol_type = other DNA

SEQ ID NO: 86895 - DNA, 132 bp, synthetic construct
  misc_feature 1..132: note = Description of Artificial Sequence: Synthetic coding sequence
  source 1..132: mol_type = other DNA
tacagaggcatgatgatctacgtgagcaccggcgcctggggctgggccggcagctgcttctggcagtggagcttctgcccccccgcctgcgtgggctgcatcgaggagagactgcccgtgcccagcagctag

SEQ ID NO: 86896 - DNA, 111 bp, synthetic construct
  misc_feature 1..111: note = Description of Artificial Sequence: Synthetic coding sequence
  source 1..111: mol_type = other DNA
atgctgagcagaaacgacgacatctgcatctacggcggcctgggcctgggcggcctgctgctgctggccgtggtgctgctgagcgcctgcctgtgctggctgcacagatag

SEQ ID NO: 86897 - DNA, 315 bp, synthetic construct; identical to SEQ ID NO: 86868
  misc_feature 1..315: note = Description of Artificial Sequence: Synthetic coding sequence
  source 1..315: mol_type = other DNA

SEQ ID NO: 86898 - DNA, 141 bp, synthetic construct
  misc_feature 1..141: note = Description of Artificial Sequence: Synthetic coding sequence
  source 1..141: mol_type = other DNA
atgctgagcagaaacgacgacatctgcatctacggcggcctgggcctgggcggcctgctgctgctggccgtggtgctgctgagcgcctgcctgtgctggctgcacagaagagagcactgcctggccctggagcccctgtag

SEQ ID NO: 86899 - DNA, 42 bp, synthetic construct; identical to SEQ ID NO: 86869
  misc_feature 1..42: note = Description of Artificial Sequence: Synthetic coding sequence
  source 1..42: mol_type = other DNA

SEQ ID NO: 86900 - DNA, 87 bp, synthetic construct; identical to SEQ ID NO: 86883
  misc_feature 1..87: note = Description of Artificial Sequence: Synthetic coding sequence
  source 1..87: mol_type = other DNA

SEQ ID NO: 86901 - DNA, 201 bp, synthetic construct; identical to SEQ ID NO: 86866
  misc_feature 1..201: note = Description of Artificial Sequence: Synthetic coding sequence
  source 1..201: mol_type = other DNA

SEQ ID NO: 86902 - DNA, 87 bp, synthetic construct; identical to SEQ ID NO: 86883
  misc_feature 1..87: note = Description of Artificial Sequence: Synthetic coding sequence
  source 1..87: mol_type = other DNA

SEQ ID NO: 86903 - DNA, 87 bp, synthetic construct; identical to SEQ ID NO: 86883
  misc_feature 1..87: note = Description of Artificial Sequence: Synthetic coding sequence
  source 1..87: mol_type = other DNA

SEQ ID NO: 86904 - DNA, 132 bp, synthetic construct
  misc_feature 1..132: note = Description of Artificial Sequence: Synthetic coding sequence
  source 1..132: mol_type = other DNA
tgaagcagaaacgacgacatctgcatctacggcggcctgggcctgggcggcctgctgctgctggccgtggtgctgctgagcgcctgcctgtgctggctgcacagaagagaggccgccagcgcccagcagtag

SEQ ID NO: 86905 - DNA, 156 bp, synthetic construct; identical to SEQ ID NO: 86872
  misc_feature 1..156: note = Description of Artificial Sequence: Synthetic coding sequence
  source 1..156: mol_type = other DNA

SEQ ID NO: 86906 - DNA, 108 bp, synthetic construct; identical to SEQ ID NO: 86867
  misc_feature 1..108: note = Description of Artificial Sequence: Synthetic coding sequence
  source 1..108: mol_type = other DNA

SEQ ID NO: 86907 - DNA, 42 bp, synthetic construct; identical to SEQ ID NO: 86869
  misc_feature 1..42: note = Description of Artificial Sequence: Synthetic coding sequence
  source 1..42: mol_type = other DNA

SEQ ID NO: 86908 - DNA, 294 bp, synthetic construct; identical to SEQ ID NO: 86881
  misc_feature 1..294: note = Description of Artificial Sequence: Synthetic coding sequence
  source 1..294: mol_type = other DNA

SEQ ID NO: 86909 - DNA, 201 bp, synthetic construct; identical to SEQ ID NO: 86866
  misc_feature 1..201: note = Description of Artificial Sequence: Synthetic coding sequence
  source 1..201: mol_type = other DNA

SEQ ID NO: 86910 - DNA, 141 bp, synthetic construct; identical to SEQ ID NO: 86898
  misc_feature 1..141: note = Description of Artificial Sequence: Synthetic coding sequence
  source 1..141: mol_type = other DNA

SEQ ID NO: 86911 - DNA, 132 bp, synthetic construct; identical to SEQ ID NO: 86904
  misc_feature 1..132: note = Description of Artificial Sequence: Synthetic coding sequence
  source 1..132: mol_type = other DNA

SEQ ID NO: 86912 - DNA, 141 bp, synthetic construct; identical to SEQ ID NO: 86898
  misc_feature 1..141: note = Description of Artificial Sequence: Synthetic coding sequence
  source 1..141: mol_type = other DNA

SEQ ID NO: 86913 - DNA, 87 bp, synthetic construct; identical to SEQ ID NO: 86883
  misc_feature 1..87: note = Description of Artificial Sequence: Synthetic coding sequence
  source 1..87: mol_type = other DNA

SEQ ID NO: 86914 - DNA, 132 bp, synthetic construct; identical to SEQ ID NO: 86904
  misc_feature 1..132: note = Description of Artificial Sequence: Synthetic coding sequence
  source 1..132: mol_type = other DNA

SEQ ID NO: 86915 - DNA, 201 bp, synthetic construct; identical to SEQ ID NO: 86866
  misc_feature 1..201: note = Description of Artificial Sequence: Synthetic coding sequence
  source 1..201: mol_type = other DNA

SEQ ID NO: 86916 - DNA, 180 bp, synthetic construct; identical to SEQ ID NO: 86863
  misc_feature 1..180: note = Description of Artificial Sequence: Synthetic coding sequence
  source 1..180: mol_type = other DNA

SEQ ID NO: 86917 - DNA, 222 bp, synthetic construct; identical to SEQ ID NO: 86865
  misc_feature 1..222: note = Description of Artificial Sequence: Synthetic coding sequence
  source 1..222: mol_type = other DNA

SEQ ID NO: 86918 - DNA, 201 bp, synthetic construct; identical to SEQ ID NO: 86864
  misc_feature 1..201: note = Description of Artificial Sequence: Synthetic coding sequence
  source 1..201: mol_type = other DNA

SEQ ID NO: 86919 - DNA, 201 bp, synthetic construct; identical to SEQ ID NO: 86866
  misc_feature 1..201: note = Description of Artificial Sequence: Synthetic coding sequence
  source 1..201: mol_type = other DNA

SEQ ID NO: 86920 - DNA, 87 bp, synthetic construct; identical to SEQ ID NO: 86883
  misc_feature 1..87: note = Description of Artificial Sequence: Synthetic coding sequence
  source 1..87: mol_type = other DNA

SEQ ID NO: 86921 - DNA, 249 bp, synthetic construct; identical to SEQ ID NO: 86888
  misc_feature 1..249: note = Description of Artificial Sequence: Synthetic coding sequence
  source 1..249: mol_type = other DNA

SEQ ID NO: 86922 - DNA, 156 bp, synthetic construct; identical to SEQ ID NO: 86872
  misc_feature 1..156: note = Description of Artificial Sequence: Synthetic coding sequence
  source 1..156: mol_type = other DNA

SEQ ID NO: 86923 - DNA, 180 bp, synthetic construct; identical to SEQ ID NO: 86863
  misc_feature 1..180: note = Description of Artificial Sequence: Synthetic coding sequence
  source 1..180: mol_type = other DNA

SEQ ID NO: 86924 - DNA, 201 bp, synthetic construct; identical to SEQ ID NO: 86866
  misc_feature 1..201: note = Description of Artificial Sequence: Synthetic coding sequence
  source 1..201: mol_type = other DNA

SEQ ID NO: 86925 - DNA, 156 bp, synthetic construct; identical to SEQ ID NO: 86872
  misc_feature 1..156: note = Description of Artificial Sequence: Synthetic coding sequence
  source 1..156: mol_type = other DNA

SEQ ID NO: 86926 - DNA, 249 bp, synthetic construct; identical to SEQ ID NO: 86888
  misc_feature 1..249: note = Description of Artificial Sequence: Synthetic coding sequence
  source 1..249: mol_type = other DNA

SEQ ID NO: 86927 - DNA, 141 bp, synthetic construct; identical to SEQ ID NO: 86898
  misc_feature 1..141: note = Description of Artificial Sequence: Synthetic coding sequence
  source 1..141: mol_type = other DNA

SEQ ID NO: 86928 - DNA, 108 bp, synthetic construct; identical to SEQ ID NO: 86867
  misc_feature 1..108: note = Description of Artificial Sequence: Synthetic coding sequence
  source 1..108: mol_type = other DNA

SEQ ID NO: 86929 - DNA, 249 bp, synthetic construct; identical to SEQ ID NO: 86888
  misc_feature 1..249: note = Description of Artificial Sequence: Synthetic coding sequence
  source 1..249: mol_type = other DNA

SEQ ID NO: 86930 - DNA, 87 bp, synthetic construct; identical to SEQ ID NO: 86883
  misc_feature 1..87: note = Description of Artificial Sequence: Synthetic coding sequence
  source 1..87: mol_type = other DNA

SEQ ID NO: 86931 - DNA, 294 bp, synthetic construct; identical to SEQ ID NO: 86881
  misc_feature 1..294: note = Description of Artificial Sequence: Synthetic coding sequence
  source 1..294: mol_type = other DNA

SEQ ID NO: 86932 - DNA, 87 bp, synthetic construct; identical to SEQ ID NO: 86883
  misc_feature 1..87: note = Description of Artificial Sequence: Synthetic coding sequence
  source 1..87: mol_type = other DNA

SEQ ID NO: 86933 - DNA, 108 bp, synthetic construct; identical to SEQ ID NO: 86867
  misc_feature 1..108: note = Description of Artificial Sequence: Synthetic coding sequence
  source 1..108: mol_type = other DNA

SEQ ID NO: 86934 - DNA, 294 bp, synthetic construct; identical to SEQ ID NO: 86881
  misc_feature 1..294: note = Description of Artificial Sequence: Synthetic coding sequence
  source 1..294: mol_type = other DNA

SEQ ID NO: 86935 - DNA, 201 bp, synthetic construct; identical to SEQ ID NO: 86866
  misc_feature 1..201: note = Description of Artificial Sequence: Synthetic coding sequence
  source 1..201: mol_type = other DNA

SEQ ID NO: 86936 - DNA, 201 bp, synthetic construct; identical to SEQ ID NO: 86866
  misc_feature 1..201: note = Description of Artificial Sequence: Synthetic coding sequence
  source 1..201: mol_type = other DNA

SEQ ID NO: 86937 - DNA, 42 bp, synthetic construct; identical to SEQ ID NO: 86869
  misc_feature 1..42: note = Description of Artificial Sequence: Synthetic coding sequence
  source 1..42: mol_type = other DNA

SEQ ID NO: 86938 - DNA, 87 bp, synthetic construct; identical to SEQ ID NO: 86883
  misc_feature 1..87: note = Description of Artificial Sequence: Synthetic coding sequence
  source 1..87: mol_type = other DNA

SEQ ID NO: 86939 - DNA, 111 bp, synthetic construct; identical to SEQ ID NO: 86896
  misc_feature 1..111: note = Description of Artificial Sequence: Synthetic coding sequence
  source 1..111: mol_type = other DNA

SEQ ID NO: 86940 - DNA, 294 bp, synthetic construct; identical to SEQ ID NO: 86881
  misc_feature 1..294: note = Description of Artificial Sequence: Synthetic coding sequence
  source 1..294: mol_type = other DNA

SEQ ID NO: 86941 - DNA, 180 bp, synthetic construct; identical to SEQ ID NO: 86863
  misc_feature 1..180: note = Description of Artificial Sequence: Synthetic coding sequence
  source 1..180: mol_type = other DNA

SEQ ID NO: 86942 - DNA, 294 bp, synthetic construct; identical to SEQ ID NO: 86881
  misc_feature 1..294: note = Description of Artificial Sequence: Synthetic coding sequence
  source 1..294: mol_type = other DNA

SEQ ID NO: 86943 - DNA, 201 bp, synthetic construct; identical to SEQ ID NO: 86864
  misc_feature 1..201: note = Description of Artificial Sequence: Synthetic coding sequence
  source 1..201: mol_type = other DNA

SEQ ID NO: 86944 - DNA, 87 bp, synthetic construct; identical to SEQ ID NO: 86883
  misc_feature 1..87: note = Description of Artificial Sequence: Synthetic coding sequence
  source 1..87: mol_type = other DNA

SEQ ID NO: 86945 - DNA, 180 bp, synthetic construct; identical to SEQ ID NO: 86863
  misc_feature 1..180: note = Description of Artificial Sequence: Synthetic coding sequence
  source 1..180: mol_type = other DNA

SEQ ID NO: 86946 - DNA, 201 bp, synthetic construct; identical to SEQ ID NO: 86866
  misc_feature 1..201: note = Description of Artificial Sequence: Synthetic coding sequence
  source 1..201: mol_type = other DNA

SEQ ID NO: 86947 - DNA, 108 bp, synthetic construct; identical to SEQ ID NO: 86867
  misc_feature 1..108: note = Description of Artificial Sequence: Synthetic coding sequence
  source 1..108: mol_type = other DNA

SEQ ID NO: 86948 - DNA, 201 bp, synthetic construct; identical to SEQ ID NO: 86866
  misc_feature 1..201: note = Description of Artificial Sequence: Synthetic coding sequence
  source 1..201: mol_type = other DNA

SEQ ID NO: 86949 - DNA, 87 bp, synthetic construct; identical to SEQ ID NO: 86883
  misc_feature 1..87: note = Description of Artificial Sequence: Synthetic coding sequence
  source 1..87: mol_type = other DNA

SEQ ID NO: 86950 - DNA, 108 bp, synthetic construct; identical to SEQ ID NO: 86867
  misc_feature 1..108: note = Description of Artificial Sequence: Synthetic coding sequence
  source 1..108: mol_type = other DNA

SEQ ID NO: 86951 - DNA, 132 bp, synthetic construct; identical to SEQ ID NO: 86904
  misc_feature 1..132: note = Description of Artificial Sequence: Synthetic coding sequence
  source 1..132: mol_type = other DNA

SEQ ID NO: 86952 - DNA, 111 bp, synthetic construct; identical to SEQ ID NO: 86896
  misc_feature 1..111: note = Description of Artificial Sequence: Synthetic coding sequence
  source 1..111: mol_type = other DNA

SEQ ID NO: 86953 - DNA, 111 bp, synthetic construct; identical to SEQ ID NO: 86896
  misc_feature 1..111: note = Description of Artificial Sequence: Synthetic coding sequence
  source 1..111: mol_type = other DNA

SEQ ID NO: 86954 - DNA, 201 bp, synthetic construct; identical to SEQ ID NO: 86866
  misc_feature 1..201: note = Description of Artificial Sequence: Synthetic coding sequence
  source 1..201: mol_type = other DNA

SEQ ID NO: 86955 - DNA, 294 bp, synthetic construct; identical to SEQ ID NO: 86881
  misc_feature 1..294: note = Description of Artificial Sequence: Synthetic coding sequence
  source 1..294: mol_type = other DNA

SEQ ID NO: 86956 - DNA, 87 bp, synthetic construct; identical to SEQ ID NO: 86883
  misc_feature 1..87: note = Description of Artificial Sequence: Synthetic coding sequence
  source 1..87: mol_type = other DNA

SEQ ID NO: 86957 - DNA, 315 bp, synthetic construct; identical to SEQ ID NO: 86868
  misc_feature 1..315: note = Description of Artificial Sequence: Synthetic coding sequence
  source 1..315: mol_type = other DNA

SEQ ID NO: 86958 - DNA, 201 bp, synthetic construct; identical to SEQ ID NO: 86866
  misc_feature 1..201: note = Description of Artificial Sequence: Synthetic coding sequence
  source 1..201: mol_type = other DNA

SEQ ID NO: 86959 - DNA, 111 bp, synthetic construct; identical to SEQ ID NO: 86896
  misc_feature 1..111: note = Description of Artificial Sequence: Synthetic coding sequence
  source 1..111: mol_type = other DNA

SEQ ID NO: 86960 - DNA, 294 bp, synthetic construct; identical to SEQ ID NO: 86881
  misc_feature 1..294: note = Description of Artificial Sequence: Synthetic coding sequence
  source 1..294: mol_type = other DNA

SEQ ID NO: 86961 - DNA, 156 bp, synthetic construct; identical to SEQ ID NO: 86872
  misc_feature 1..156: note = Description of Artificial Sequence: Synthetic coding sequence
  source 1..156: mol_type = other DNA

SEQ ID NO: 86962 - DNA, 315 bp, synthetic construct; identical to SEQ ID NO: 86868
  misc_feature 1..315: note = Description of Artificial Sequence: Synthetic coding sequence
  source 1..315: mol_type = other DNA

SEQ ID NO: 86963 - DNA, 294 bp, synthetic construct; identical to SEQ ID NO: 86881
  misc_feature 1..294: note = Description of Artificial Sequence: Synthetic coding sequence
  source 1..294: mol_type = other DNA

SEQ ID NO: 86964 - DNA, 315 bp, synthetic construct; identical to SEQ ID NO: 86868
  misc_feature 1..315: note = Description of Artificial Sequence: Synthetic coding sequence
  source 1..315: mol_type = other DNA

SEQ ID NO: 86965 - DNA, 156 bp, synthetic construct; identical to SEQ ID NO: 86872
  misc_feature 1..156: note = Description of Artificial Sequence: Synthetic coding sequence
  source 1..156: mol_type = other DNA

SEQ ID NO: 86966 - DNA, 201 bp, synthetic construct; identical to SEQ ID NO: 86864
  misc_feature 1..201: note = Description of Artificial Sequence: Synthetic coding sequence
  source 1..201: mol_type = other DNA

SEQ ID NO: 86967 - DNA, 111 bp, synthetic construct; identical to SEQ ID NO: 86896
  misc_feature 1..111: note = Description of Artificial Sequence: Synthetic coding sequence
  source 1..111: mol_type = other DNA

SEQ ID NO: 86968 - DNA, 222 bp, synthetic construct; identical to SEQ ID NO: 86865
  misc_feature 1..222: note = Description of Artificial Sequence: Synthetic coding sequence
  source 1..222: mol_type = other DNA

SEQ ID NO: 86969 - DNA, 201 bp, synthetic construct; identical to SEQ ID NO: 86866
  misc_feature 1..201: note = Description of Artificial Sequence: Synthetic coding sequence
  source 1..201: mol_type = other DNA

SEQ ID NO: 86970 - DNA, 201 bp, synthetic construct; identical to SEQ ID NO: 86866
  misc_feature 1..201: note = Description of Artificial Sequence: Synthetic coding sequence
  source 1..201: mol_type = other DNA

SEQ ID NO: 86971 - DNA, 108 bp, synthetic construct; identical to SEQ ID NO: 86867
  misc_feature 1..108: note = Description of Artificial Sequence: Synthetic coding sequence
  source 1..108: mol_type = other DNA

SEQ ID NO: 86972 - DNA, 87 bp, synthetic construct; identical to SEQ ID NO: 86883
  misc_feature 1..87: note = Description of Artificial Sequence: Synthetic coding sequence
  source 1..87: mol_type = other DNA

SEQ ID NO: 86973 - DNA, 141 bp, synthetic construct; identical to SEQ ID NO: 86898
  misc_feature 1..141: note = Description of Artificial Sequence: Synthetic coding sequence
  source 1..141: mol_type = other DNA

SEQ ID NO: 86974 - DNA, 141 bp, synthetic construct; identical to SEQ ID NO: 86898
  misc_feature 1..141: note = Description of Artificial Sequence: Synthetic coding sequence
  source 1..141: mol_type = other DNA

SEQ ID NO: 86975 - DNA, 201 bp, synthetic construct; identical to SEQ ID NO: 86864
  misc_feature 1..201: note = Description of Artificial Sequence: Synthetic coding sequence
  source 1..201: mol_type = other DNA

SEQ ID NO: 86976 - DNA, 141 bp, synthetic construct; identical to SEQ ID NO: 86898
  misc_feature 1..141: note = Description of Artificial Sequence: Synthetic coding sequence
  source 1..141: mol_type = other DNA

SEQ ID NO: 86977 - DNA, 87 bp, synthetic construct; identical to SEQ ID NO: 86883
  misc_feature 1..87: note = Description of Artificial Sequence: Synthetic coding sequence
  source 1..87: mol_type = other DNA

SEQ ID NO: 86978 - DNA, 294 bp, synthetic construct; identical to SEQ ID NO: 86881
  misc_feature 1..294: note = Description of Artificial Sequence: Synthetic coding sequence
  source 1..294: mol_type = other DNA

SEQ ID NO: 86979 - DNA, 180 bp, synthetic construct; identical to SEQ ID NO: 86863
  misc_feature 1..180: note = Description of Artificial Sequence: Synthetic coding sequence
  source 1..180: mol_type = other DNA

SEQ ID NO: 86980 - DNA, 294 bp, synthetic construct; identical to SEQ ID NO: 86881
  misc_feature 1..294: note = Description of Artificial Sequence: Synthetic coding sequence
  source 1..294: mol_type = other DNA

SEQ ID NO: 86981 - DNA, 87 bp, synthetic construct; identical to SEQ ID NO: 86883
  misc_feature 1..87: note = Description of Artificial Sequence: Synthetic coding sequence
  source 1..87: mol_type = other DNA

SEQ ID NO: 86982 - DNA, 111 bp, synthetic construct; identical to SEQ ID NO: 86896
  misc_feature 1..111: note = Description of Artificial Sequence: Synthetic coding sequence
  source 1..111: mol_type = other DNA

SEQ ID NO: 86983 - DNA, 156 bp, synthetic construct; identical to SEQ ID NO: 86872
  misc_feature 1..156: note = Description of Artificial Sequence: Synthetic coding sequence
  source 1..156: mol_type = other DNA

SEQ ID NO: 86984 - DNA, 42 bp, synthetic construct; identical to SEQ ID NO: 86869
  misc_feature 1..42: note = Description of Artificial Sequence: Synthetic coding sequence
  source 1..42: mol_type = other DNA

SEQ ID NO: 86985 - DNA, 201 bp, synthetic construct; identical to SEQ ID NO: 86866
  misc_feature 1..201: note = Description of Artificial Sequence: Synthetic coding sequence
  source 1..201: mol_type = other DNA

SEQ ID NO: 86986 - DNA, 87 bp, synthetic construct; identical to SEQ ID NO: 86883
  misc_feature 1..87: note = Description of Artificial Sequence: Synthetic coding sequence
  source 1..87: mol_type = other DNA

SEQ ID NO: 86987 - DNA, 315 bp, synthetic construct; identical to SEQ ID NO: 86868
  misc_feature 1..315: note = Description of Artificial Sequence: Synthetic coding sequence
  source 1..315: mol_type = other DNA

SEQ ID NO: 86988 - DNA, 249 bp, synthetic construct; identical to SEQ ID NO: 86888
  misc_feature 1..249: note = Description of Artificial Sequence: Synthetic coding sequence
  source 1..249: mol_type = other DNA

SEQ ID NO: 86989 - DNA, 201 bp, synthetic construct; identical to SEQ ID NO: 86866
  misc_feature 1..201: note = Description of Artificial Sequence: Synthetic coding sequence
  source 1..201: mol_type = other DNA

SEQ ID NO: 86990 - DNA, 87 bp, synthetic construct; identical to SEQ ID NO: 86883
  misc_feature 1..87: note = Description of Artificial Sequence: Synthetic coding sequence
  source 1..87: mol_type = other DNA

SEQ ID NO: 86991 - DNA, 132 bp, synthetic construct; identical to SEQ ID NO: 86904
  misc_feature 1..132: note = Description of Artificial Sequence: Synthetic coding sequence
  source 1..132: mol_type = other DNA

SEQ ID NO: 86992 - DNA, 249 bp, synthetic construct; identical to SEQ ID NO: 86888
  misc_feature 1..249: note = Description of Artificial Sequence: Synthetic coding sequence
  source 1..249: mol_type = other DNA

SEQ ID NO: 86993 - DNA, 201 bp, synthetic construct; identical to SEQ ID NO: 86866
  misc_feature 1..201: note = Description of Artificial Sequence: Synthetic coding sequence
  source 1..201: mol_type = other DNA

SEQ ID NO: 86994 - DNA, 180 bp, synthetic construct; identical to SEQ ID NO: 86863
  misc_feature 1..180: note = Description of Artificial Sequence: Synthetic coding sequence
  source 1..180: mol_type = other DNA

SEQ ID NO: 86995 - DNA, 87 bp, synthetic construct; identical to SEQ ID NO: 86883
  misc_feature 1..87: note = Description of Artificial Sequence: Synthetic coding sequence
  source 1..87: mol_type = other DNA

SEQ ID NO: 86996 - DNA, 249 bp, synthetic construct; identical to SEQ ID NO: 86888
  misc_feature 1..249: note = Description of Artificial Sequence: Synthetic coding sequence
  source 1..249: mol_type = other DNA

SEQ ID NO: 86997 - DNA, 111 bp, synthetic construct; identical to SEQ ID NO: 86896
  misc_feature 1..111: note = Description of Artificial Sequence: Synthetic coding sequence
  source 1..111: mol_type = other DNA

SEQ ID NO: 86998 - DNA, 222 bp, synthetic construct; identical to SEQ ID NO: 86865
  misc_feature 1..222: note = Description of Artificial Sequence: Synthetic coding sequence
  source 1..222: mol_type = other DNA

SEQ ID NO: 86999 - DNA, 201 bp, synthetic construct; identical to SEQ ID NO: 86866
  misc_feature 1..201: note = Description of Artificial Sequence: Synthetic coding sequence
  source 1..201: mol_type = other DNA

SEQ ID NO: 87000 - DNA, 87 bp, synthetic construct; identical to SEQ ID NO: 86883
  misc_feature 1..87: note = Description of Artificial Sequence: Synthetic coding sequence
  source 1..87: mol_type = other DNA

SEQ ID NO: 87001 - DNA, 201 bp, synthetic construct; identical to SEQ ID NO: 86864
  misc_feature 1..201: note = Description of Artificial Sequence: Synthetic coding sequence
  source 1..201: mol_type = other DNA

SEQ ID NO: 87002 - DNA, 222 bp, synthetic construct; identical to SEQ ID NO: 86865
  misc_feature 1..222: note = Description of Artificial Sequence: Synthetic coding sequence
  source 1..222: mol_type = other DNA

SEQ ID NO: 87003 - DNA, 201 bp, synthetic construct; identical to SEQ ID NO: 86864
  misc_feature 1..201: note = Description of Artificial Sequence: Synthetic coding sequence
  source 1..201: mol_type = other DNA

SEQ ID NO: 87004 - DNA, 87 bp, synthetic construct; identical to SEQ ID NO: 86883
  misc_feature 1..87: note = Description of Artificial Sequence: Synthetic coding sequence
  source 1..87: mol_type = other DNA

SEQ ID NO: 87005 - DNA, 87 bp, synthetic construct; identical to SEQ ID NO: 86883
  misc_feature 1..87: note = Description of Artificial Sequence: Synthetic coding sequence
  source 1..87: mol_type = other DNA

SEQ ID NO: 87006 - DNA, 87 bp, synthetic construct; identical to SEQ ID NO: 86883
  misc_feature 1..87: note = Description of Artificial Sequence: Synthetic coding sequence
  source 1..87: mol_type = other DNA

SEQ ID NO: 87007 - DNA, 87 bp, synthetic construct; identical to SEQ ID NO: 86883
  misc_feature 1..87: note = Description of Artificial Sequence: Synthetic coding sequence
  source 1..87: mol_type = other DNA

SEQ ID NO: 87008 - DNA, 294 bp, synthetic construct; identical to SEQ ID NO: 86881
  misc_feature 1..294: note = Description of Artificial Sequence: Synthetic coding sequence
  source 1..294: mol_type = other DNA

SEQ ID NO: 87009 - DNA, 222 bp, synthetic construct; identical to SEQ ID NO: 86865
  misc_feature 1..222: note = Description of Artificial Sequence: Synthetic coding sequence
  source 1..222: mol_type = other DNA

SEQ ID NO: 87010 - DNA, 87 bp, synthetic construct; identical to SEQ ID NO: 86883
  misc_feature 1..87: note = Description of Artificial Sequence: Synthetic coding sequence
  source 1..87: mol_type = other DNA

SEQ ID NO: 87011 - DNA, 294 bp, synthetic construct; identical to SEQ ID NO: 86881
  misc_feature 1..294: note = Description of Artificial Sequence: Synthetic coding sequence
  source 1..294: mol_type = other DNA

SEQ ID NO: 87012 - DNA, 201 bp, synthetic construct; identical to SEQ ID NO: 86866
  misc_feature 1..201: note = Description of Artificial Sequence: Synthetic coding sequence
  source 1..201: mol_type = other DNA

SEQ ID NO: 87013 - DNA, 87 bp, synthetic construct; identical to SEQ ID NO: 86883
  misc_feature 1..87: note = Description of Artificial Sequence: Synthetic coding sequence
  source 1..87: mol_type = other DNA

SEQ ID NO: 87014 - DNA, 201 bp, synthetic construct; identical to SEQ ID NO: 86866
  misc_feature 1..201: note = Description of Artificial Sequence: Synthetic coding sequence
  source 1..201: mol_type = other DNA

SEQ ID NO: 87015 - DNA, 42 bp, synthetic construct; identical to SEQ ID NO: 86869
  misc_feature 1..42: note = Description of Artificial Sequence: Synthetic coding sequence
  source 1..42: mol_type = other DNA

SEQ ID NO: 87016 - DNA, 132 bp, synthetic construct; identical to SEQ ID NO: 86895
  misc_feature 1..132: note = Description of Artificial Sequence: Synthetic coding sequence
  source 1..132: mol_type = other DNA

SEQ ID NO: 87017 - DNA, 201 bp, synthetic construct; identical to SEQ ID NO: 86866
  misc_feature 1..201: note = Description of Artificial Sequence: Synthetic coding sequence
  source 1..201: mol_type = other DNA

SEQ ID NO: 87018 - DNA, 294 bp, synthetic construct; identical to SEQ ID NO: 86881
  misc_feature 1..294: note = Description of Artificial Sequence: Synthetic coding sequence
  source 1..294: mol_type = other DNA

SEQ ID NO: 87019 - DNA, 222 bp, synthetic construct; identical to SEQ ID NO: 86865
  misc_feature 1..222: note = Description of Artificial Sequence: Synthetic coding sequence
  source 1..222: mol_type = other DNA

SEQ ID NO: 87020 - DNA, 42 bp, synthetic construct; identical to SEQ ID NO: 86869
  misc_feature 1..42: note = Description of Artificial Sequence: Synthetic coding sequence
  source 1..42: mol_type = other DNA

SEQ ID NO: 87021 - DNA, 276 bp, synthetic construct; identical to SEQ ID NO: 86871
  misc_feature 1..276: note = Description of Artificial Sequence: Synthetic coding sequence
  source 1..276: mol_type = other DNA

SEQ ID NO: 87022 - DNA, 276 bp, synthetic construct; identical to SEQ ID NO: 86871
  misc_feature 1..276: note = Description of Artificial Sequence: Synthetic coding sequence
  source 1..276: mol_type = other DNA

SEQ ID NO: 87023 - DNA, 276 bp, synthetic construct; identical to SEQ ID NO: 86871
  misc_feature 1..276: note = Description of Artificial Sequence: Synthetic coding sequence
  source 1..276: mol_type = other DNA

SEQ ID NO: 87024 - DNA, 108 bp, synthetic construct; identical to SEQ ID NO: 86867
  misc_feature 1..108: note = Description of Artificial Sequence: Synthetic coding sequence
  source 1..108: mol_type = other DNA

SEQ ID NO: 87025 - DNA, 276 bp, synthetic construct; identical to SEQ ID NO: 86871
  misc_feature 1..276: note = Description of Artificial Sequence: Synthetic coding sequence
  source 1..276: mol_type = other DNA

SEQ ID NO: 87026 - DNA, 108 bp, synthetic construct; identical to SEQ ID NO: 86867
  misc_feature 1..108: note = Description of Artificial Sequence: Synthetic coding sequence
  source 1..108: mol_type = other DNA

SEQ ID NO: 87027 - DNA, 108 bp, synthetic construct; identical to SEQ ID NO: 86867
  misc_feature 1..108: note = Description of Artificial Sequence: Synthetic coding sequence
  source 1..108: mol_type = other DNA

SEQ ID NO: 87028 - DNA, 276 bp, synthetic construct; identical to SEQ ID NO: 86871
  misc_feature 1..276: note = Description of Artificial Sequence: Synthetic coding sequence
  source 1..276: mol_type = other DNA

SEQ ID NO: 87029 - DNA, 276 bp, synthetic construct; identical to SEQ ID NO: 86871
  misc_feature 1..276: note = Description of Artificial Sequence: Synthetic coding sequence
  source 1..276: mol_type = other DNA

SEQ ID NO: 87030 - DNA, 108 bp, synthetic construct; identical to SEQ ID NO: 86867
  misc_feature 1..108: note = Description of Artificial Sequence: Synthetic coding sequence
  source 1..108: mol_type = other DNA

SEQ ID NO: 87031 - DNA, 108 bp, synthetic construct; identical to SEQ ID NO: 86867
  misc_feature 1..108: note = Description of Artificial Sequence: Synthetic coding sequence
  source 1..108: mol_type = other DNA

SEQ ID NO: 87032 - DNA, 108 bp, synthetic construct; identical to SEQ ID NO: 86867
  misc_feature 1..108: note = Description of Artificial Sequence: Synthetic coding sequence
  source 1..108: mol_type = other DNA

SEQ ID NO: 87033 - DNA, 108 bp, synthetic construct; identical to SEQ ID NO: 86867
  misc_feature 1..108: note = Description of Artificial Sequence: Synthetic coding sequence
  source 1..108: mol_type = other DNA

SEQ ID NO: 87034 - DNA, 276 bp, synthetic construct; identical to SEQ ID NO: 86871
  misc_feature 1..276: note = Description of Artificial Sequence: Synthetic coding sequence
  source 1..276: mol_type = other DNA

SEQ ID NO: 87035 - DNA, 843 bp, synthetic construct
  misc_feature 1..843: note = Description of Artificial Sequence: Synthetic coding sequence
  source 1..843: mol_type = other DNA
atggagagagagatggtgctgtgcctggcccagaccatccacacccaggaggacctgcccagacccagcatcagcgccgagcccggcaccgtgatccccctgggcagccacgtgaccttcgtgtgcagaggccccgtgggcgtgcagaccttcagactggagagagagagcagaagcacctacaacgacaccgaggacgtgagccaggccagccccagcgagagcgaggccagattcagaatcgacagcgtgagcgagggcaacgccggcccctacagatgcatctactacaagccccccaagtggagcgagcagagcgactacctggagctgctggtgaaggagaccagcggcggccccgacagccccgacaccgagcccggcagcagcgccggccccacccagagacccagcgacaacagccacaacgagcacgcccccgccagccagggcctgaaggccgagcacctgtacatcctgatcggcgtgagcgtggtgttcctgttctgcctgctgctgctggtgctgttctgcctgcacagacagaaccagatcaagcagggcccccccagaagcaaggacgaggagcagaagccccagcagagacccgacctggccgtggacgtgctggagagaaccgccgacaaggccaccgtgaacggcctgcccgagaaggacagagagaccgacaccagcgccctggccgccggcagcagccaggaggtgacctacgcccagctggaccactgggccctgacccagagaaccgccagagccgtgagcccccagagcaccaagcccatggccgagagcatcacctacgccgccgtggccagacactag

SEQ ID NO: 87036 - DNA, 813 bp, synthetic construct
  misc_feature 1..813: note = Description of Artificial Sequence: Synthetic coding sequence
  source 1..813: mol_type = other DNA
atgagcccccaccccaccgccctgctgggcctggtgctgtgcctggcccagaccatccacacccaggaggaggacctgcccagacccagcatcagcgccgagcccggcaccgtgatccccctgggcagccacgtgaccttcgtgtgcagaggccccgtgggcgtgcagaccttcagactggagagagagagcagaagcacctacaacgacaccgaggacgtgagccaggccagccccagcgagagcgaggccagattcagaatcgacagcgtgagcgagggcaacgccggcccctacagatgcatctactacaagccccccaagtggagcgagcagagcgactacctggagctgctggtgaagggccccacccagagacccagcgacaacagccacaacgagcacgcccccgccagccagggcctgaaggccgagcacctgtacatcctgatcggcgtgagcgtggtgttcctgttctgcctgctgctgctggtgctgttctgcctgcacagacagaaccagatcaagcagggcccccccagaagcaaggacgaggagcagaagccccagcagagacccgacctggccgtggacgtgctggagagaaccgccgacaaggccaccgtgaacggcctgcccgagaaggacagagagaccgacaccagcgccctggccgccggcagcagccaggaggtgacctacgcccagctggaccactgggccctgacccagagaaccgccagagccgtgagcccccagagcaccaagcccatggccgagagcatcacctacgccgccgtggccagacactag

SEQ ID NO: 87037 - DNA, 864 bp, synthetic construct
  misc_feature 1..864: note = Description of Artificial Sequence: Synthetic coding sequence
  source 1..864: mol_type = other DNA
atgagcccccaccccaccgccctgctgggcctggtgctgtgcctggcccagaccatccacacccaggaggaggacctgcccagacccagcatcagcgccgagcccggcaccgtgatccccctgggcagccacgtgaccttcgtgtgcagaggccccgtgggcgtgcagaccttcagactggagagagagagcagaagcacctacaacgacaccgaggacgtgagccaggccagccccagcgagagcgaggccagattcagaatcgacagcgtgagcgagggcaacgccggcccctacagatgcatctactacaagccccccaagtggagcgagcagagcgactacctggagctgctggtgaaggagaccagcggcggccccgacagccccgacaccgagcccggcagcagcgccggccccacccagagacccagcgacaacagccacaacgagcacgcccccgccagccagggcctgaaggccgagcacctgtacatcctgatcggcgtgagcgtggtgttcctgttctgcctgctgctgctggtgctgttctgcctgcacagacagaaccagatcaagcagggcccccccagaagcaaggacgaggagcagaagccccagcagagacccgacctggccgtggacgtgctggagagaaccgccgacaaggccaccgtgaacggcctgcccgagaaggacagagagaccgacaccagcgccctggccgccggcagcagccaggaggtgacctacgcccagctggaccactgggccctgacccagagaaccgccagagccgtgagcccccagagcaccaagcccatggccgagagcatcacctacgccgccgtggccagacactag

SEQ ID NO: 87038 - DNA, 1545 bp, synthetic construct
  misc_feature 1..1545: note = Description of Artificial Sequence: Synthetic coding sequence
  source 1..1545: mol_type = other DNA
atgctgaccagagtgaagagcgccgtggccaacttcatgggcggcatcatggccggcagcagcggcagcgagcacggcggcggcagctgcggcggcagcgacctgcccctgagattcccctacggcagacccgagttcctgggcctgagccaggacgaggtggagtgcagcgccgaccacatcgccagacccatcctgatcctgaaggagaccagaagactgccctgggccaccggctacgccgaggtgatcaacgccggcaagagcacccacaacgaggaccaggccagctgcgaggtgctgaccgtgaagaagaaggccggcgccgtgaccagcacccccaacagaaacagcagcaagagaagaagcagcctgcccaacggcgagggcctgcagctgaaggagaacagcgagagcgagggcgtgagctgccactactggagcctgttcgacggccacgccggcagcggcgccgccgtggtggccagcagactgctgcagcaccacatcaccgagcagctgcaggacatcgtggacatcctgaagaacagcgccgtgctgccccccacctgcctgggcgaggagcccgagaacacccccgccaacagcagaaccctgaccagagccgccagcctgagaggcggcgtgggcgcccccggcagccccagcaccccccccaccagattcttcaccgagaagaagatcccccacgagtgcctggtgatcggcgccctggagagcgccttcaaggagatggacctgcagatcgagagagagagaagcagctacaacatcagcggcggctgcaccgccctgatcgtgatctgcctgctgggcaagctgtacgtggccaacgccggcgacagcagagccatcatcatcagaaacggcgagatcatccccatgagcagcgagttcacccccgagaccgagagacagagactgcagtacctggccttcatgcagccccacctgctgggcaacgagttcacccacctggagttccccagaagagtgcagagaaaggagctgggcaagaagatgctgtacagagacttcaacatgaccggctgggcctacaagaccatcgaggacgaggacctgaagttccccctgatctacggcgagggcaagaaggccagagtgatggccaccatcggcgtgaccagaggcctgggcgaccacgacctgaaggtgcacgacagcaacatctacatcaagcccttcctgagcagcgcccccgaggtgagaatctacgacctgagcaagtacgaccacggcagcgacgacgtgctgatcctggccaccgacggcctgtgggacgtgctgagcaacgaggaggtggccgaggccatcacccagttcctgcccaactgcgaccccgacgacccccacagatacaccctggccgcccaggacctggtgatgagagccagaggcgtgctgaaggacagaggctggagaatcagcaacgacagactgggcagcggcgacgacatcagcgtgtacgtgatccccctgatccacggcaacaagctgagctag

SEQ ID NO: 87039 - DNA, 1527 bp, synthetic construct
  misc_feature 1..1527: note = Description of Artificial Sequence: Synthetic coding sequence
  source 1..1527: mol_type = other DNA
atgctgccccagagaaacctgagcaagagacaggtgcccaccatgcacatccccgtgaagaccagaagactgctggccgccctgaaggtgctggacaccaaggacctgaccatcgagaaggtggtgatcaacggccaggaggtgaagtacgccctgggcgagagacagagctacaagggcagccccatggagatcagcctgcccatcgccctgagcaagaaccaggagatcgtgatcgagatcagcttcgagaccagccccaagagcagcgccctgcagtggctgacccccgagcagaccagcggcaaggagcacccctacctgttcagccagtgccaggccatccactgcagagccatcctgccctgccaggacacccccagcgtgaagctgacctacaccgccgaggtgagcgtgcccaaggagctggtggccctgatgagcgccatcagagacggcgagacccccgaccccgaggaccccagcagaaagatctacaagttcatccagaaggtgcccatcccctgctacctgatcgccctggtggtgggcgccctggagagcagacagatcggccccagaaccctggtgtggagcgagaaggagcaggtggagaagagcgcctacgagttcagcgagaccgagagcatgctgaagatcgccgaggacctgggcggcccctacgtgtggggccagtacgacctgctggtgctgccccccagcttcccctacggcggcatggagaacccctgcctgaccttcgtgacccccaccctgctggccggcgacaagagcctgagcaacgtgatcgcccacgagatcagccacagctggaccggcaacctggtgaccaacaagacctgggaccacttctggctgaacgagggccacaccgtgtacctggagagacacatctgcggcagactgttcggcgagaagttcagacacttcaacgccctgggcggctggggcgagctgcagaacagcgtgaagaccttcggcgagacccaccccttcaccaagctggtggtggacctgaccgacatcgaccccgacgtggcctacagcagcgtgccctacgagaagggcttcgccctgctgttctacctggagcagctgctgggcggccccgagatcttcctgggcttcctgaaggcctacgtggagaagttcagctacaagagcatcaccaccgacgactggaaggacttcctgtacagctacttcaaggacaaggtggacgtgctgaaccaggtggactggaacgcctggctgtacagccccggcctgccccccatcaagcccaactacgacatgaccctgaccaacgcctgcatcgccctgagccagagatggatcaccgccaaggaggacgacctgaacagcttcaacgccaccgacctgaaggacctgagcagccaccagctgaacgagttcctggcccagaccctgcagagaatggccgccgccctgcacagcatccaggtgggcggcagaaacagcttcggcgccaaggacggcaactag

SEQ ID NO: 87040 - DNA, 1764 bp, synthetic construct
  misc_feature 1..1764: note = Description of Artificial Sequence: Synthetic coding sequence
  source 1..1764: mol_type = other DNA
atgctgccccagagaaacctgagcaagagacaggtgcccaccatgcacatccccgtgaagaccagaagactgctggccgccctgaaggtgctggacaccaaggacctgaccatcgagaaggtggtgatcaacggccaggaggtgaagtacgccctgggcgagagacagagctacaagggcagccccatggagatcagcctgcccatcgccctgagcaagaaccaggagatcgtgatcgagatcagcttcgagaccagccccaagagcagcgccctgcagtggctgacccccgagcagaccagcggcaaggagcacccctacctgttcagccagtgccaggccatccactgcagagccatcctgccctgccaggacacccccagcgtgaagctgacctacaccgccgaggtgagcgtgcccaaggagctggtggccctgatgagcgccatcagagacggcgagacccccgaccccgaggaccccagcagaaagatctacaagttcatccagaaggtgcccatcccctgctacctgatcgccctggtggtgggcgccctggagagcagacagatcggccccagaaccctggtgtggagcgagaaggagcaggtggagaagagcgcctacgagttcagcgagaccgagagcatgctgaagatcgccgaggacctgggcggcccctacgtgtggggccagtacgacctgctggtgctgccccccagcttcccctacggcggcatggagaacccctgcctgaccttcgtgacccccaccctgctggccggcgacaagagcctgagcaacgtgatcgcccacgagatcagccacagctggaccggcaacctggtgaccaacaagacctgggaccacttctggctgaacgagggccacaccgtgtacctggagagacacatctgcggcagactgttcggcgagaagttcagacacttcaacgccctgggcggctggggcgagctgcagaacagcgtgaagaccttcggcgagacccaccccttcaccaagctggtggtggacctgaccgacatcgaccccgacgtggcctacagcagcgtgccctacgagaagggcttcgccctgctgttctacctggagcagctgctgggcggccccgagatcttcctgggcttcctgaaggcctacgtggagaagttcagctacaagagcatcaccaccgacgactggaaggacttcctgtacagctacttcaaggacaaggtggacgtgctgaaccaggtggactggaacgcctggctgtacagccccggcctgccccccatcaagcccaactacgacatgaccctgaccaacgcctgcatcgccctgagccagagatggatcaccgccaaggaggacgacctgaacagcttcaacgccaccgacctgaaggacctgagcagccaccagctgaacgagttcctggcccagaccctgcagagagcccccctgcccctgggccacatcaagagaatgcaggaggtgtacaacttcaacgccatcaacaacagcgagatcagattcagatggctgagactgtgcatccagagcaagtgggaggacgccatccccctggccctgaagatggccaccgagcagggcagaatgaagttcaccagacccctgttcaaggacctggccgccttcgacaagagccacgaccaggccgtgagaacctaccaggagcacaaggccagcatgcaccccgtgaccgccatgctggtgggcaaggacctgaaggtggactag

SEQ ID NO: 87041 - DNA, 1059 bp, synthetic construct
  misc_feature 1..1059: note = Description of Artificial Sequence: Synthetic coding sequence
  source 1..1059: mol_type = other DNA
atgaacaccaccagcagcgccgccccccccagcctgggcgtggagttcatcagcctgctggccatcatcctgctgagcgtggccctggccgtgggcctgcccggcaacagcttcgtggtgtggagcatcctgaagagaatgcagaagagaagcgtgaccgccctgatggtgctgaacctggccctggccgacctggccgtgctgctgaccgcccccttcttcctgcacttcctggcccagggcacctggagcttcggcctggccggctgcagactgtgccactacgtgtgcggcgtgagcatgtacgccagcgtgctgctgatcaccgccatgagcctggacagaagcctggccgtggccagacccttcgtgagccagaagctgagaaccaaggccatggccagaagagtgctggccggcatctgggtgctgagcttcctgctggccacccccgtgctggcctacagaaccgtggtgccctggaagaccaacatgagcctgtgcttccccagataccccagcgagggccacagagccttccacctgatcttcgaggccgtgaccggcttcctgctgcccttcctggccgtggtggccagctacagcgacatcggcagaagactgcaggccagaagattcagaagaagcagaagaaccggcagactggtggtgctgatcatcctgaccttcgccgccttctggctgccctaccacgtggtgaacctggccgaggccggcagagccctggccggccaggccgccggcctgggcctggtgggcaagagactgagcctggccagaaacgtgctgatcgccctggccttcctgagcagcagcgtgaaccccgtgctgtacgcctgcgccggcggcggcctgctgagaagcgccggcgtgggcttcgtggccaagctgctggagggcaccggcagcgaggccagcagcaccagaagaggcggcagcctgggccagaccgccagaagcggccccgccgccctggagcccggccccagcgagagcctgaccgccagcagccccctgaagctgaacgagctgaactag

SEQ ID NO: 87042 - DNA, 1059 bp, synthetic construct; identical to SEQ ID NO: 87041
  misc_feature 1..1059: note = Description of Artificial Sequence: Synthetic coding sequence
  source 1..1059: mol_type = other DNA

SEQ ID NO: 87043 - DNA, 1059 bp, synthetic construct; identical to SEQ ID NO: 87041
  misc_feature 1..1059: note = Description of Artificial Sequence: Synthetic coding sequence
  source 1..1059: mol_type = other DNA

SEQ ID NO: 87044 - DNA, 309 bp, synthetic construct
  misc_feature 1..309: note = Description of Artificial Sequence: Synthetic coding sequence
  source 1..309: mol_type = other DNA
atgaacaccaccagcagcgccgccccccccagcctgggcgtggagttcatcagcctgctggccatcatcctgctgagcgtggccctggccgtgggcctgcccggcaacagcttcgtggtgtggagcatcctgaagagaatgcagaagagaagcgtgaccgccctgatggtgctgaacctggccctggccgacctggccgtgctgctgaccgcccccttcttcctgcacttcctggcccagggcacctggagcttcggcctggccggctgcagactgtgccactacgtgtgcggcgtgagcatgtactag

SEQ ID NO: 87045 - DNA, 483 bp, synthetic construct
  misc_feature 1..483: note = Description of Artificial Sequence: Synthetic coding sequence
  source 1..483: mol_type = other DNA
atgagcgtgtgctacagaccccccggcaacgagaccctgctgagctggaagaccagcagagccaccggcaccgccttcctgctgctggccgccctgctgggcctgcccggcaacggcttcgtggtgtggagcctggccggctggagacccgccagaggcagacccctggccgccaccctggtgctgcacctggccctggccgacggcgccgtgctgctgctgacccccctgttcgtggccttcctgaccagacaggcctggcccctgggccaggccggctgcaaggccgtgtactacgtgtgcgccctgagcatgtacgccagcgtgctgctgaccggcctgctgagcctgcagagatgcctggccgtgaccagacccttcctggcccccagactgagaagccccgccctggccagaagactgctgctggccgtgtggctggccgccctgctgctggccgtgcccgccgccgtgtacagatag

SEQ ID NO: 87046 - DNA, 1170 bp, synthetic construct
  misc_feature 1..1170: note = Description of Artificial Sequence: Synthetic coding sequence
  source 1..1170: mol_type = other DNA
atggcccccagccacagagccagccaggtgggcttctgccccacccccgagagacccctgtggagactgccccccacctgcagacccagaagaatgagcgtgtgctacagaccccccggcaacgagaccctgctgagctggaagaccagcagagccaccggcaccgccttcctgctgctggccgccctgctgggcctgcccggcaacggcttcgtggtgtggagcctggccggctggagacccgccagaggcagacccctggccgccaccctggtgctgcacctggccctggccgacggcgccgtgctgctgctgacccccctgttcgtggccttcctgaccagacaggcctggcccctgggccaggccggctgcaaggccgtgtactacgtgtgcgccctgagcatgtacgccagcgtgctgctgaccggcctgctgagcctgcagagatgcctggccgtgaccagacccttcctggcccccagactgagaagccccgccctggccagaagactgctgctggccgtgtggctggccgccctgctgctggccgtgcccgccgccgtgtacagacacctgtggagagacagagtgtgccagctgtgccaccccagccccgtgcacgccgccgcccacctgagcctggagaccctgaccgccttcgtgctgcccttcggcctgatgctgggctgctacagcgtgaccctggccagactgagaggcgccagatggggcagcggcagacacggcgccagagtgggcagactggtgagcgccatcgtgctggccttcggcctgctgtgggccccctaccacgccgtgaacctgctgcaggccgtggccgccctggccccccccgagggcgccctggccaagctgggcggcgccggccaggccgccagagccggcaccaccgccctggccttcttcagcagcagcgtgaaccccgtgctgtacgtgttcaccgccggcgacctgctgcccagagccggccccagattcctgaccagactgttcgagggcagcggcgaggccagaggcggcggcagaagcagagagggcaccatggagctgagaaccaccccccagctgaaggtggtgggccagggcagaggcaacggcgaccccggcggcggcatggagaaggacggccccgagtgggacctgtag

SEQ ID NO: 87047 - DNA, 960 bp, synthetic construct
  misc_feature 1..960: note = Description of Artificial Sequence: Synthetic coding sequence
  source 1..960: mol_type = other DNA
atgagcgtgtgctacagaccccccggcaacgagaccctgctgagctggaagaccagcagagccaccggcaccgccttcctgctgctggccgccctgctgggcctgcccggcaacggcttcgtggtgtggagcctggccggctggagacccgccagaggcagacccctggccgccaccctggtgctgcacctggccctggccgacggcgccgtgctgctgctgacccccctgttcgtggccttcctgaccagacaggcctggcccctgggccaggccggctgcaaggccgtgtactacgtgtgcgccctgagcatgtacgccagcgtgctgctgaccggcctgctgagcctgcagagatgcctggccgtgaccagacccttcctggcccccagactgagaagccccgccctggccagaagactgctgctggccgtgtggctggccgccctgctgctggccgtgcccgccgccgtgtacagacacctgtggagagacagagtgtgccagctgtgccaccccagccccgtgcacgccgccgcccacctgagcctggagaccctgaccgccttcgtgctgcccttcggcctgatgctgggctgctacagcgtgaccctggccagactgagaggcgccagatggggcagcggcagacacggcgccagagtgggcagactggtgagcgccatcgtgctggccttcggcctgctgtgggccccctaccacgccgtgaacctgctgcaggccgtggccgccctggccccccccgagggcgccctggccaagctgggcggcgccggccaggccgccagagccggcaccaccgccctggccttcttcagcagcagcgtgaaccccgtgctgtacgtgttcaccgccggcgacctgctgcccagagccggccccagattcctgaccagactgttcgagggcagcggcgaggccagaggcggcggcagatag

SEQ ID NO: 87048 - DNA, 1077 bp, synthetic construct
  misc_feature 1..1077: note = Description of Artificial Sequence: Synthetic coding sequence
  source 1..1077: mol_type = other DNA
atgagcgtgtgctacagaccccccggcaacgagaccctgctgagctggaagaccagcagagccaccggcaccgccttcctgctgctggccgccctgctgggcctgcccggcaacggcttcgtggtgtggagcctggccggctggagacccgccagaggcagacccctggccgccaccctggtgctgcacctggccctggccgacggcgccgtgctgctgctgacccccctgttcgtggccttcctgaccagacaggcctggcccctgggccaggccggctgcaaggccgtgtactacgtgtgcgccctgagcatgtacgccagcgtgctgctgaccggcctgctgagcctgcagagatgcctggccgtgaccagacccttcctggcccccagactgagaagccccgccctggccagaagactgctgctggccgtgtggctggccgccctgctgctggccgtgcccgccgccgtgtacagacacctgtggagagacagagtgtgccagctgtgccaccccagccccgtgcacgccgccgcccacctgagcctggagaccctgaccgccttcgtgctgcccttcggcctgatgctgggctgctacagcgtgaccctggccagactgagaggcgccagatggggcagcggcagacacggcgccagagtgggcagactggtgagcgccatcgtgctggccttcggcctgctgtgggccccctaccacgccgtgaacctgctgcaggccgtggccgccctggccccccccgagggcgccctggccaagctgggcggcgccggccaggccgccagagccggcaccaccgccctggccttcttcagcagcagcgtgaaccccgtgctgtacgtgttcaccgccggcgacctgctgcccagagccggccccagattcctgaccagactgttcgagggcagcggcgaggccagaggcggcggcagaagcagagagggcaccatggagctgagaaccaccccccagctgaaggtggtgggccagggcagaggcaacggcgaccccggcggcggcatggagaaggacggccccgagtgggacctgtag

SEQ ID NO: 87049 - DNA, 1077 bp, synthetic construct; identical to SEQ ID NO: 87048
  misc_feature 1..1077: note = Description of Artificial Sequence: Synthetic coding sequence
  source 1..1077: mol_type = other DNA

SEQ ID NO: 87050 - DNA, 453 bp, synthetic construct
  misc_feature 1..453: note = Description of Artificial Sequence: Synthetic coding sequence
  source 1..453: mol_type = other DNA
atgaaggacgaggtggccctgctggccgccgtgaccctgctgggcgtgctgctgcaggcctacttcagcctgcaggtgatcagcgccagaagagccttcagagtgagcccccccctgaccaccggcccccccgagttcgagagagtgtacagagcccaggtgaactgcagcgagtacttccccctgttcctggccaccctgtgggtggccggcatcttcttccacgagggcgccgccgccctgtgcggcctggtgtacctgttcgccagactgagatacttccagggctacgccagaagcgcccagctgagactggcccccctgtacgccagcgccagagccctgtggctgctggtggccctggccgccctgggcctgctggcccacttcctgcccgccgccctgagagccgccctgctgggcagactgagaaccctgctgccctgggcctag

SEQ ID NO: 87051 - DNA, 1161 bp, synthetic construct
  misc_feature 1..1161: note = Description of Artificial Sequence: Synthetic coding sequence
  source 1..1161: mol_type = other DNA
atggaggagctggacgccctgctggaggagctggagagaagcaccctgcaggacagcgacgagtacagcaaccccgcccccctgcccctggaccagcacagcagaaaggagaccaacctggacgagaccagcgagatcctgagcatccaggacaacaccagccccctgcccgcccagctggtgtacaccaccaacatccaggagctgaacgtgtacagcgaggcccaggagcccaaggagagccccccccccagcaagaccagcgccgccgcccagctggacgagctgatggcccacctgaccgagatgcaggccaaggtggccgtgagagccgacgccggcaagaagcacctgcccgacaagcaggaccacaaggccagcctggacagcatgctgggcggcctggagcaggagctgcaggacctgggcatcgccaccgtgcccaagggccactgcgccagctgccagaagcccatcgccggcaaggtgatccacgccctgggccagagctggcaccccgagcacttcgtgtgcacccactgcaaggaggagatcggcagcagccccttcttcgagagaagcggcctggcctactgccccaacgactaccaccagctgttcagccccagatgcgcctactgcgccgcccccatcctggacaaggtgctgaccgccatgaaccagacctggcaccccgagcacttcttctgcagccactgcggcgaggtgttcggcgccgagggcttccacgagaaggacaagaagccctactgcagaaaggacttcctggccatgttcagccccaagtgcggcggctgcaacagacccgtgctggagaactacctgagcgccatggacaccgtgtggcaccccgagtgcttcgtgtgcggcgactgcttcaccagcttcagcaccggcagcttcttcgagctggacggcagacccttctgcgagctgcactaccaccacagaagaggcaccctgtgccacggctgcggccagcccatcaccggcagatgcatcagcgccatgggctacaagttccaccccgagcacttcgtgtgcgccttctgcctgacccagctgagcaagggcatcttcagagagcagaacgacaagacctactgccagccctgcttcaacaagctgttccccctgtag

SEQ ID NO: 87052 - DNA, 1176 bp, synthetic construct
  misc_feature 1..1176: note = Description of Artificial Sequence: Synthetic coding sequence
  source 1..1176: mol_type = other DNA
atgagcaccctgctgatcagcagcagcgacgccctgctggaggagctggagagaagcaccctgcaggacagcgacgagtacagcaaccccgcccccctgcccctggaccagcacagcagaaaggagaccaacctggacgagaccagcgagatcctgagcatccaggacaacaccagccccctgcccgcccagctggtgtacaccaccaacatccaggagctgaacgtgtacagcgaggcccaggagcccaaggagagccccccccccagcaagaccagcgccgccgcccagctggacgagctgatggcccacctgaccgagatgcaggccaaggtggccgtgagagccgacgccggcaagaagcacctgcccgacaagcaggaccacaaggccagcctggacagcatgctgggcggcctggagcaggagctgcaggacctgggcatcgccaccgtgcccaagggccactgcgccagctgccagaagcccatcgccggcaaggtgatccacgccctgggccagagctggcaccccgagcacttcgtgtgcacccactgcaaggaggagatcggcagcagccccttcttcgagagaagcggcctggcctactgccccaacgactaccaccagctgttcagccccagatgcgcctactgcgccgcccccatcctggacaaggtgctgaccgccatgaaccagacctggcaccccgagcacttcttctgcagccactgcggcgaggtgttcggcgccgagggcttccacgagaaggacaagaagccctactgcagaaaggacttcctggccatgttcagccccaagtgcggcggctgcaacagacccgtgctggagaactacctgagcgccatggacaccgtgtggcaccccgagtgcttcgtgtgcggcgactgcttcaccagcttcagcaccggcagcttcttcgagctggacggcagacccttctgcgagctgcactaccaccacagaagaggcaccctgtgccacggctgcggccagcccatcaccggcagatgcatcagcgccatgggctacaagttccaccccgagcacttcgtgtgcgccttctgcctgacccagctgagcaagggcatcttcagagagcagaacgacaagacctactgccagccctgcttcaacaagctgttccccctgtag

SEQ ID NO: 87053 - DNA, 1131 bp, synthetic construct
  misc_feature 1..1131: note = Description of Artificial Sequence: Synthetic coding sequence
  source 1..1131: mol_type = other DNA
atgaactacgagttcgagagagagatcggcttcatcaacagccagcccagcctggccgagtgcctgaccagcttcccccccgtggccgacaccttccagagcagcagcatcaagaccagcaccctgagccacagcaccctgatccccccccccttcgagcagaccatccccagcctgaaccccggcagccaccccagacacggcgccggcggcagacccaagcccagccccgccggcagcagaggcagccccgtgcccgccggcgccctgcagccccccgagtacccctggatgaaggagaagaaggccgccaagaagaccgccctgctgcccgccgccgccgccgccgccaccgccgccgccaccggccccgcctgcctgagccacaaggagagcctggagatcgccgacggcagcggcggcggcagcagaagactgagaaccgcctacaccaacacccagctgctggagctggagaaggagttccacttcaacaagtacctgtgcagacccagaagagtggagatcgccgccctgctggacctgaccgagagacaggtgaaggtgtggttccagaacagaagaatgaagcacaagagacagacccagtgcaaggagaaccagaacagcgagggcaagtgcaagagcctggaggacagcgagaaggtggaggaggacgaggaggagaagaccctgttcgagcaggccctgagcgtgagcggcgccctgctggagagagagggctacaccttccagcagaacgccctgagccagcagcaggcccccaacggccacaacggcgacagccagagcttccccgtgagccccctgaccagcaacgagaagaacctgaagcacttccagcaccagagccccaccgtgcccaactgcctgagcaccatgggccagaactgcggcgccggcctgaacaacgacagccccgaggccctggaggtgcccagcctgcaggacttcagcgtgttcagcaccgacagctgcctgcagctgagcgacgccgtgagccccagcctgcccggcagcctggacagccccgtggacatcagcgccgacagcctggacttcttcaccgacaccctgaccaccatcgacctgcagcacctgaactactag

SEQ ID NO: 87054 - DNA, 753 bp, synthetic construct
  misc_feature 1..753: note = Description of Artificial Sequence: Synthetic coding sequence
  source 1..753: mol_type = other DNA
atgacccccggcagatgctgcctggccgccgacatccaggtggagaccttcatcttcaccgacggcgaggacgaggccctggccagacacaccggcaacgtggtgatcaccaactgcagcgccgcccacagcagacaggccctgagctgcaagatggccgtggagtacgacagattcatcgagagcggcagaaagtggttctgccacgtggacgacgacaactacgtgaacctgagagccctgctgagactgctggccagctacccccacaccagagacgtgtacgtgggcaagcccagcctggacagacccatccaggccatggagagagtgagcgagaacaaggtgagacccgtgcacttctggttcgccaccggcggcgccggcttctgcatcagcagaggcctggccctgaagatgagcccctgggccagcggcggccacttcatgaacaccgccgagagaatcagactgcccgacgactgcaccatcggctacatcgtggaggccctgctgggcgtgcccctgatcagaagcggcctgttccacagccacctggagaacctgcagcaggtgcccaccagcgagctgcacgagcaggtgaccctgagctacggcatgttcgagaacaagagaaacgccgtgcacgtgaagggccccttcagcgtggaggccgaccccagcagattcagaagcatccactgccacctgtaccccgacaccccctggtgccccagaaccgccatcttctag

SEQ ID NO: 87055 - DNA, 1086 bp, synthetic construct
  misc_feature 1..1086: note = Description of Artificial Sequence: Synthetic coding sequence
  source 1..1086: mol_type = other DNA
atgctgaagagatgcggcagaagactgctgctggccctggccggcgccctgctggcctgcctgctggtgctgaccgccgaccccccccccccccccctgcccgccgagagaggcagaagagccctgagaagcctggccggccccgccggcgccgcccccgcccccggcctgggcgccgccgccgccgcccccggcgccctggtgagagacgtgcacagcctgagcgagtacttcagcctgctgaccagagccagaagagacgccggccccccccccggcgccgcccccagacccgccgacggccaccccagacccctggccgagcccctggcccccagagacgtgttcatcgccgtgaagaccaccaagaagttccacagagccagactggacctgctgctggagacctggatcagcagacacaaggagatgaccttcatcttcaccgacggcgaggacgaggccctggccagacacaccggcaacgtggtgatcaccaactgcagcgccgcccacagcagacaggccctgagctgcaagatggccgtggagtacgacagattcatcgagagcggcagaaagtggttctgccacgtggacgacgacaactacgtgaacctgagagccctgctgagactgctggccagctacccccacaccagagacgtgtacgtgggcaagcccagcctggacagacccatccaggccatggagagagtgagcgagaacaaggtgagacccgtgcacttctggttcgccaccggcggcgccggcttctgcatcagcagaggcctggccctgaagatgagcccctgggccagcggcggccacttcatgaacaccgccgagagaatcagactgcccgacgactgcaccatcggctacatcgtggaggccctgctgggcgtgcccctgatcagaagcggcctgttccacagccacctggagaacctgcagcaggtgcccaccagcgagctgcacgagcaggtgaccctgagctacggcatgttcgagaacaagagaaacgccgtgcacgtgaagggccccttcagcgtggaggccgaccccagcagatggggcaactag

SEQ ID NO: 87056 - DNA, 753 bp, synthetic construct; identical to SEQ ID NO: 87054
  misc_feature 1..753: note = Description of Artificial Sequence: Synthetic coding sequence
  source 1..753: mol_type = other DNA

SEQ ID NO: 87057 - DNA, 927 bp, synthetic construct
  misc_feature 1..927: note = Description of Artificial Sequence: Synthetic coding sequence
  source 1..927: mol_type = other DNA
atggacgagcagaccggcagactgagactggacacctactgcatgagcgccaagcagatctgggcctggagcaagtgcagcggcagactgtgggacgagcacatgaagtggatggagggctggaccgacagatggaccgacggctggatggacggctggatggacgagtggagccccacccccgccctgagaagctacggcggcggcctgagccagcagaccttcatcttcaccgacggcgaggacgaggccctggccagacacaccggcaacgtggtgatcaccaactgcagcgccgcccacagcagacaggccctgagctgcaagatggccgtggagtacgacagattcatcgagagcggcagaaagtggttctgccacgtggacgacgacaactacgtgaacctgagagccctgctgagactgctggccagctacccccacaccagagacgtgtacgtgggcaagcccagcctggacagacccatccaggccatggagagagtgagcgagaacaaggtgagacccgtgcacttctggttcgccaccggcggcgccggcttctgcatcagcagaggcctggccctgaagatgagcccctgggccagcggcggccacttcatgaacaccgccgagagaatcagactgcccgacgactgcaccatcggctacatcgtggaggccctgctgggcgtgcccctgatcagaagcggcctgttccacagccacctggagaacctgcagcaggtgcccaccagcgagctgcacgagcaggtgaccctgagctacggcatgttcgagaacaagagaaacgccgtgcacgtgaagggccccttcagcgtggaggccgaccccagcagattcagaagcatccactgccacctgtaccccgacaccccctggtgccccagaaccgccatcttctag

SEQ ID NO: 87058 - DNA, 1302 bp, synthetic construct
  misc_feature 1..1302: note = Description of Artificial Sequence: Synthetic coding sequence
  source 1..1302: mol_type = other DNA
atgcagagaatgatccagcagttcgccgccgagtacaccagcaagaacagcagcacccaggaccccagccagcccaacagcaccaagaaccagagcctgcccaaggccagccccgtgaccaccagccccaccgccgccaccacccagaaccccgtgctgagcaagctgctgatggccgaccaggacagccccctggacctgaccgtgagaaagagccagagcgagcccagcgagcaggacggcgtgctggacctgagcaccaagaagagcccctgcgccggcagcaccagcctgagccacagccccggctgcagcagcacccagggcaacggcagacccggcagacccagccagtacagacccgacggcctgagaagcggcgacggcgtgccccccagaagcctgcaggacggcaccagagagggcttcggccacagcaccagcctgaaggtgcccctggccagaagcctgcagatcagcgaggagctgctgagcagaaaccagctgagcaccgccgccagcctgggccccagcggcctgcagaaccacggccagcacctgatcctgagcagagaggccagctgggccaagccccactacgagttcaacctgagcagaatgaagttcagaggcaacggcgccctgagcaacatcagcgacctgcccttcctggccgagaacagcgccttccccaagatggccctgcaggccaagcaggacggcaagaaggacgtgagccacagcagccccgtggacctgaagatcccccaggtgagaggcatggacctgagctgggagagcagaaccggcgaccagtacagctacagcagcctggtgatgggcagccagaccgagagcgccctgagcaagaagctgagagccatcctgcccaagcagagcagaaagagcatgctggacgccggccccgacagctggggcagcgacgccgagcagagcaccagcggccagccctaccccaccagcgaccaggagggcgaccccggcagcaagcagcccagaaagaagagaggcagatacagacagtacaacagcgagatcctggaggaggccatcagcgtggtgatgagcggcaagatgagcgtgagcaaggcccagagcatctacggcatcccccacagcaccctggagtacaaggtgaaggagagactgggcaccctgaagaacccccccaagaagaagatgaagctgatgagaagcgagggccccgacgtgagcgtgaagatcgagctggacccccagggcgaggccgcccagagcgccaacgagagcaagaacgagtag

SEQ ID NO: 87059 - DNA, 1302 bp, synthetic construct; identical to SEQ ID NO: 87058
  misc_feature 1..1302: note = Description of Artificial Sequence: Synthetic coding sequence
  source 1..1302: mol_type = other DNA

SEQ ID NO: 87060 - DNA, 1302 bp, synthetic construct; identical to SEQ ID NO: 87058
  misc_feature 1..1302: note = Description of Artificial Sequence: Synthetic coding sequence
  source 1..1302: mol_type = other DNA

SEQ ID NO: 87061 - DNA, 1221 bp, synthetic construct
  misc_feature 1..1221: note = Description of Artificial Sequence: Synthetic coding sequence
  source 1..1221: mol_type = other DNA
atgcagagaatgatccagcagttcgccgccgagtacaccagcaagaacagcagcacccaggaccccagccagcccaacagcaccaagaaccagagcctgcccaaggccagccccgtgaccaccagccccaccgccgccaccacccagaaccccgtgctgagcaagctgctgatggccgaccaggacagccccctggacctgaccgtgagaaagagccagagcgagcccagcgagcaggacggcgtgctggacctgagcaccaagaagagcccctgcgccggcagcaccagcctgagccacagccccggctgcagcagcacccagggcaacggcagacccggcagacccagccagtacagacccgacggcctgagaagcggcgacggcgtgccccccagaagcctgcaggacggcaccagagagggcttcggccacagcaccagcctgaaggtgcccctggccagaagcctgcagatcagcgaggagctgctgagcagaaaccagctgagcaccgccgccagcctgggccccagcggcctgcagaaccacggccagcacctgatcctgagcagagaggccagctgggccaagccccactacgagttcaacctgagcagaatgaagttcagaggcaacggcgccctgagcaacatcagcgacctgcccttcctggccgagaacagcgccttccccaagatggccctgcaggccaagcaggacggcaagaaggacgtgagccacagcagccccgtggacctgaagatcccccaggtgagaggcatggacctgagctgggagagcagaaccggcgaccagtacagctacagcagcctggtgatgggcagccagaccgagagcgccctgagcaagaagctgagagccatcctgcccaagcagagcagaaagagcatgctggacgccggccccgacagctggggcagcgacgccgagcagagcaccagcggccagccctaccccaccagcgaccaggagggcgaccccggcagcaagcagcccagaaagaagagaggcagatacagacagtacaacagcgagatcctggaggaggccatcagcgtggtgatgagcggcaagatgagcgtgagcaaggcccagagcatctacggcatcccccacagcaccctggagtacaaggtgaaggagagactgggcaccctgaagaacccccccaagaagaagatgaagctgatgagcggctag

SEQ ID NO: 87062 - DNA, 957 bp, synthetic construct
  misc_feature 1..957: note = Description of Artificial Sequence: Synthetic coding sequence
  source 1..957: mol_type = other DNA
atggacaagggcagagagagaatggccgccgccgccgccgccgccgccgccgccgccgccgccgcccagtgcagaagccccagatgcgccgccgagagaagaggcttcagaagagagctggacagctggagacacagactgatgcactgcgtgggcttcgagagcatcctggagggcctgtacggccccagactgagaagagacctgagcctgttcgaggactgcgagcccgaggagctgaccgactggagcatggacgagaagtgcagcttctgcaacctgcagagagaggccgtgagcgactgcatccccagcctggacagcagccagagcacccccaccgaggagctgagcagccagggccagagcaacaccgacaagatcgagtgccaggccgagaactacctgaacgccctgttcagaaagaaggacctgccccagaactgcgaccccaacatccccctggtggcccaggagctgatgaagaagatgatcagacagttcgccatcgagtacatcagcaagagcggcaagacccaggagaacagaaacggcagcatcggccccagcatcgtgtgcaagagcatccagatgaaccaggccgagaacagcctgcaggaggagcaggagggccccctggacctgaccgtgaacagaatgcaggagcagaacacccagcagggcgacggcgtgctggacctgagcaccaagaagaccagcatcaagagcgaggagagcagcatctgcgaccccagcagcgagaacagcgtggccggcatgctgcaggtgaagaccgacgagaagctgaacgtgagcgacgagaacaccgccagctgccccctgagccccatcaagatgtgcctgaacagacccatcgagtggaacctgaacctgaccaccgccagcctgaccagctgcaccgtgcacaaccagaacctgaagagcgaggagaagtag

SEQ ID NO: 87063 - DNA, 1557 bp, synthetic construct
  misc_feature 1..1557: note = Description of Artificial Sequence: Synthetic coding sequence
  source 1..1557: mol_type = other DNA
atggacgagaagtgcagcttctgcaacctgcagagagaggccgtgagcgactgcatccccagcctggacagcagccagagcacccccaccgaggagctgagcagccagggccagagcaacaccgacaagatcgagtgccaggccgagaactacctgaacgccctgttcagaaagaaggacctgccccagaactgcgaccccaacatccccctggtggcccaggagctgatgaagaagatgatcagacagttcgccatcgagtacatcagcaagagcggcaagacccaggagaacagaaacggcagcatcggccccagcatcgtgtgcaagagcatccagatgaaccaggccgagaacagcctgcaggaggagcaggagggccccctggacctgaccgtgaacagaatgcaggagcagaacacccagcagggcgacggcgtgctggacctgagcaccaagaagaccagcatcaagagcgaggagagcagcatctgcgaccccagcagcgagaacagcgtggccggcagactgcacagaaacagagaggactacgtggagagaagcgccgagttcgccgacggcctgctgagcaaggccctgaaggacatccagagcggcgccctggacatcaacaaggccggcatcctgtacggcatcccccagaagaccctgctgctgcacctggaggccctgcccgccggcaagcccgccagcttcaagaacaagaccagagacttccacgacagctacagctacaaggacagcaaggagacctgcgccgtgctgcagaaggtggccctgtgggccagagcccaggccgagagaaccgagaagagcaagctgaacctgctggagaccagcgagatcaagttccccaccgccagcacctacctgcaccagctgaccctgcagaagatggtgacccagttcaaggagaagaacgagagcctgcagtacgagaccagcaaccccaccgtgcagctgaagatcccccagctgagagtgagcagcgtgagcaagagccagcccgacggcagcggcctgctggacgtgatgtaccaggtgagcaagaccagcagcgtgctggagggcagcgccctgcagaagctgaagaacatcctgcccaagcagaacaagatcgagtgcagcggccccgtgacccacagcagcgtggacagctacttcctgcacggcgacctgagccccctgtgcctgaacagcaagaacggcaccgtggacggcaccagcgagaacaccgaggacggcctggacagaaaggacagcaagcagcccagaaagaagagaggcagatacagacagtacgaccacgagatcatggaggaggccatcgccatggtgatgagcggcaagatgagcgtgagcaaggcccagggcatctacggcgtgccccacagcaccctggagtacaaggtgaaggagagaagcggcaccctgaagaccccccccaagaagaagctgagactgcccgacaccggcctgtacaacatgaccgacagcggcaccggcagctgcaagaacagcagcaagcccgtgtag

SEQ ID NO: 87064 - DNA, 1809 bp, synthetic construct
  misc_feature 1..1809: note = Description of Artificial Sequence: Synthetic coding sequence
  source 1..1809: mol_type = other DNA
atggacaagggcagagagagaatggccgccgccgccgccgccgccgccgccgccgccgccgccgcccagtgcagaagccccagatgcgccgccgagagaagaggcttcagaagagagctggacagctggagacacagactgatgcactgcgtgggcttcgagagcatcctggagggcctgtacggccccagactgagaagagacctgagcctgttcgaggactgcgagcccgaggagctgaccgactggagcatggacgagaagtgcagcttctgcaacctgcagagagaggccgtgagcgactgcatccccagcctggacagcagccagagcacccccaccgaggagctgagcagccagggccagagcaacaccgacaagatcgagtgccaggccgagaactacctgaacgccctgttcagaaagaaggacctgccccagaactgcgaccccaacatccccctggtggcccaggagctgatgaagaagatgatcagacagttcgccatcgagtacatcagcaagagcggcaagacccaggagaacagaaacggcagcatcggccccagcatcgtgtgcaagagcatccagatgaaccaggccgagaacagcctgcaggaggagcaggagggccccctggacctgaccgtgaacagaatgcaggagcagaacacccagcagggcgacggcgtgctggacctgagcaccaagaagaccagcatcaagagcgaggagagcagcatctgcgaccccagcagcgagaacagcgtggccggcagactgcacagaaacagagaggactacgtggagagaagcgccgagttcgccgacggcctgctgagcaaggccctgaaggacatccagagcggcgccctggacatcaacaaggccggcatcctgtacggcatcccccagaagaccctgctgctgcacctggaggccctgcccgccggcaagcccgccagcttcaagaacaagaccagagacttccacgacagctacagctacaaggacagcaaggagacctgcgccgtgctgcagaaggtggccctgtgggccagagcccaggccgagagaaccgagaagagcaagctgaacctgctggagaccagcgagatcaagttccccaccgccagcacctacctgcaccagctgaccctgcagaagatggtgacccagttcaaggagaagaacgagagcctgcagtacgagaccagcaaccccaccgtgcagctgaagatcccccagctgagagtgagcagcgtgagcaagagccagcccgacggcagcggcctgctggacgtgatgtaccaggtgagcaagaccagcagcgtgctggagggcagcgccctgcagaagctgaagaacatcctgcccaagcagaacaagatcgagtgcagcggccccgtgacccacagcagcgtggacagctacttcctgcacggcgacctgagccccctgtgcctgaacagcaagaacggcaccgtggacggcaccagcgagaacaccgaggacggcctggacagaaaggacagcaagcagcccagaaagaagagaggcagatacagacagtacgaccacgagatcatggaggaggccatcgccatggtgatgagcggcaagatgagcgtgagcaaggcccagggcatctacggcgtgccccacagcaccctggagtacaaggtgaaggagagaagcggcaccctgaagaccccccccaagaagaagctgagactgcccgacaccggcctgtacaacatgaccgacagcggcaccggcagctgcaagaacagcagcaagcccgtgtag

SEQ ID NO: 87065 - DNA, 435 bp, synthetic construct
  misc_feature 1..435: note = Description of Artificial Sequence: Synthetic coding sequence
  source 1..435: mol_type = other DNA
atggaccacggctacgaggagaccagcgtgtacctgaaggactgcatccccagcctggacagcagccagagcacccccaccgaggagctgagcagccagggccagagcaacaccgacaagatcgagtgccaggccgagaactacctgaacgccctgttcagaaagaaggacctgccccagaactgcgaccccaacatccccctggtggcccaggagctgatgaagaagatgatcagacagttcgccatcgagtacatcagcaagagcggcaagacccaggagaacagaaacggcagcatcggccccagcatcgtgtgcaagagcatccagatgaaccaggccgagaacagcctgcaggaggagcaggagggccccctggacctgaccgtgaacagaatgcaggagcagaacacccagcaggcctgctacaagtag

SEQ ID NO: 87066 - DNA, 2187 bp, synthetic construct
  misc_feature 1..2187: note = Description of Artificial Sequence: Synthetic coding sequence
  source 1..2187: mol_type = other DNA
atgaaccagcccgagagcgccaacgaccccgagcccctgtgcgccgtgtgcggccaggcccacagcctggaggagaaccacttctacagctaccccgaggaggtggacgacgacctgatctgccacatctgcctgcaggccctgctggaccccctggacaccccctgcggccacacctactgcaccctgtgcctgaccaacttcctggtggagaaggacttctgccccatggacagaaagcccctggtgctgcagcactgcaagaagagcagcatcctggtgaacaagctgctgaacaagctgctggtgacctgccccttcagagagcactgcacccaggtgctgcagagatgcgacctggagcaccacttccagaccagctgcaagggcgccagccactacggcctgaccaaggacagaaagagaagaagccaggacggctgccccgacggctgcgccagcctgaccgccaccgcccccagccccgaggtgagcgccgccgccaccatcagcctgatgaccgacgagcccggcctggacaaccccgcctacgtgagcagcgccgaggacggccagcccgccatcagccccgtggacagcggcagaagcaacagaaccagagccagacccttcgagagaagcaccatcagaagcagaagcttcaagaagatcaacagagccctgagcgtgctgagaagaaccaagagcggcagcgccgtggccaaccacgccgaccagggcagagagaacagcgagaacaccaccgcccccgaggtgttccccagactgtaccacctgatccccgacggcgagatcaccagcatcaagatcaacagagtggaccccagcgagagcctgagcatcagactggtgggcggcagcgagacccccctggtgcacatcatcatccagcacatctacagagacggcgtgatcgccagagacggcagactgctgcccggcgacatcatcctgaaggtgaacggcatggacatcagcaacgtgccccacaactacgccgtgagactgctgagacagccctgccaggtgctgtggctgaccgtgatgagagagcagaagttcagaagcagaaacaacggccaggcccccgacgcctacagacccagagacgacagcttccacgtgatcctgaacaagagcagccccgaggagcagctgggcatcaagctggtgagaaaggtggacgagcccggcgtgttcatcttcaacgtgctggacggcggcgtggcctacagacacggccagctggaggagaacgacagagtgctggccatcaacggccacgacctgagatacggcagccccgagagcgccgcccacctgatccaggccagcgagagaagagtgcacctggtggtgagcagacaggtgagacagagaagccccgacatcttccaggaggccggctggaacagcaacggcagctggagccccggccccggcgagagaagcaacacccccaagcccctgcaccccaccatcacctgccacgagaaggtggtgaacatccagaaggaccccggcgagagcctgggcatgaccgtggccggcggcgccagccacagagagtgggacctgcccatctacgtgatcagcgtggagcccggcggcgtgatcagcagagacggcagaatcaagaccggcgacatcctgctgaacgtggacggcgtggagctgaccgaggtgagcagaagcgaggccgtggccctgctgaagagaaccagcagcagcatcgtgctgaaggccctggaggtgaaggagtacgagccccaggaggactgcagcagccccgccgccctggacagcaaccacaacatggccccccccagcgactggagccccagctgggtgatgtggctggagctgcccagatgcctgtacaactgcaaggacatcgtgctgagaagaaacaccgccggcagcctgggcttctgcatcgtgggcggctacgaggagtacaacggcaacaagcccttcttcatcaagagcatcgtggagggcacccccgcctacaacgacggcagaatcagatgcggcgacatcctgctggccgtgaacggcagaagcaccagcggcatgatccacgcctgcctggccagactgctgaaggagctgaagggcagaatcaccctgaccatcgtgagctggcccggcaccttcctgtag

SEQ ID NO: 87067 - DNA, 1899 bp, synthetic construct
  misc_feature 1..1899: note = Description of Artificial Sequence: Synthetic coding sequence
  source 1..1899: mol_type = other DNA
atgaaggccctgctgctgctggtgctgccctggctgagccccgccaactacatcgacaacgtgggcaacctgcacttcctgtacagcgagctgtgcaagggcgccagccactacggcctgaccaaggacagaaagagaagaagccaggacggctgccccgacggctgcgccagcctgaccgccaccgcccccagccccgaggtgagcgccgccgccaccatcagcctgatgaccgacgagcccggcctggacaaccccgcctacgtgagcagcgccgaggacggccagcccgccatcagccccgtggacagcggcagaagcaacagaaccagagccagacccttcgagagaagcaccatcagaagcagaagcttcaagaagatcaacagagccctgagcgtgctgagaagaaccaagagcggcagcgccgtggccaaccacgccgaccagggcagagagaacagcgagaacaccaccgcccccgaggtgttccccagactgtaccacctgatccccgacggcgagatcaccagcatcaagatcaacagagtggaccccagcgagagcctgagcatcagactggtgggcggcagcgagacccccctggtgcacatcatcatccagcacatctacagagacggcgtgatcgccagagacggcagactgctgcccggcgacatcatcctgaaggtgaacggcatggacatcagcaacgtgccccacaactacgccgtgagactgctgagacagccctgccaggtgctgtggctgaccgtgatgagagagcagaagttcagaagcagaaacaacggccaggcccccgacgcctacagacccagagacgacagcttccacgtgatcctgaacaagagcagccccgaggagcagctgggcatcaagctggtgagaaaggtggacgagcccggcgtgttcatcttcaacgtgctggacggcggcgtggcctacagacacggccagctggaggagaacgacagagtgctggccatcaacggccacgacctgagatacggcagccccgagagcgccgcccacctgatccaggccagcgagagaagagtgcacctggtggtgagcagacaggtgagacagagaagccccgacatcttccaggaggccggctggaacagcaacggcagctggagccccggccccggcgagagaagcaacacccccaagcccctgcaccccaccatcacctgccacgagaaggtggtgaacatccagaaggaccccggcgagagcctgggcatgaccgtggccggcggcgccagccacagagagtgggacctgcccatctacgtgatcagcgtggagcccggcggcgtgatcagcagagacggcagaatcaagaccggcgacatcctgctgaacgtggacggcgtggagctgaccgaggtgagcagaagcgaggccgtggccctgctgaagagaaccagcagcagcatcgtgctgaaggccctggaggtgaaggagtacgagccccaggaggactgcagcagccccgccgccctggacagcaaccacaacatggccccccccagcgactggagccccagctgggtgatgtggctggagctgcccagatgcctgtacaactgcaaggacatcgtgctgagaagaaacaccgccggcagcctgggcttctgcatcgtgggcggctacgaggagtacaacggcaacaagcccttcttcatcaagagcatcgtggagggcacccccgcctacaacgacggcagaatcagatgcggcgacatcctgctggccgtgaacggcagaagcaccagcggcatgatccacgcctgcctggccagactgctgaaggagctgaagggcagaatcaccctgaccatcgtgagctggcccggcaccttcctgtag

SEQ ID NO: 87068 - DNA, 21 bp, synthetic construct
  misc_feature 1..21: note = Description of Artificial Sequence: Synthetic coding sequence
  source 1..21: mol_type = other DNA
atgaaccagcccgagagctag

SEQ ID NO: 87069 - DNA, 51 bp, synthetic construct
  misc_feature 1..51: note = Description of Artificial Sequence: Synthetic coding sequence
  source 1..51: mol_type = other DNA
atgaaccagcccgagagcgccaacgaccccgagcccctgtgcgccgtgtag

SEQ ID NO: 87070 - DNA, 300 bp, synthetic construct
  misc_feature 1..300: note = Description of Artificial Sequence: Synthetic coding sequence
  source 1..300: mol_type = other DNA
atgaaccagcccgagagcgccaacgaccccgagcccctgtgcgccgtgtgcggccaggcccacagcctggaggagaaccacttctacagctaccccgaggaggtggacgacgacctgatctgccacatctgcctgcaggccctgctggaccccctggacaccccctgcggccacacctactgcaccctgtgcctgaccaacttcctggtggagaaggacttctgccccatggacagaaagcccctggtgctgcagcactgcaagaagagcagcatcctggtgaacaagctgctgaactag

SEQ ID NO: 87071 - DNA, 273 bp, synthetic construct
  misc_feature 1..273: note = Description of Artificial Sequence: Synthetic coding sequence
  source 1..273: mol_type = other DNA
atgaaccagcccgagagcgccaacgaccccgagcccctgtgcgccgtgtgcggccaggcccacagcctggaggagaaccacttctacagctaccccgaggaggtggacgacgacctgatctgccacatctgcctgcaggccctgctggaccccctggacaccccctgcggccacacctactgcaccctgtgcctgaccaacttcctggtggagaaggacttctgccccatggacagaaagcccctggtgctgcagcactgcaagaagagctag

SEQ ID NO: 87072 - DNA, 381 bp, synthetic construct
  misc_feature 1..381: note = Description of Artificial Sequence: Synthetic coding sequence
  source 1..381: mol_type = other DNA
atgaaccagcccgagagcgccaacgaccccgagcccctgtgcgccgtgtgcggccaggcccacagcctggaggagaaccacttctacagctaccccgaggaggtggacgacgacctgatctgccacatctgcctgcaggccctgctggaccccctggacaccccctgcggccacacctactgcaccctgtgcctgaccaacttcctggtggagaaggacttctgccccatggacagaaagcccctggtgctgcagcactgcaagaagagcagcatcctggtgaacaagctgctgaacaagctgctggtgacctgccccttcagagagcactgcacccaggtgctgcagagatgcgacctggagcaccacttccagacctag

SEQ ID NO: 87073 - DNA, 1701 bp, synthetic construct
  misc_feature 1..1701: note = Description of Artificial Sequence: Synthetic coding sequence
  source 1..1701: mol_type = other DNA
atggccgtgcagaccgccgtgagagccagccagcccagactgccccccctggacaaccccgcctacgtgagcagcgccgaggacggccagcccgccatcagccccgtggacagcggcagaagcaacagaaccagagccagacccttcgagagaagcaccatcagaagcagaagcttcaagaagatcaacagagccctgagcgtgctgagaagaaccaagagcggcagcgccgtggccaaccacgccgaccagggcagagagaacagcgagaacaccaccgcccccgaggtgttccccagactgtaccacctgatccccgacggcgagatcaccagcatcaagatcaacagagtggaccccagcgagagcctgagcatcagactggtgggcggcagcgagacccccctggtgcacatcatcatccagcacatctacagagacggcgtgatcgccagagacggcagactgctgcccggcgacatcatcctgaaggtgaacggcatggacatcagcaacgtgccccacaactacgccgtgagactgctgagacagccctgccaggtgctgtggctgaccgtgatgagagagcagaagttcagaagcagaaacaacggccaggcccccgacgcctacagacccagagacgacagcttccacgtgatcctgaacaagagcagccccgaggagcagctgggcatcaagctggtgagaaaggtggacgagcccggcgtgttcatcttcaacgtgctggacggcggcgtggcctacagacacggccagctggaggagaacgacagagtgctggccatcaacggccacgacctgagatacggcagccccgagagcgccgcccacctgatccaggccagcgagagaagagtgcacctggtggtgagcagacaggtgagacagagaagccccgacatcttccaggaggccggctggaacagcaacggcagctggagccccggccccggcgagagaagcaacacccccaagcccctgcaccccaccatcacctgccacgagaaggtggtgaacatccagaaggaccccggcgagagcctgggcatgaccgtggccggcggcgccagccacagagagtgggacctgcccatctacgtgatcagcgtggagcccggcggcgtgatcagcagagacggcagaatcaagaccggcgacatcctgctgaacgtggacggcgtggagctgaccgaggtgagcagaagcgaggccgtggccctgctgaagagaaccagcagcagcatcgtgctgaaggccctggaggtgaaggagtacgagccccaggaggactgcagcagccccgccgccctggacagcaaccacaacatggccccccccagcgactggagccccagctgggtgatgtggctggagctgcccagatgcctgtacaactgcaaggacatcgtgctgagaagaaacaccgccggcagcctgggcttctgcatcgtgggcggctacgaggagtacaacggcaacaagcccttcttcatcaagagcatcgtggagggcacccccgcctacaacgacggcagaatcagatgcggcgacatcctgctggccgtgaacggcagaagcaccagcggcatgatccacgcctgcctggccagactgctgaaggagctgaagggcagaatcaccctgaccatcgtgagctggcccggcaccttcctgtag

SEQ ID NO: 87074 - DNA, 2073 bp, synthetic construct
  misc_feature 1..2073: note = Description of Artificial Sequence: Synthetic coding sequence
  source 1..2073: mol_type = other DNA
atgggcaccaccagcgacgagatggtgagcgtggagcagaccagcagcagcagcctgaaccccctgtgcttcgagtgcggccagcagcactggaccagagagaaccacctgtacaactaccagaacgaggtggacgacgacctggtgtgccacatctgcctgcagcccctgctgcagcccctggacaccccctgcggccacaccttctgctacaagtgcctgagaaacttcctgcaggagaaggacttctgccccctggacagaaagagactgcacttcaagctgtgcaagaagagcagcatcctggtgcacaagctgctggacaagctgctggtgctgtgccccttcagcagcgtgtgcaaggacgtgatgcagagatgcgacctggaggcccacctgaagaacagatgccccggcgccagccacagaagagtggccctggagagaagaaagaccagcagaacccaggccgagatcgagaacgagaacggccccaccctgctggaccccgccggcaccctgagccccgaggccgactgcctgggcaccggcgccgtgcccgtggagagacacctgaccagcgccagcctgagcacctggagcgaggagcccggcctggacaaccccgccttcgaggagagcgccggcgccgacaccacccagcagcccctgagcctgcccgagggcgagatcaccaccatcgagatccacagaagcaacccctacatccagctgggcatcagcatcgtgggcggcaacgagacccccctgatcaacatcgtgatccaggaggtgtacagagacggcgtgatcgccagagacggcagactgctggccggcgaccagatcctgcaggtgaacaactacaacatcagcaacgtgagccacaactacgccagagccgtgctgagccagccctgcaacaccctgcacctgaccgtgctgagagagagaagattcggcaacagagcccacaaccacagcgacagcaacagccccagagaggagatcttccaggtggccctgcacaagagagacagcggcgagcagctgggcatcaagctggtgagaagaaccgacgagcccggcgtgttcatcctggacctgctggagggcggcctggccgcccaggacggcagactgagcagcaacgacagagtgctggccatcaacggccacgacctgaagtacggcacccccgagctggccgcccagatcatccaggccagcggcgagagagtgaacctgaccatcgccagacccggcaagccccagcccggcaacaccatcagagaggccggcaaccacagcagcagcagccagcaccacaccccccccccctactacagcagacccagcagccacaaggacctgacccagtgcgtgacctgccaggagaagcacatcaccgtgaagaaggagccccacgagagcctgggcatgaccgtggccggcggcagaggcagcaagagcggcgagctgcccatcttcgtgaccagcgtgcccccccacggctgcctggccagagacggcagaatcaagagaggcgacgtgctgctgaacatcaacggcatcgacctgaccaacctgagccacagcgaggccgtggccatgctgaaggccagcgccgccagccccgccgtggccctgaaggccctggaggtgcagatcgtggaggaggccacccagaacgccgaggagcagcccagcaccttcagcgagaacgagtacgacgccagctggagccccagctgggtgatgtggctgggcctgcccagcaccctgcacagctgccacgacatcgtgctgagaagaagctacctgggcagctggggcttcagcatcgtgggcggctacgaggagaaccacaccaaccagcccttcttcatcaagaccatcgtgctgggcacccccgcctactacgacggcagactgaagtgcggcgacatgatcgtggccgtgaacggcctgagcaccgtgggcatgagccacagcgccctggtgcccatgctgaaggagcagagaaacaaggtgaccctgaccgtgatctgctggcccggcagcctggtgtag

SEQ ID NO: 87075 - DNA, 2115 bp, synthetic construct
  misc_feature 1..2115: note = Description of Artificial Sequence: Synthetic coding sequence
  source 1..2115: mol_type = other DNA
atgctgggcatctgcagaggcagaagaaagttcctggccgccagcctgagcctgctgtgcatccccgccatcacctggatctacctgttcagcggcagcttcgaggacggcaagcccgtgagcctgagccccctggagagccaggcccacagccccagatacaccgccagcagccagagagagagagagagcctggaggtgagaatgagagaggtggaggaggagaacagagccctgagaagacagctgagcctggcccagggcagagcccccagccacagaagaggcaaccacagcaagacctacagcatggaggagggcaccggcgacagcgagaacctgagagccggcatcgtggccggcaacagcagcgagtgcggccagcagcccgtggtggagaagtgcgagaccatccacgtggccatcgtgtgcgccggctacaacgccagcagagacgtggtgaccctggtgaagagcgtgctgttccacagaagaaaccccctgcacttccacctgatcgccgacagcatcgccgagcagatcctggccaccctgttccagacctggatggtgcccgccgtgagagtggacttctacaacgccgacgagctgaagagcgaggtgagctggatccccaacaagcactacagcggcatctacggcctgatgaagctggtgctgaccaagaccctgcccgccaacctggagagagtgatcgtgctggacaccgacatcaccttcgccaccgacatcgccgagctgtgggccgtgttccacaagttcaagggccagcaggtgctgggcctggtggagaaccagagcgactggtacctgggcaacctgtggaagaaccacagaccctggcccgccctgggcagaggctacaacaccggcgtgatcctgctgctgctggacaagctgagaaagatgaagtgggagcagatgtggagactgaccgccgagagagagctgatgggcatgctgagcaccagcctggccgaccaggacatcttcaacgccgtgatcaagcagaaccccttcctggtgtaccagctgccctgcttctggaacgtgcagctgagcgaccacaccagaagcgagcagtgctacagagacgtgagcgacctgaagctgcagaagcagctgagcgagctggacgaggacgacctgtgctacgagttcagaagagagagattcaccgtgcacagaacccacctgtacttcctgcactacgagtacgagcccgccgccgacagcaccgacgtgaccctggtggcccagctgagcatggacagactgcagatgctggaggccatctgcaagcactgggagggccccatcagcctggccctgtacctgagcgacgccgaggcccagcagttcctgagatacgcccagggcagcgaggtgctgatgagcagacacaacgtgggctaccacatcgtgtacaaggagggccagttctaccccgtgaacctgctgagaaacgtggccatgaagcacatcagcaccccctacatgttcctgagcgacatcgacttcctgcccatgtacggcctgtacgagtacctgagaaagagcgtgatccagctggacctggccaacaccaagaaggccatgatcgtgcccgccttcgagaccctgagatacagactgagcttccccaagagcaaggccgagctgctgagcatgctggacatgggcaccctgttcaccttcagataccacgtgtggaccaagggccacgcccccaccaacttcgccaagtggagaaccgccaccaccccctacagagtggagtgggaggccgacttcgagccctacgtggtggtgagaagagactgccccgagtacgacagaagattcgtgggcttcggctggaacaaggtggcccacatcatggagctggacgtgcaggagtacgagttcatcgtgctgcccaacgcctacatgatccacatgccccacgcccccagcttcgacatcaccaagttcagaagcaacaagcagtacagaatctgcctgaagaccctgaaggaggagttccagcaggacatgagcagaagatacggcttcgccgccctgaagtacctgaccgccgagaacaacagctag

SEQ ID NO: 87076 - DNA, 2271 bp, synthetic construct
  misc_feature 1..2271: note = Description of Artificial Sequence: Synthetic coding sequence
  source 1..2271: mol_type = other DNA
atgctgggcatctgcagaggcagaagaaagttcctggccgccagcctgagcctgctgtgcatccccgccatcacctggatctacctgttcagcggcagcttcgaggacggcaagcccgtgagcctgagccccctggagagccaggcccacagccccagatacaccgccagcagccagagagagagagagagcctggaggtgagaatgagagaggtggaggaggagaacagagccctgagaagacagctgagcctggcccagggcagagcccccagccacagaagaggcaaccacagcaagacctacagcatggaggagggcaccggcgacagcgagaacctgagagccggcatcgtggccggcaacagcagcgagtgcggccagcagcccgtggtggagaagtgcgagaccatccacgtggccatcgtgtgcgccggctacaacgccagcagagacgtggtgaccctggtgaagagcgtgctgttccacagaagaaaccccctgcacttccacctgatcgccgacagcatcgccgagcagatcctggccaccctgttccagacctggatggtgcccgccgtgagagtggacttctacaacgccgacgagctgaagagcgaggtgagctggatccccaacaagcactacagcggcatctacggcctgatgaagctggtgctgaccaagaccctgcccgccaacctggagagagtgatcgtgctggacaccgacatcaccttcgccaccgacatcgccgagctgtgggccgtgttccacaagttcaagggccagcaggtgctgggcctggtggagaaccagagcgactggtacctgggcaacctgtggaagaaccacagaccctggcccgccctgggcagaggctacaacaccggcgtgatcctgctgctgctggacaagctgagaaagatgaagtgggagcagatgtggagactgaccgccgagagagagctgatgggcatgctgagcaccagcctggccgaccaggacatcttcaacgccgtgatcaagcagaaccccttcctggtgtaccagctgccctgcttctggaacgtgcagctgagcgaccacaccagaagcgagcagtgctacagagacgtgagcgacctgaaggtgatccactggaacagccccaagaagctgagagtgaagaacaagcacgtggagttcttcagaaacctgtacctgaccttcctggagtacgacggcaacctgctgagaagagagctgttcggctgccccagcgaggccgacgtgaacagcgagaacctgcagaagcagctgagcgagctggacgaggacgacctgtgctacgagttcagaagagagagattcaccgtgcacagaacccacctgtacttcctgcactacgagtacgagcccgccgccgacagcaccgacgtgaccctggtggcccagctgagcatggacagactgcagatgctggaggccatctgcaagcactgggagggccccatcagcctggccctgtacctgagcgacgccgaggcccagcagttcctgagatacgcccagggcagcgaggtgctgatgagcagacacaacgtgggctaccacatcgtgtacaaggagggccagttctaccccgtgaacctgctgagaaacgtggccatgaagcacatcagcaccccctacatgttcctgagcgacatcgacttcctgcccatgtacggcctgtacgagtacctgagaaagagcgtgatccagctggacctggccaacaccaagaaggccatgatcgtgcccgccttcgagaccctgagatacagactgagcttccccaagagcaaggccgagctgctgagcatgctggacatgggcaccctgttcaccttcagataccacgtgtggaccaagggccacgcccccaccaacttcgccaagtggagaaccgccaccaccccctacagagtggagtgggaggccgacttcgagccctacgtggtggtgagaagagactgccccgagtacgacagaagattcgtgggcttcggctggaacaaggtggcccacatcatggagctggacgtgcaggagtacgagttcatcgtgctgcccaacgcctacatgatccacatgccccacgcccccagcttcgacatcaccaagttcagaagcaacaagcagtacagaatctgcctgaagaccctgaaggaggagttccagcaggacatgagcagaagatacggcttcgccgccctgaagtacctgaccgccgagaacaacagctag

SEQ ID NO: 87077 - DNA, 2271 bp, synthetic construct; identical to SEQ ID NO: 87076
  misc_feature 1..2271: note = Description of Artificial Sequence: Synthetic coding sequence
  source 1..2271: mol_type = other DNA

SEQ ID NO: 87078 - DNA, 2115 bp, synthetic construct; identical to SEQ ID NO: 87075
  misc_feature 1..2115: note = Description of Artificial Sequence: Synthetic coding sequence
  source 1..2115: mol_type = other DNA

SEQ ID NO: 87079 - DNA, 408 bp, synthetic construct
  misc_feature 1..408: note = Description of Artificial Sequence: Synthetic coding sequence
  source 1..408: mol_type = other DNA
atgctgggcatctgcagaggcagaagaaagttcctggccgccagcctgagcctgctgtgcatccccgccatcacctggatctacctgttcagcggcagcttcgaggacggcaagcccgtgagcctgagccccctggagagccaggcccacagccccagatacaccgccagcagccagagagagagagagagcctggaggtgagaatgagagaggtggaggaggagaacagagccctgagaagacagctgagcctggcccagggcagagcccccagccacagaagaggcaaccacagcaagacctacagcatggaggagggcaccggcgacagcgagaacctgagagccggcatcgtggccggcaacagcagcgagtgcggccagcagcccgtggtggagaagtgctag

SEQ ID NO: 87080 - DNA, 144 bp, synthetic construct
  misc_feature 1..144: note = Description of Artificial Sequence: Synthetic coding sequence
  source 1..144: mol_type = other DNA
atgctgggcatctgcagaggcagaagaaagttcctggccgccagcctgagcctgctgtgcatccccgccatcacctggatctacctgttcagcggcagcttcgaggacggcaagcccgtgagcctgagccccctggagagctag

SEQ ID NO: 87081 - DNA, 411 bp, synthetic construct
  misc_feature 1..411: note = Description of Artificial Sequence: Synthetic coding sequence
  source 1..411: mol_type = other DNA
atgctgggcatctgcagaggcagaagaaagttcctggccgccagcctgagcctgctgtgcatccccgccatcacctggatctacctgttcagcggcagcttcgaggacggcaagcccgtgagcctgagccccctggagagccaggcccacagccccagatacaccgccagcagccagagagagagagagagcctggaggtgagaatgagagaggtggaggaggagaacagagccctgagaagacagctgagcctggcccagggcagagcccccagccacagaagaggcaaccacagcaagacctacagcatggaggagggcaccggcgacagcgagaacctgagagccggcatcgtggccggcaacagcagcgagtgcggccagcagcccgtggtggagaagtgcgagtag

SEQ ID NO: 87082 - DNA, 183 bp, synthetic construct
  misc_feature 1..183: note = Description of Artificial Sequence: Synthetic coding sequence
  source 1..183: mol_type = other DNA
atgctgggcatctgcagaggcagaagaaagttcctggccgccagcctgagcctgctgtgcatccccgccatcacctggatctacctgttcagcggcagcttcgaggacggcaagcccgtgagcctgagccccctggagagccaggcccacagccccagatacaccgccagcagccagagatag

SEQ ID NO: 87083 - DNA, 330 bp, synthetic construct
  misc_feature 1..330: note = Description of Artificial Sequence: Synthetic coding sequence
  source 1..330: mol_type = other DNA
atgctgggcatctgcagaggcagaagaaagttcctggccgccagcctgagcctgctgtgcatccccgccatcacctggatctacctgttcagcggcagcttcgaggacggcaagcccgtgagcctgagccccctggagagccaggcccacagccccagatacaccgccagcagccagagagagagagagagcctggaggtgagaatgagagaggtggaggaggagaacagagccctgagaagacagctgagcctggcccagggcagagcccccagccacagaagaggcaaccacagcaagacctacagcatggaggagggcaccggctag

SEQ ID NO: 87084 - DNA, 2124 bp, synthetic construct
  misc_feature 1..2124: note = Description of Artificial Sequence: Synthetic coding sequence
  source 1..2124: mol_type = other DNA
atgctgggcatctgcagaggcagaagaaagttcctggccgccagcctgagcctgctgtgcatccccgccatcacctggatctacctgttcagcggcagcttcgaggacggcaagcccgtgagcctgagccccctggagagccaggcccacagccccagatacaccgccagcagccagagagagagagagagcctggaggtgagaatgagagaggtggaggaggagaacagagccctgagaagacagctgagcctggcccagggcagagcccccagccacagaagaggcaaccacagcaagacctacagcatggaggagggcaccggcgacagcgagaacctgagagccggcatcgtggccggcaacagcagcgagtgcggccagcagcccgtggtggagaagtgcgagaccatccacgtggccatcgtgtgcgccggctacaacgccagcagagacgtggtgaccctggtgaagagcgtgctgttccacagaagaaaccccctgcacttccacctgatcgccgacagcatcgccgagcagatcctggccaccctgttccagacctggatggtgcccgccgtgagagtggacttctacaacgccgacgagctgaagagcgaggtgagctggatccccaacaagcactacagcggcatctacggcctgatgaagctggtgctgaccaagaccctgcccgccaacctggagagagtgatcgtgctggacaccgacatcaccttcgccaccgacatcgccgagctgtgggccgtgttccacaagttcaagggccagcaggtgctgggcctggtggagaaccagagcgactggtacctgggcaacctgtggaagaaccacagaccctggcccgccctgggcagaggctacaacaccggcgtgatcctgctgctgctggacaagctgagaaagatgaagtgggagcagatgtggagactgaccgccgagagagagctgatgggcatgctgagcaccagcctggccgaccaggacatcttcaacgccgtgatcaagcagaaccccttcctggtgtaccagctgccctgcttctggaacgtgcagctgagcgaccacaccagaagcgagcagtgctacagagacgtgagcgacctgaaggtgatccactggaacagccccaagaagctgagagtgaagaacaagcacgtggagttcttcagaaacctgtacctgaccttcctggagtacgacggcaacctgctgagaagagagctgttcggctgccccagcgaggccgacgtgaacagcgagaacctgcagaagcagctgagcgagctggacgaggacgacctgtgctacgagttcagaagagagagattcaccgtgcacagaacccacctgtacttcctgcactacgagtacgagcccgccgccgacagcaccgacgtgaccctggtggcccagctgagcatggacagactgcagatgctggaggccatctgcaagcactgggagggccccatcagcctggccctgtacctgagcgacgccgaggcccagcagttcctgagatacgcccagggcagcgaggtgctgatgagcagacacaacgtgggctaccacatcgtgtacaaggagggccagttctaccccgtgaacctgctgagaaacgtggccatgaagcacatcagcaccccctacatgttcctgagcgacatcgacttcctgcccatgtacggcctgtacgagtacctgagataccacgtgtggaccaagggccacgcccccaccaacttcgccaagtggagaaccgccaccaccccctacagagtggagtgggaggccgacttcgagccctacgtggtggtgagaagagactgccccgagtacgacagaagattcgtgggcttcggctggaacaaggtggcccacatcatggagctggacgtgcaggagtacgagttcatcgtgctgcccaacgcctacatgatccacatgccccacgcccccagcttcgacatcaccaagttcagaagcaacaagcagtacagaatctgcctgaagaccctgaaggaggagttccagcaggacatgagcagaagatacggcttcgccgccctgaagtacctgaccgccgagaacaacagctag

SEQ ID NO: 87085 - DNA, 1668 bp, synthetic construct
  misc_feature 1..1668: note = Description of Artificial Sequence: Synthetic coding sequence
  source 1..1668: mol_type = other DNA
atgctgatctggagcgaggtgagctggatccccaacaagcactacagcggcatctacggcctgatgaagctggtgctgaccaagaccctgcccgccaacctggagagagtgatcgtgctggacaccgacatcaccttcgccaccgacatcgccgagctgtgggccgtgttccacaagttcaagggccagcaggtgctgggcctggtggagaaccagagcgactggtacctgggcaacctgtggaagaaccacagaccctggcccgccctgggcagaggctacaacaccggcgtgatcctgctgctgctggacaagctgagaaagatgaagtgggagcagatgtggagactgaccgccgagagagagctgatgggcatgctgagcaccagcctggccgaccaggacatcttcaacgccgtgatcaagcagaaccccttcctggtgtaccagctgccctgcttctggaacgtgcagctgagcgaccacaccagaagcgagcagtgctacagagacgtgagcgacctgaaggtgatccactggaacagccccaagaagctgagagtgaagaacaagcacgtggagttcttcagaaacctgtacctgaccttcctggagtacgacggcaacctgctgagaagagagctgttcggctgccccagcgaggccgacgtgaacagcgagaacctgcagaagcagctgagcgagctggacgaggacgacctgtgctacgagttcagaagagagagattcaccgtgcacagaacccacctgtacttcctgcactacgagtacgagcccgccgccgacagcaccgacgtgaccctggtggcccagctgagcatggacagactgcagatgctggaggccatctgcaagcactgggagggccccatcagcctggccctgtacctgagcgacgccgaggcccagcagttcctgagatacgcccagggcagcgaggtgctgatgagcagacacaacgtgggctaccacatcgtgtacaaggagggccagttctaccccgtgaacctgctgagaaacgtggccatgaagcacatcagcaccccctacatgttcctgagcgacatcgacttcctgcccatgtacggcctgtacgagtacctgagaaagagcgtgatccagctggacctggccaacaccaagaaggccatgatcgtgcccgccttcgagaccctgagatacagactgagcttccccaagagcaaggccgagctgctgagcatgctggacatgggcaccctgttcaccttcagataccacgtgtggaccaagggccacgcccccaccaacttcgccaagtggagaaccgccaccaccccctacagagtggagtgggaggccgacttcgagccctacgtggtggtgagaagagactgccccgagtacgacagaagattcgtgggcttcggctggaacaaggtggcccacatcatggagctggacgtgcaggagtacgagttcatcgtgctgcccaacgcctacatgatccacatgccccacgcccccagcttcgacatcaccaagttcagaagcaacaagcagtacagaatctgcctgaagaccctgaaggaggagttccagcaggacatgagcagaagatacggcttcgccgccctgaagtacctgaccgccgagaacaacagctag

SEQ ID NO: 87086 - DNA, 1098 bp, synthetic construct
  misc_feature 1..1098: note = Description of Artificial Sequence: Synthetic coding sequence
  source 1..1098: mol_type = other DNA
atggccaaggtggccaaggacctgaaccccggcgtgaagaagatgagcctgggccagctgcagagcgccagaggcgtggcctgcctgggctgcaagggcacctgcagcggcttcgagccccacagctggagaaagatctgcaagagctgcaagtgcagccaggaggaccactgcctgaccagcgacctggaggacgacagaaagatcggcagactgctgatggacagcaagtacagcaccctgaccgccagagtgaagggcggcgacggcatcagaatctacaagagaaacagaatgatcatgaccaaccccatcgccaccggcaaggaccccaccttcgacaccatcacctacgagtgggccccccccggcgtgacccagaagctgggcctgcagtacatggagctgatccccaaggagaagcagcccgtgaccggcaccgagggcgccttctacagaagaagacagctgatgcaccagctgcccatctacgaccaggaccccagcagatgcagaggcctgctggagaacgagctgaagctgatggaggagttcgtgaagcagtacaagagcgaggccctgggcgtgggcgaggtggccctgcccggccagggcggcctgcccaaggaggagggcaagcagcaggagaagcccgagggcgccgagaccaccgccgccaccaccaacggcagcctgagcgaccccagcaaggaggtggagtacgtgtgcgagctgtgcaagggcgccgccccccccgacagccccgtggtgtacagcgacagagccggctacaacaagcagtggcaccccacctgcttcgtgtgcgccaagtgcagcgagcccctggtggacctgatctacttctggaaggacggcgccccctggtgcggcagacactactgcgagagcctgagacccagatgcagcggctgcgacgagatcatcttcgccgaggactaccagagagtggaggacctggcctggcacagaaagcacttcgtgtgcgagggctgcgagcagctgctgagcggcagagcctacatcgtgaccaagggccagctgctgtgccccacctgcagcaagagcaagagaagctag

SEQ ID NO: 87087 - DNA, 762 bp, synthetic construct
  misc_feature 1..762: note = Description of Artificial Sequence: Synthetic coding sequence
  source 1..762: mol_type = other DNA
atgttcggcatgcagggcgacgtgttcggcctgagagccaccttcatggagggcctgcagtacatggagctgatccccaaggagaagcagcccgtgaccggcaccgagggcgccttctacagaagaagacagctgatgcaccagctgcccatctacgaccaggaccccagcagatgcagaggcctgctggagaacgagctgaagctgatggaggagttcgtgaagcagtacaagagcgaggccctgggcgtgggcgaggtggccctgcccggccagggcggcctgcccaaggaggagggcaagcagcaggagaagcccgagggcgccgagaccaccgccgccaccaccaacggcagcctgagcgaccccagcaaggaggtggagtacgtgtgcgagctgtgcaagggcgccgccccccccgacagccccgtggtgtacagcgacagagccggctacaacaagcagtggcaccccacctgcttcgtgtgcgccaagtgcagcgagcccctggtggacctgatctacttctggaaggacggcgccccctggtgcggcagacactactgcgagagcctgagacccagatgcagcggctgcgacgagatcatcttcgccgaggactaccagagagtggaggacctggcctggcacagaaagcacttcgtgtgcgagggctgcgagcagctgctgagcggcagagcctacatcgtgaccaagggccagctgctgtgccccacctgcagcaagagcaagagaagctag

SEQ ID NO: 87088 - DNA, 879 bp, synthetic construct
  misc_feature 1..879: note = Description of Artificial Sequence: Synthetic coding sequence
  source 1..879: mol_type = other DNA
atggacagcaagtacagcaccctgaccgccagagtgaagggcggcgacggcatcagaatctacaagagaaacagaatgatcatgaccaaccccatcgccaccggcaaggaccccaccttcgacaccatcacctacgagtgggccccccccggcgtgacccagaagctgggcctgcagtacatggagctgatccccaaggagaagcagcccgtgaccggcaccgagggcgccttctacagaagaagacagctgatgcaccagctgcccatctacgaccaggaccccagcagatgcagaggcctgctggagaacgagctgaagctgatggaggagttcgtgaagcagtacaagagcgaggccctgggcgtgggcgaggtggccctgcccggccagggcggcctgcccaaggaggagggcaagcagcaggagaagcccgagggcgccgagaccaccgccgccaccaccaacggcagcctgagcgaccccagcaaggaggtggagtacgtgtgcgagctgtgcaagggcgccgccccccccgacagccccgtggtgtacagcgacagagccggctacaacaagcagtggcaccccacctgcttcgtgtgcgccaagtgcagcgagcccctggtggacctgatctacttctggaaggacggcgccccctggtgcggcagacactactgcgagagcctgagacccagatgcagcggctgcgacgagatcatcttcgccgaggactaccagagagtggaggacctggcctggcacagaaagcacttcgtgtgcgagggctgcgagcagctgctgagcggcagagcctacatcgtgaccaagggccagctgctgtgccccacctgcagcaagagcaagagaagctag

SEQ ID NO: 87089 - DNA, 744 bp, synthetic construct
  misc_feature 1..744: note = Description of Artificial Sequence: Synthetic coding sequence
  source 1..744: mol_type = other DNA
atggccaaggtggccaaggacctgaaccccggcgtgaagaagatgagcctgggccagctgcagagcgccagaggcgtggcctgcctgggctgcaagggcacctgcagcggcttcgagccccacagctggagaaagatctgcaagagctgcaagtgcagccaggaggaccactgcctgaccagcgacctggaggacgacagaaagatcggcagactgctgatggacagcaagtacagcaccctgaccgccagagtgaagggcggcgacggcatcagaatctacaagagaaacagaatgatcatgaccaaccccatcgccaccggcaaggaccccaccttcgacaccatcacctacgagtgggccccccccggcgtgacccagaagctgggcctgcagtacatggagctgatccccaaggagaagcagcccgtgaccggcaccgagggcgccttctacagaagaagacagctgatgcaccagctgcccatctacgaccaggaccccagcagatgcagaggcctgctggagaacgagctgaagctgatggaggagttcgtgaagcagtacaagagcgaggccctgggcgtgggcgaggtggccctgcccggccagggcggcctgcccaaggaggagggcaagcagcaggagaagcccgagggcgccgagaccaccgccgccaccaccaacggcagcctgagcgaccccagcaaggaggtggagtacaagcccgtgcccctggtgtag

SEQ ID NO: 87090 - DNA, 786 bp, synthetic construct
  misc_feature 1..786: note = Description of Artificial Sequence: Synthetic coding sequence
  source 1..786: mol_type = other DNA
atgaaccccaactgcgccagatgcggcaagatcgtgtaccccaccgagaaggtgaactgcctggacaagttctggcacaaggcctgcttccactgcgagacctgcaagatgaccctgaacatgaagaactacaagggctacgagaagaagccctactgcaacgcccactaccccaagcagagcttcaccatggtggccgacacccccgagaacctgagactgaagcagcagagcgagctgcagagccaggtgagatacaaggaggagttcgagaagaacaagggcaagggcttcagcgtggtggccgacacccccgagctgcagagaatcaagaagacccaggaccagatcagcaacatcaagtaccacgaggagttcgagaagagcagaatgggccccagcggcggcgagggcatggagcccgagagaagagacagccaggacggcagcagctacagaagacccctggagcagcagcagccccaccacatccccaccagcgcccccgtgtaccagcagccccagcagcagcccgtggcccagagctacggcggctacaaggagcccgccgcccccgtgagcatccagagaagcgcccccggcggcggcggcaagagatacagagccgtgtacgactacagcgccgccgacgaggacgaggtgagcttccaggacggcgacaccatcgtgaacgtgcagcagatcgacgacggctggatgtacggcaccgtggagagaaccggcgacaccggcatgctgcccgccaactacgtggaggccatctag

SEQ ID NO: 87091 - DNA, 501 bp, synthetic construct
  misc_feature 1..501: note = Description of Artificial Sequence: Synthetic coding sequence
  source 1..501: mol_type = other DNA
atgaccctgaacatgaagaactacaagggctacgagaagaagccctactgcaacgcccactaccccaagcagagcttcaccatggtggccgacacccccgagaacctgagactgaagcagcagagcgagctgcagagccaggtgagatacaaggaggagttcgagaagaacaagggcaagggcttcagcgtggtggccgacacccccgagctgcagagaatcaagaagacccaggaccagatcagcaacatcaagtaccacgaggagttcgagaagagcagaatgggccccagcggcggcgagggcatggagcccgagagaagagacagccaggacggcagcagctacagaagacccctggagcagcagcagccccaccacatccccaccagcgcccccgtgtaccagcagccccagcagcagcccgtggcccagagctacggcggctacaaggagcccgccgcccccgtgagcatccagagaagcgcccccggcggctag

SEQ ID NO: 87092 - DNA, 618 bp, synthetic construct
  misc_feature 1..618: note = Description of Artificial Sequence: Synthetic coding sequence
  source 1..618: mol_type = other DNA
atgctgcccctgagagacctgcaggacgacaccgagcacgaggagctgcagggcctgagagaggaggccctgctgcagagagtgagatacaaggaggagttcgagaagaacaagggcaagggcttcagcgtggtggccgacacccccgagctgcagagaatcaagaagacccaggaccagatcagcaacatcaagtaccacgaggagttcgagaagagcagaatgggccccagcggcggcgagggcatggagcccgagagaagagacagccaggacggcagcagctacagaagacccctggagcagcagcagccccaccacatccccaccagcgcccccgtgtaccagcagccccagcagcagcccgtggcccagagctacggcggctacaaggagcccgccgcccccgtgagcatccagagaagcgcccccggcggcggcggcaagagatacagagccgtgtacgactacagcgccgccgacgaggacgaggtgagcttccaggacggcgacaccatcgtgaacgtgcagcagatcgacgacggctggatgtacggcaccgtggagagaaccggcgacaccggcatgctgcccgccaactacgtggaggccatctag

SEQ ID NO: 87093 - DNA, 786 bp, synthetic construct; identical to SEQ ID NO: 87090
  misc_feature 1..786: note = Description of Artificial Sequence: Synthetic coding sequence
  source 1..786: mol_type = other DNA

SEQ ID NO: 87094 - DNA, 378 bp, synthetic construct
  misc_feature 1..378: note = Description of Artificial Sequence: Synthetic coding sequence
  source 1..378: mol_type = other DNA
atgaaccccaactgcgccagatgcggcaagatcgtgtaccccaccgagaaggtgaactgcctggacaagttctggcacaaggcctgcttccactgcgagacctgcaagatgaccctgaacatgaagaactacaagggctacgagaagaagccctactgcaacgcccactaccccaagcagagcttcaccatggtggccgacacccccgagaacctgagactgaagcagcagagcgagctgcagagccaggtgagatacaaggaggagttcgagaagaacaagggcaagggcttcagcgtggtggccgacacccccgagctgcagagaagcagcctgggcttcctgtggaacgagatcccccccagcccccacctgtag

SEQ ID NO: 87095 - DNA, 4050 bp, synthetic construct
  misc_feature 1..4050: note = Description of Artificial Sequence: Synthetic coding sequence
  source 1..4050: mol_type = other DNA
atgaagaagatcagaatctgccacatcttcaccttctacagctggatgagctacgacgtgctgttccagagaaccgagctgggcgccctggagatctggagacagctgatctgcgcccacgtgtgcatctgcgtgggctggctgtacctgagagacagagtgtgcagcaagaaggacatcatcctgagaaccgagcagaacagcggcagaaccatcctgatcaaggccgtgaccgagaagaacttcgagaccaaggacttcagagccagcctggagaacggcgtgctgctgtgcgacctgatcaacaagctgaagcccggcgtgatcaagaagatcaacagactgagcacccccatcgccggcctggacaacatcaacgtgttcctgaaggcctgcgagcagatcggcctgaaggaggcccagctgttccaccccggcgacctgcaggacctgagcaacagagtgaccgtgaagcaggaggagaccgacagaagagtgaagaacgtgctgatcaccctgtactggctgggcagaaaggcccagagcaacccctactacaacggcccccacctgaacctgaaggccttcgagaacctgctgggccaggccctgaccaaggccctggaggacagcagcttcctgaagagaagcggcagagacagcggctacggcgacatctggtgccccgagagaggcgagttcctggccccccccagacaccacaagagagaggacagcttcgagagcctggacagcctgggcagcagaagcctgaccagctgcagcagcgacatcaccctgagaggcggcagagagggcttcgagagcgacaccgacagcgagttcaccttcaagatgcaggactacaacaaggacgacatgagctacagaagaatcagcgccgtggagcccaagaccgccctgcccttcaacagattcctgcccaacaagagcagacagcccagctacgtgcccgcccccctgagaaagaagaagcccgacaagcacgaggacaacagaagaagctgggccagccccgtgtacaccgaggccgacggcaccttcagcagactgttccagaagatctacggcgagaacggcagcaagagcatgagcgacgtgagcgccgaggacgtgcagaacctgagacagctgagatacgaggagatgcagaagatcaagagccagctgaaggagcaggaccagaagtggcaggacgacctggccaagtggaaggacagaagaaagagctacaccagcgacctgcagaagaagaaggaggagagagaggagatcgagaagcaggccctggagaagagcaagagaagcagcaagaccttcaaggagatgctgcaggacagagagagccagaaccagaagagcaccgtgcccagcagaagaagaatgtacagcttcgacgacgtgctggaggagggcaagagaccccccaccatgaccgtgagcgaggccagctaccagagcgagagagtggaggagaagggcgccacctaccccagcgagatccccaaggaggacagcaccaccttcgccaagagagaggacagagtgaccaccgagatccagctgcccagccagagccccgtggaggagcagagccccgccagcctgagcagcctgagaagcagaagcacccagatggagagcaccagagtgagcgccagcctgcccagaagctacagaaagaccgacaccgtgagactgaccagcgtggtgacccccagacccttcggcagccagaccagaggcatcagcagcctgcccagaagctacaccatggacgacgcctggaagtacaacggcgacgtggaggacatcaagagaacccccaacaacgtggtgagcacccccgcccccagccccgacgccagccagctggccagcagcctgagcagccagaaggaggtggccgccaccgaggaggacgtgaccagactgcccagccccaccagccccttcagcagcctgagccaggaccaggccgccaccagcaaggccaccctgagcagcaccagcggcctggacctgatgagcgagagcggcgagggcgagatcagcccccagagagaggtgagcagaagccaggaccagttcagcgacatgagaatcagcatcaaccagacccccggcaagagcctggacttcggcttcaccatcaagtgggacatccccggcatcttcgtggccagcgtggaggccggcagccccgccgagttcagccagctgcaggtggacgacgagatcatcgccatcaacaacaccaagttcagctacaacgacagcaaggagtgggaggaggccatggccaaggcccaggagaccggccacctggtgatggacgtgagaagatacggcaaggccggcagccccgagaccaagtggatcgacgccaccagcggcatctacaacagcgagaagagcagcaacctgagcgtgaccaccgacttcagcgagagcctgcagagcagcaacatcgagagcaaggagatcaacggcatccacgacgagagcaacgccttcgagagcaaggccagcgagagcatcagcctgaagaacctgaagagaagaagccagttcttcgagcagggcagcagcgacagcgtggtgcccgacctgcccgtgcccaccatcagcgcccccagcagatgggtgtgggaccaggaggaggagagaaagagacaggagagatggcagaaggagcaggacagactgctgcaggagaagtaccagagagagcaggagaagctgagagaggagtggcagagagccaagcaggaggccgagagagagaacagcaagtacctggacgaggagctgatggtgctgagcagcaacagcatgagcctgaccaccagagagcccagcctggccacctgggaggccacctggagcgagggcagcaagagcagcgacagagagggcaccagagccggcgaggaggagagaagacagccccaggaggaggtggtgcacgaggaccagggcaagaagccccaggaccagctggtgatcgagagagagagaaagtgggagcagcagctgcaggaggagcaggagcagaagagactgcaggccgaggccgaggagcagaagagacccgccgaggagcagaagagacaggccgagatcgagagagagaccagcgtgagaatctaccagtacagaagacccgtggacagctacgacatccccaagaccgaggaggccagcagcggcttcctgcccggcgacagaaacaagagcagaagcaccaccgagctggacgactacagcaccaacaagaacggcaacaacaagtacctggaccagatcggcaacatgaccagcagccagagaagaagcaagaaggagcaggtgcccagcggcgccgagctggagagacagcagatcctgcaggagatgagaaagagaacccccctgcacaacgacaacagctggatcagacagagaagcgccagcgtgaacaaggagcccgtgagcctgcccggcatcatgagaagaggcgagagcctggacaacctggacagccccagaagcaacagctggagacagcccccctggctgaaccagcccaccggcttctacgccagcagcagcgtgcaggacttcagcagaccccccccccagctggtgagcaccagcaacagagcctacatgagaaaccccagcagcagcgtgcccccccccagcgccggcagcgtgaagaccagcaccaccggcgtggccaccacccagagccccacccccagaagccacagccccagcgccagccagagcggcagccagctgagaaacagaagcgtgagcggcaagagaatctgcagctactgcaacaacatcctgggcaagggcgccgccatgatcatcgagagcctgggcctgtgctaccacctgcactgcttcaagtgcgtggcctgcgagtgcgacctgggcggcagcagcagcggcgccgaggtgagaatcagaaaccaccagctgtactgcaacgactgctacctgagattcaagagcggcagacccaccgccatgtag

SEQ ID NO: 87096 - DNA, 5013 bp, synthetic construct
  misc_feature 1..5013: note = Description of Artificial Sequence: Synthetic coding sequence
  source 1..5013: mol_type = other DNA
atgaagaagatcagaatctgccacatcttcaccttctacagctggatgagctacgacgtgctgttccagagaaccgagctgggcgccctggagatctggagacagctgatctgcgcccacgtgtgcatctgcgtgggctggctgtacctgagagacagagtgtgcagcaagaaggacatcatcctgagaaccgagcagaacagcggcagaaccatcctgatcaaggccgtgaccgagaagaacttcgagaccaaggacttcagagccagcctggagaacggcgtgctgctgtgcgacctgatcaacaagctgaagcccggcgtgatcaagaagatcaacagactgagcacccccatcgccggcctggacaacatcaacgtgttcctgaaggcctgcgagcagatcggcctgaaggaggcccagctgttccaccccggcgacctgcaggacctgagcaacagagtgaccgtgaagcaggaggagaccgacagaagagtgaagaacgtgctgatcaccctgtactggctgggcagaaaggcccagagcaacccctactacaacggcccccacctgaacctgaaggccttcgagaacctgctgggccaggccctgaccaaggccctggaggacagcagcttcctgaagagaagcggcagagacagcggctacggcgacatctggtgccccgagagaggcgagttcctggccccccccagacaccacaagagagaggacagcttcgagagcctggacagcctgggcagcagaagcctgaccagctgcagcagcgacatcaccctgagaggcggcagagagggcttcgagagcgacaccgacagcgagttcaccttcaagatgcaggactacaacaaggacgacatgagctacagaagaatcagcgccgtggagcccaagaccgccctgcccttcaacagattcctgcccaacaagagcagacagcccagctacgtgcccgcccccctgagaaagaagaagcccgacaagcacgaggacaacagaagaagctgggccagccccgtgtacaccgaggccgacggcaccttcagcagcaaccagagaagaatctggggcaccaacgtggagaactggcccaccgtgcagggcaccagcaagagcagctgctacctggaggaggagaaggccaagaccagaagcatccccaacatcgtgaaggacgacctgtacgtgagaaagctgagccccgtgatgcccaaccccggcaacgccttcgaccagttcctgcccaagtgctggacccccgaggacgtgaactggaagagaatcaagagagagacctacaagccctggtacaaggagttccagggcttcagccagttcctgctgctgcaggccctgcagacctacagcgacgacatcctgagcagcgagacccacaccaagatcgaccccaccagcggccccagactgatcaccagaagaaagaacctgagctacgcccccggctacagaagagacgacctggagatggccgccctggaccccgacctggagaacgacgacttcttcgtgagaaagaccggcgccttccacgccaacccctacgtgctgagagccttcgaggacttcagaaagttcagcgagcaggacgacagcgtggagagagacatcatcctgcagtgcagagagggcgagctggtgctgcccgacctggagaaggacgacatgatcgtgagaagaatccccgcccagaagaaggaggtgcccctgagcggcgcccccgacagataccaccccgtgcccttccccgagccctggaccctgccccccgagatccaggccaagttcctgtgcgtgctggagagaacctgccccagcaaggagaagagcaacagctgcagaatcctggtgcccagctacagacagaagaaggacgacatgctgaccagaaagatccagagctggaagctgggcaccaccgtgccccccatcagcttcacccccggcccctgcagcgaggccgacctgaagagatgggaggccatcagagaggccagcagactgagacacaagaagagactgatggtggagagactgttccagaagatctacggcgagaacggcagcaagagcatgagcgacgtgagcgccgaggacgtgcagaacctgagacagctgagatacgaggagatgcagaagatcaagagccagctgaaggagcaggaccagaagtggcaggacgacctggccaagtggaaggacagaagaaagagctacaccagcgacctgcagaagaagaaggaggagagagaggagatcgagaagcaggccctggagaagagcaagagaagcagcaagaccttcaaggagatgctgcaggacagagagagccagaaccagaagagcaccgtgcccagcagaagaagaatgtacagcttcgacgacgtgctggaggagggcaagagaccccccaccatgaccgtgagcgaggccagctaccagagcgagagagtggaggagaagggcgccacctaccccagcgagatccccaaggaggacagcaccaccttcgccaagagagaggacagagtgaccaccgagatccagctgcccagccagagccccgtggaggagcagagccccgccagcctgagcagcctgagaagcagaagcacccagatggagagcaccagagtgagcgccagcctgcccagaagctacagaaagaccgacaccgtgagactgaccagcgtggtgacccccagacccttcggcagccagaccagaggcatcagcagcctgcccagaagctacaccatggacgacgcctggaagtacaacggcgacgtggaggacatcaagagaacccccaacaacgtggtgagcacccccgcccccagccccgacgccagccagctggccagcagcctgagcagccagaaggaggtggccgccaccgaggaggacgtgaccagactgcccagccccaccagccccttcagcagcctgagccaggaccaggccgccaccagcaaggccaccctgagcagcaccagcggcctggacctgatgagcgagagcggcgagggcgagatcagcccccagagagaggtgagcagaagccaggaccagttcagcgacatgagaatcagcatcaaccagacccccggcaagagcctggacttcggcttcaccatcaagtgggacatccccggcatcttcgtggccagcgtggaggccggcagccccgccgagttcagccagctgcaggtggacgacgagatcatcgccatcaacaacaccaagttcagctacaacgacagcaaggagtgggaggaggccatggccaaggcccaggagaccggccacctggtgatggacgtgagaagatacggcaaggccggcagccccgagaccaagtggatcgacgccaccagcggcatctacaacagcgagaagagcagcaacctgagcgtgaccaccgacttcagcgagagcctgcagagcagcaacatcgagagcaaggagatcaacggcatccacgacgagagcaacgccttcgagagcaaggccagcgagagcatcagcctgaagaacctgaagagaagaagccagttcttcgagcagggcagcagcgacagcgtggtgcccgacctgcccgtgcccaccatcagcgcccccagcagatgggtgtgggaccaggaggaggagagaaagagacaggagagatggcagaaggagcaggacagactgctgcaggagaagtaccagagagagcaggagaagctgagagaggagtggcagagagccaagcaggaggccgagagagagaacagcaagtacctggacgaggagctgatggtgctgagcagcaacagcatgagcctgaccaccagagagcccagcctggccacctgggaggccacctggagcgagggcagcaagagcagcgacagagagggcaccagagccggcgaggaggagagaagacagccccaggaggaggtggtgcacgaggaccagggcaagaagccccaggaccagctggtgatcgagagagagagaaagtgggagcagcagctgcaggaggagcaggagcagaagagactgcaggccgaggccgaggagcagaagagacccgccgaggagcagaagagacaggccgagatcgagagagagaccagcgtgagaatctaccagtacagaagacccgtggacagctacgacatccccaagaccgaggaggccagcagcggcttcctgcccggcgacagaaacaagagcagaagcaccaccgagctggacgactacagcaccaacaagaacggcaacaacaagtacctggaccagatcggcaacatgaccagcagccagagaagaagcaagaaggagcaggtgcccagcggcgccgagctggagagacagcagatcctgcaggagatgagaaagagaacccccctgcacaacgacaacagctggatcagacagagaagcgccagcgtgaacaaggagcccgtgagcctgcccggcatcatgagaagaggcgagagcctggacaacctggacagccccagaagcaacagctggagacagcccccctggctgaaccagcccaccggcttctacgccagcagcagcgtgcaggacttcagcagaccccccccccagctggtgagcaccagcaacagagcctacatgagaaaccccagcagcagcgtgcccccccccagcgccggcagcgtgaagaccagcaccaccggcgtggccaccacccagagccccacccccagaagccacagccccagcgccagccagagcggcagccagctgagaaacagcgtgctgcccgtgagcgtgaccagcgaggccctgccccaggagctgaagagcggcagcgagaccaccaactgcaccgccaccaccgccatcagcgacagcaacctggacggccagcccccctgcgacgtgagcctgcacaccaaggccctgctgcagatcgaggaggaggtggtggccgcccacgtggacctgtag

SEQ ID NO: 87097 - DNA, 4845 bp, synthetic construct
  misc_feature 1..4845: note = Description of Artificial Sequence: Synthetic coding sequence
  source 1..4845: mol_type = other DNA
atgaagaagatcagaatctgccacatcttcaccttctacagctggatgagctacgacgtgctgttccagagaaccgagctgggcgccctggagatctggagacagctgatctgcgcccacgtgtgcatctgcgtgggctggctgtacctgagagacagagtgtgcagcaagaaggacatcatcctgagaaccgagcagaacagcggcagaaccatcctgatcaaggccgtgaccgagaagaacttcgagaccaaggacttcagagccagcctggagaacggcgtgctgctgtgcgacctgatcaacaagctgaagcccggcgtgatcaagaagatcaacagactgagcacccccatcgccggcctggacaacatcaacgtgttcctgaaggcctgcgagcagatcggcctgaaggaggcccagctgttccaccccggcgacctgcaggacctgagcaacagagtgaccgtgaagcaggaggagaccgacagaagagtgaagaacgtgctgatcaccctgtactggctgggcagaaaggcccagagcaacccctactacaacggcccccacctgaacctgaaggccttcgagaacctgctgggccaggccctgaccaaggccctggaggacagcagcttcctgaagagaagcggcagagacagcggctacggcgacatctggtgccccgagagaggcgagttcctggccccccccagacaccacaagagagaggacagcttcgagagcctggacagcctgggcagcagaagcctgaccagctgcagcagcgacatcaccctgagaggcggcagagagggcttcgagagcgacaccgacagcgagttcaccttcaagatgcaggactacaacaaggacgacatgagctacagaagaatcagcgccgtggagcccaagaccgccctgcccttcaacagattcctgcccaacaagagcagacagcccagctacgtgcccgcccccctgagaaagaagaagcccgacaagcacgaggacaacagaagaagctgggccagccccgtgtacaccgaggccgacggcaccttcagcagcaaccagagaagaatctggggcaccaacgtggagaactggcccaccgtgcagggcaccagcaagagcagctgctacctggaggaggagaaggccaagaccagaagcatccccaacatcgtgaaggacgacctgtacgtgagaaagctgagccccgtgatgcccaaccccggcaacgccttcgaccagttcctgcccaagtgctggacccccgaggacgtgaactggaagagaatcaagagagagacctacaagccctggtacaaggagttccagggcttcagccagttcctgctgctgcaggccctgcagacctacagcgacgacatcctgagcagcgagacccacaccaagatcgaccccaccagcggccccagactgatcaccagaagaaagaacctgagctacgcccccggctacagaagagacgacctggagatggccgccctggaccccgacctggagaacgacgacttcttcgtgagaaagaccggcgccttccacgccaacccctacgtgctgagagccttcgaggacttcagaaagttcagcgagcaggacgacagcgtggagagagacatcatcctgcagtgcagagagggcgagctggtgctgcccgacctggagaaggacgacatgatcgtgagaagaatccccgcccagaagaaggaggtgcccctgagcggcgcccccgacagataccaccccgtgcccttccccgagccctggaccctgccccccgagatccaggccaagttcctgtgcgtgctggagagaacctgccccagcaaggagaagagcaacagctgcagaatcctggtgcccagctacagacagaagaaggacgacatgctgaccagaaagatccagagctggaagctgggcaccaccgtgccccccatcagcttcacccccggcccctgcagcgaggccgacctgaagagatgggaggccatcagagaggccagcagactgagacacaagaagagactgatggtggagagactgttccagaagatctacggcgagaacggcagcaagagcatgagcgacgtgagcgccgaggacgtgcagaacctgagacagctgagatacgaggagatgcagaagatcaagagccagctgaaggagcaggaccagaagtggcaggacgacctggccaagtggaaggacagaagaaagagctacaccagcgacctgcagaagaagaaggaggagagagaggagatcgagaagcaggccctggagaagagcaagagaagcagcaagaccttcaaggagatgctgcaggacagagagagccagaaccagaagagcaccgtgcccagcagaagaagaatgtacagcttcgacgacgtgctggaggagggcaagagaccccccaccatgaccgtgagcgaggccagctaccagagcgagagagtggaggagaagggcgccacctaccccagcgagatccccaaggaggacagcaccaccttcgccaagagagaggacagagtgaccaccgagatccagctgcccagccagagccccgtggaggagcagagccccgccagcctgagcagcctgagaagcagaagcacccagatggagagcaccagagtgagcgccagcctgcccagaagctacagaaagaccgacaccgtgagactgaccagcgtggtgacccccagacccttcggcagccagaccagaggcatcagcagcctgcccagaagctacaccatggacgacgcctggaagtacaacggcgacgtggaggacatcaagagaacccccaacaacgtggtgagcacccccgcccccagccccgacgccagccagctggccagcagcctgagcagccagaaggaggtggccgccaccgaggaggacgtgaccagactgcccagccccaccagccccttcagcagcctgagccaggaccaggccgccaccagcaaggccaccctgagcagcaccagcggcctggacctgatgagcgagagcggcgagggcgagatcagcccccagagagaggtgagcagaagccaggaccagttcagcgacatgagaatcagcatcaaccagacccccggcaagagcctggacttcggcttcaccatcaagtgggacatccccggcatcttcgtggccagcgtggaggccggcagccccgccgagttcagccagctgcaggtggacgacgagatcatcgccatcaacaacaccaagttcagctacaacgacagcaaggagtgggaggaggccatggccaaggcccaggagaccggccacctggtgatggacgtgagaagatacggcaaggccggcagccccgagaccaagtggatcgacgccaccagcggcatctacaacagcgagaagagcagcaacctgagcgtgaccaccgacttcagcgagagcctgcagagcagcaacatcgagagcaaggagatcaacggcatccacgacgagagcaacgccttcgagagcaaggccagcgagagcatcagcctgaagaacctgaagagaagaagccagttcttcgagcagggcagcagcgacagcgtggtgcccgacctgcccgtgcccaccatcagcgcccccagcagatgggtgtgggaccaggaggaggagagaaagagacaggagagatggcagaaggagcaggacagactgctgcaggagaagtaccagagagagcaggagaagctgagagaggagtggcagagagccaagcaggaggccgagagagagaacagcaagtacctggacgaggagctgatggtgctgagcagcaacagcatgagcctgaccaccagagagcccagcctggccacctgggaggccacctggagcgagggcagcaagagcagcgacagagagggcaccagagccggcgaggaggagagaagacagccccaggaggaggtggtgcacgaggaccagggcaagaagccccaggaccagctggtgatcgagagagagagaaagtgggagcagcagctgcaggaggagcaggagcagaagagactgcaggccgaggccgaggagcagaagagacccgccgaggagcagaagagacaggccgagatcgagagagagaccagcgtgagaatctaccagtacagaagacccgtggacagctacgacatccccaagaccgaggaggccagcagcggcttcctgcccggcgacagaaacaagagcagaagcaccaccgagctggacgactacagcaccaacaagaacggcaacaacaagtacctggaccagatcggcaacatgaccagcagccagagaagaagcaagaaggagcaggtgcccagcggcgccgagctggagagacagcagatcctgcaggagatgagaaagagaacccccctgcacaacgacaacagctggatcagacagagaagcgccagcgtgaacaaggagcccgtgagcctgcccggcatcatgagaagaggcgagagcctggacaacctggacagccccagaagcaacagctggagacagcccccctggctgaaccagcccaccggcttctacgccagcagcagcgtgcaggacttcagcagaccccccccccagctggtgagcaccagcaacagagcctacatgagaaaccccagcagcagcgtgcccccccccagcgccggcagcgtgaagaccagcaccaccggcgtggccaccacccagagccccacccccagaagccacagccccagcgccagccagagcggcagccagctgagaaacagctggaccgccaacagacacgtgatgtag

SEQ ID NO: 87098 - DNA, 4158 bp, synthetic construct
  misc_feature 1..4158: note = Description of Artificial Sequence: Synthetic coding sequence
  source 1..4158: mol_type = other DNA
atgcaggactacaacaaggacgacatgagctacagaagaatcagcgccgtggagcccaagaccgccctgcccttcaacagattcctgcccaacaagagcagacagcccagctacgtgcccgcccccctgagaaagaagaagcccgacaagcacgaggacaacagaagaagctgggccagccccgtgtacaccgaggccgacggcaccttcagcagcaaccagagaagaatctggggcaccaacgtggagaactggcccaccgtgcagggcaccagcaagagcagctgctacctggaggaggagaaggccaagaccagaagcatccccaacatcgtgaaggacgacctgtacgtgagaaagctgagccccgtgatgcccaaccccggcaacgccttcgaccagttcctgcccaagtgctggacccccgaggacgtgaactggaagagaatcaagagagagacctacaagccctggtacaaggagttccagggcttcagccagttcctgctgctgcaggccctgcagacctacagcgacgacatcctgagcagcgagacccacaccaagatcgaccccaccagcggccccagactgatcaccagaagaaagaacctgagctacgcccccggctacagaagagacgacctggagatggccgccctggaccccgacctggagaacgacgacttcttcgtgagaaagaccggcgccttccacgccaacccctacgtgctgagagccttcgaggacttcagaaagttcagcgagcaggacgacagcgtggagagagacatcatcctgcagtgcagagagggcgagctggtgctgcccgacctggagaaggacgacatgatcgtgagaagaatccccgcccagaagaaggaggtgcccctgagcggcgcccccgacagataccaccccgtgcccttccccgagccctggaccctgccccccgagatccaggccaagttcctgtgcgtgctggagagaacctgccccagcaaggagaagagcaacagctgcagaatcctggtgcccagctacagacagaagaaggacgacatgctgaccagaaagatccagagctggaagctgggcaccaccgtgccccccatcagcttcacccccggcccctgcagcgaggccgacctgaagagatgggaggccatcagagaggccagcagactgagacacaagaagagactgatggtggagagactgttccagaagatctacggcgagaacggcagcaagagcatgagcgacgtgagcgccgaggacgtgcagaacctgagacagctgagatacgaggagatgcagaagatcaagagccagctgaaggagcaggaccagaagtggcaggacgacctggccaagtggaaggacagaagaaagagctacaccagcgacctgcagaagaagaaggaggagagagaggagatcgagaagcaggccctggagaagagcaagagaagcagcaagaccttcaaggagatgctgcaggacagagagagccagaaccagaagagcaccgtgcccagcagaagaagaatgtacagcttcgacgacgtgctggaggagggcaagagaccccccaccatgaccgtgagcgaggccagctaccagagcgagagagtggaggagaagggcgccacctaccccagcgagatccccaaggaggacagcaccaccttcgccaagagagaggacagagtgaccaccgagatccagctgcccagccagagccccgtggaggagcagagccccgccagcctgagcagcctgagaagcagaagcacccagatggagagcaccagagtgagcgccagcctgcccagaagctacagaaagaccgacaccgtgagactgaccagcgtggtgacccccagacccttcggcagccagaccagaggcatcagcagcctgcccagaagctacaccatggacgacgcctggaagtacaacggcgacgtggaggacatcaagagaacccccaacaacgtggtgagcacccccgcccccagccccgacgccagccagctggccagcagcctgagcagccagaaggaggtggccgccaccgaggaggacgtgaccagactgcccagccccaccagccccttcagcagcctgagccaggaccaggccgccaccagcaaggccaccctgagcagcaccagcggcctggacctgatgagcgagagcggcgagggcgagatcagcccccagagagaggtgagcagaagccaggaccagttcagcgacatgagaatcagcatcaaccagacccccggcaagagcctggacttcggcttcaccatcaagtgggacatccccggcatcttcgtggccagcgtggaggccggcagccccgccgagttcagccagctgcaggtggacgacgagatcatcgccatcaacaacaccaagttcagctacaacgacagcaaggagtgggaggaggccatggccaaggcccaggagaccggccacctggtgatggacgtgagaagatacggcaaggccggcagccccgagaccaagtggatcgacgccaccagcggcatctacaacagcgagaagagcagcaacctgagcgtgaccaccgacttcagcgagagcctgcagagcagcaacatcgagagcaaggagatcaacggcatccacgacgagagcaacgccttcgagagcaaggccagcgagagcatcagcctgaagaacctgaagagaagaagccagttcttcgagcagggcagcagcgacagcgtggtgcccgacctgcccgtgcccaccatcagcgcccccagcagatgggtgtgggaccaggaggaggagagaaagagacaggagagatggcagaaggagcaggacagactgctgcaggagaagtaccagagagagcaggagaagctgagagaggagtggcagagagccaagcaggaggccgagagagagaacagcaagtacctggacgaggagctgatggtgctgagcagcaacagcatgagcctgaccaccagagagcccagcctggccacctgggaggccacctggagcgagggcagcaagagcagcgacagagagggcaccagagccggcgaggaggagagaagacagccccaggaggaggtggtgcacgaggaccagggcaagaagccccaggaccagctggtgatcgagagagagagaaagtgggagcagcagctgcaggaggagcaggagcagaagagactgcaggccgaggccgaggagcagaagagacccgccgaggagcagaagagacaggccgagatcgagagagagaccagcgtgagaatctaccagtacagaagacccgtggacagctacgacatccccaagaccgaggaggccagcagcggcttcctgcccggcgacagaaacaagagcagaagcaccaccgagctggacgactacagcaccaacaagaacggcaacaacaagtacctggaccagatcggcaacatgaccagcagccagagaagaagcaagaaggagcaggtgcccagcggcgccgagctggagagacagcagatcctgcaggagatgagaaagagaacccccctgcacaacgacaacagctggatcagacagagaagcgccagcgtgaacaaggagcccgtgagcctgcccggcatcatgagaagaggcgagagcctggacaacctggacagccccagaagcaacagctggagacagcccccctggctgaaccagcccaccggcttctacgccagcagcagcgtgcaggacttcagcagaccccccccccagctggtgagcaccagcaacagagcctacatgagaaaccccagcagcagcgtgcccccccccagcgccggcagcgtgaagaccagcaccaccggcgtggccaccacccagagccccacccccagaagccacagccccagcgccagccagagcggcagccagctgagaaacagcgtgctgcccgtgagcgtgaccagcgaggccctgccccaggagctgaagagcggcagcgagaccaccaactgcaccgccaccaccgccatcagcgacagcaacctggacggccagcccccctgcgacgtgagcctgcacaccaaggccctgctgcagatcgaggaggaggtggtggccgcccacgtggacctgtag

SEQ ID NO: 87099 - DNA, 2280 bp, synthetic construct
  misc_feature 1..2280: note = Description of Artificial Sequence: Synthetic coding sequence
  source 1..2280: mol_type = other DNA
atggagagcagccccttcaacagaagacagtggaccagcctgagcctgagagtgaccgccaaggagctgagcctggtgaacaagaacaagagcagcgccatcgtggagatcttcagcaagtaccagaaggccgccgaggagaccaacatggagaagaagagaagcaacaccgagaacctgagccagcacttcagaaagggcaccctgaccgtgctgaagaagaagtgggagaaccccggcctgggcgccgagagccacaccgacagcctgagaaacagcagcaccgagatcagacacagagccgaccacccccccgccgaggtgaccagccacgccgccagcggcgccaaggccgaccaggaggagcagatccaccccagaagcagactgagaagcccccccgaggccctggtgcagggcagatacccccacatcaaggacggcgaggacctgaaggaccacagcaccgagagcaagaagatggagaactgcctgggcgagagcagacacgaggtggagaagagcgagatcagcgagaacaccgacgccagcggcaagatcgagaagtacaacgtgcccctgaacagactgaagatgatgttcgagaagggcgagcccacccagaccaagatcctgagagcccagagcagaagcgccagcggcagaaagatcagcgagaacagctacagcctggacgacctggagatcggccccggccagctgagcagcagcaccttcgacagcgagaagaacgagagcagaagaaacctggagctgcccagactgagcgagaccagcatcaaggacagaatggccaagtaccaggccgccgtgagcaagcagagcagcagcaccaactacaccaacgagctgaaggccagcggcggcgagatcaagatccacaagatggagcagaaggagaacgtgccccccggccccgaggtgtgcatcacccaccaggagggcgagaagatcagcgccaacgagaacagcctggccgtgagaagcacccccgccgaggacgacagcagagacagccaggtgaagagcgaggtgcagcagcccgtgcaccccaagcccctgagccccgacagcagagccagcagcctgagcgagagcagcccccccaaggccatgaagaagttccaggcccccgccagagagacctgcgtggagtgccagaagaccgtgtaccccatggagagactgctggccaaccagcaggtgttccacatcagctgcttcagatgcagctactgcaacaacaagctgagcctgggcacctacgccagcctgcacggcagaatctactgcaagccccacttcaaccagctgttcaagagcaagggcaactacgacgagggcttcggccacagaccccacaaggacctgtgggccagcaagaacgagaacgaggagatcctggagagacccgcccagctggccaacgccagagagaccccccacagccccggcgtggaggacgcccccatcgccaaggtgggcgtgctggccgccagcatggaggccaaggccagcagccagcaggagaaggaggacaagcccgccgagaccaagaagctgagaatcgcctggcccccccccaccgagctgggcagcagcggcagcgccctggaggagggcatcaagatgagcaagcccaagtggccccccgaggacgagatcagcaagcccgaggtgcccgaggacgtggacctggacctgaagaagctgagaagaagcagcagcctgaaggagagaagcagacccttcaccgtggccgccagcttccagagcaccagcgtgaagagccccaagaccgtgagcccccccatcagaaagggctggagcatgagcgagcagagcgaggagagcgtgggcggcagagtggccgagagaaagcaggtggagaacgccaaggccagcaagaagaacggcaacgtgggcaagaccacctggcagaacaaggagagcaagggcgagaccggcaagagaagcaaggagggccacagcctggagatggagaacgagaacctggtggagaacggcgccgacagcgacgaggacgacaacagcttcctgaagcagcagagcccccaggagcccaagagcctgaactggagcagcttcgtggacaacaccttcgccgaggagttcaccacccagaaccagaagagccaggacgtggagctgtgggagggcgaggtggtgaaggagctgagcgtggaggagcagatcaagagaaacagatactacgacgaggacgaggacgaggagtag

SEQ ID NO: 87100 - DNA, 2283 bp, synthetic construct
  misc_feature 1..2283: note = Description of Artificial Sequence: Synthetic coding sequence
  source 1..2283: mol_type = other DNA
atggagagcagccccttcaacagaagacagtggaccagcctgagcctgagagtgaccgccaaggagctgagcctggtgaacaagaacaagagcagcgccatcgtggagatcttcagcaagtaccagaaggccgccgaggagaccaacatggagaagaagagaagcaacaccgagaacctgagccagcacttcagaaagggcaccctgaccgtgctgaagaagaagtgggagaaccccggcctgggcgccgagagccacaccgacagcctgagaaacagcagcaccgagatcagacacagagccgaccacccccccgccgaggtgaccagccacgccgccagcggcgccaaggccgaccaggaggagcagatccaccccagaagcagactgagaagcccccccgaggccctggtgcagggcagatacccccacatcaaggacggcgaggacctgaaggaccacagcaccgagagcaagaagatggagaactgcctgggcgagagcagacacgaggtggagaagagcgagatcagcgagaacaccgacgccagcggcaagatcgagaagtacaacgtgcccctgaacagactgaagatgatgttcgagaagggcgagcccacccagaccaagatcctgagagcccagagcagaagcgccagcggcagaaagatcagcgagaacagctacagcctggacgacctggagatcggccccggccagctgagcagcagcaccttcgacagcgagaagaacgagagcagaagaaacctggagctgcccagactgagcgagaccagcatcaaggacagaatggccaagtaccaggccgccgtgagcaagcagagcagcagcaccaactacaccaacgagctgaaggccagcggcggcgagatcaagatccacaagatggagcagaaggagaacgtgccccccggccccgaggtgtgcatcacccaccaggagggcgagaagatcagcgccaacgagaacagcctggccgtgagaagcacccccgccgaggacgacagccccggcgacagccaggtgaagagcgaggtgcagcagcccgtgcaccccaagcccctgagccccgacagcagagccagcagcctgagcgagagcagcccccccaaggccatgaagaagttccaggcccccgccagagagacctgcgtggagtgccagaagaccgtgtaccccatggagagactgctggccaaccagcaggtgttccacatcagctgcttcagatgcagctactgcaacaacaagctgagcctgggcacctacgccagcctgcacggcagaatctactgcaagccccacttcaaccagctgttcaagagcaagggcaactacgacgagggcttcggccacagaccccacaaggacctgtgggccagcaagaacgagaacgaggagatcctggagagacccgcccagctggccaacgccagagagaccccccacagccccggcgtggaggacgcccccatcgccaaggtgggcgtgctggccgccagcatggaggccaaggccagcagccagcaggagaaggaggacaagcccgccgagaccaagaagctgagaatcgcctggcccccccccaccgagctgggcagcagcggcagcgccctggaggagggcatcaagatgagcaagcccaagtggccccccgaggacgagatcagcaagcccgaggtgcccgaggacgtggacctggacctgaagaagctgagaagaagcagcagcctgaaggagagaagcagacccttcaccgtggccgccagcttccagagcaccagcgtgaagagccccaagaccgtgagcccccccatcagaaagggctggagcatgagcgagcagagcgaggagagcgtgggcggcagagtggccgagagaaagcaggtggagaacgccaaggccagcaagaagaacggcaacgtgggcaagaccacctggcagaacaaggagagcaagggcgagaccggcaagagaagcaaggagggccacagcctggagatggagaacgagaacctggtggagaacggcgccgacagcgacgaggacgacaacagcttcctgaagcagcagagcccccaggagcccaagagcctgaactggagcagcttcgtggacaacaccttcgccgaggagttcaccacccagaaccagaagagccaggacgtggagctgtgggagggcgaggtggtgaaggagctgagcgtggaggagcagatcaagagaaacagatactacgacgaggacgaggacgaggagtag

SEQ ID NO: 87101 - DNA, 2037 bp, synthetic construct
  misc_feature 1..2037: note = Description of Artificial Sequence: Synthetic coding sequence
  source 1..2037: mol_type = other DNA
atgtggcagggctgcaactgcagccagctgagcgagaccgccgtggaccaggagcagctgggcgtgctgaccttcatcctgcagagaaccacctgcctgaacgtgagcgccgaccaggaggagcagatccaccccagaagcagactgagaagcccccccgaggccctggtgcagggcagatacccccacatcaaggacggcgaggacctgaaggaccacagcaccgagagcaagaagatggagaactgcctgggcgagagcagacacgaggtggagaagagcgagatcagcgagaacaccgacgccagcggcaagatcgagaagtacaacgtgcccctgaacagactgaagatgatgttcgagaagggcgagcccacccagaccaagatcctgagagcccagagcagaagcgccagcggcagaaagatcagcgagaacagctacagcctggacgacctggagatcggccccggccagctgagcagcagcaccttcgacagcgagaagaacgagagcagaagaaacctggagctgcccagactgagcgagaccagcatcaaggacagaatggccaagtaccaggccgccgtgagcaagcagagcagcagcaccaactacaccaacgagctgaaggccagcggcggcgagatcaagatccacaagatggagcagaaggagaacgtgccccccggccccgaggtgtgcatcacccaccaggagggcgagaagatcagcgccaacgagaacagcctggccgtgagaagcacccccgccgaggacgacagcagagacagccaggtgaagagcgaggtgcagcagcccgtgcaccccaagcccctgagccccgacagcagagccagcagcctgagcgagagcagcccccccaaggccatgaagaagttccaggcccccgccagagagacctgcgtggagtgccagaagaccgtgtaccccatggagagactgctggccaaccagcaggtgttccacatcagctgcttcagatgcagctactgcaacaacaagctgagcctgggcacctacgccagcctgcacggcagaatctactgcaagccccacttcaaccagctgttcaagagcaagggcaactacgacgagggcttcggccacagaccccacaaggacctgtgggccagcaagaacgagaacgaggagatcctggagagacccgcccagctggccaacgccagagagaccccccacagccccggcgtggaggacgcccccatcgccaaggtgggcgtgctggccgccagcatggaggccaaggccagcagccagcaggagaaggaggacaagcccgccgagaccaagaagctgagaatcgcctggcccccccccaccgagctgggcagcagcggcagcgccctggaggagggcatcaagatgagcaagcccaagtggccccccgaggacgagatcagcaagcccgaggtgcccgaggacgtggacctggacctgaagaagctgagaagaagcagcagcctgaaggagagaagcagacccttcaccgtggccgccagcttccagagcaccagcgtgaagagccccaagaccgtgagcccccccatcagaaagggctggagcatgagcgagcagagcgaggagagcgtgggcggcagagtggccgagagaaagcaggtggagaacgccaaggccagcaagaagaacggcaacgtgggcaagaccacctggcagaacaaggagagcaagggcgagaccggcaagagaagcaaggagggccacagcctggagatggagaacgagaacctggtggagaacggcgccgacagcgacgaggacgacaacagcttcctgaagcagcagagcccccaggagcccaagagcctgaactggagcagcttcgtggacaacaccttcgccgaggagttcaccacccagaaccagaagagccaggacgtggagctgtgggagggcgaggtggtgaaggagctgagcgtggaggagcagatcaagagaaacagatactacgacgaggacgaggacgaggagtag

SEQ ID NO: 87102 - DNA, 1374 bp, synthetic construct
  misc_feature 1..1374: note = Description of Artificial Sequence: Synthetic coding sequence
  source 1..1374: mol_type = other DNA
atggagcagaaggagaacgtgccccccggccccgaggtgtgcatcacccaccaggagggcgagaagatcagcgccaacgagaacagcctggccgtgagaagcacccccgccgaggacgacagcagagacagccaggtgaagagcgaggtgcagcagcccgtgcaccccaagcccctgagccccgacagcagagccagcagcctgagcgagagcagcccccccaaggccatgaagaagttccaggcccccgccagagagacctgcgtggagtgccagaagaccgtgtaccccatggagagactgctggccaaccagcaggtgttccacatcagctgcttcagatgcagctactgcaacaacaagctgagcctgggcacctacgccagcctgcacggcagaatctactgcaagccccacttcaaccagctgttcaagagcaagggcaactacgacgagggcttcggccacagaccccacaaggacctgtgggccagcaagaacgagaacgaggagatcctggagagacccgcccagctggccaacgccagagagaccccccacagccccggcgtggaggacgcccccatcgccaaggtgggcgtgctggccgccagcatggaggccaaggccagcagccagcaggagaaggaggacaagcccgccgagaccaagaagctgagaatcgcctggcccccccccaccgagctgggcagcagcggcagcgccctggaggagggcatcaagatgagcaagcccaagtggccccccgaggacgagatcagcaagcccgaggtgcccgaggacgtggacctggacctgaagaagctgagaagaagcagcagcctgaaggagagaagcagacccttcaccgtggccgccagcttccagagcaccagcgtgaagagccccaagaccgtgagcccccccatcagaaagggctggagcatgagcgagcagagcgaggagagcgtgggcggcagagtggccgagagaaagcaggtggagaacgccaaggccagcaagaagaacggcaacgtgggcaagaccacctggcagaacaaggagagcaagggcgagaccggcaagagaagcaaggagggccacagcctggagatggagaacgagaacctggtggagaacggcgccgacagcgacgaggacgacaacagcttcctgaagcagcagagcccccaggagcccaagagcctgaactggagcagcttcgtggacaacaccttcgccgaggagttcaccacccagaaccagaagagccaggacgtggagctgtgggagggcgaggtggtgaaggagctgagcgtggaggagcagatcaagagaaacagatactacgacgaggacgaggacgaggagtag

SEQ ID NO: 87103 - DNA, 336 bp, synthetic construct
  misc_feature 1..336: note = Description of Artificial Sequence: Synthetic coding sequence
  source 1..336: mol_type = other DNA
atggagagcagccccttcaacagaagacagtggaccagcctgagcctgagagtgaccgccaaggagctgagcctggtgaacaagaacaagagcagcgccatcgtggagatcttcagcaagtaccagaaggccgccgaggagaccaacatggagaagaagagaagcaacaccgagaacctgagccagcacttcagaaagggcaccctgaccgtgctgaagaagaagtgggagaaccccggcctgggcgccgagagccacaccgacagcctgagaaacagcagcaccgagatcagacacagagccgaccacccccccgccgaggtgaccagccactag

SEQ ID NO: 87104 - DNA, 393 bp, synthetic construct
  misc_feature 1..393: note = Description of Artificial Sequence: Synthetic coding sequence
  source 1..393: mol_type = other DNA
atggagagcagccccttcaacagaagacagtggaccagcctgagcctgagagtgaccgccaaggagctgagcctggtgaacaagaacaagagcagcgccatcgtggagatcttcagcaagtaccagaaggccgccgaggagaccaacatggagaagaagagaagcaacaccgagaacctgagccagcacttcagaaagggcaccctgaccgtgctgaagaagaagtgggagaaccccggcctgggcgccgagagccacaccgacagcctgagaaacagcagcaccgagatcagacacagagccgaccacccccccgccgaggtgaccagccacgccgccagcggcgccaaggccgaccaggaggagcagatccaccccagaagcagactgtag

SEQ ID NO: 87105 - DNA, 1371 bp, synthetic construct
  misc_feature 1..1371: note = Description of Artificial Sequence: Synthetic coding sequence
  source 1..1371: mol_type = other DNA
atggagcagaaggagaacgtgccccccggccccgaggtgtgcatcacccaccaggagggcgagaagatcagcgccaacgagaacagcctggccgtgagaagcacccccgccgaggacgacagcagagacagccaggtgaagagcgaggtgcagcagcccgtgcaccccaagcccctgagccccgacagcagagccagcagcctgagcgagagcagcccccccaaggccatgaagttccaggcccccgccagagagacctgcgtggagtgccagaagaccgtgtaccccatggagagactgctggccaaccagcaggtgttccacatcagctgcttcagatgcagctactgcaacaacaagctgagcctgggcacctacgccagcctgcacggcagaatctactgcaagccccacttcaaccagctgttcaagagcaagggcaactacgacgagggcttcggccacagaccccacaaggacctgtgggccagcaagaacgagaacgaggagatcctggagagacccgcccagctggccaacgccagagagaccccccacagccccggcgtggaggacgcccccatcgccaaggtgggcgtgctggccgccagcatggaggccaaggccagcagccagcaggagaaggaggacaagcccgccgagaccaagaagctgagaatcgcctggcccccccccaccgagctgggcagcagcggcagcgccctggaggagggcatcaagatgagcaagcccaagtggccccccgaggacgagatcagcaagcccgaggtgcccgaggacgtggacctggacctgaagaagctgagaagaagcagcagcctgaaggagagaagcagacccttcaccgtggccgccagcttccagagcaccagcgtgaagagccccaagaccgtgagcccccccatcagaaagggctggagcatgagcgagcagagcgaggagagcgtgggcggcagagtggccgagagaaagcaggtggagaacgccaaggccagcaagaagaacggcaacgtgggcaagaccacctggcagaacaaggagagcaagggcgagaccggcaagagaagcaaggagggccacagcctggagatggagaacgagaacctggtggagaacggcgccgacagcgacgaggacgacaacagcttcctgaagcagcagagcccccaggagcccaagagcctgaactggagcagcttcgtggacaacaccttcgccgaggagttcaccacccagaaccagaagagccaggacgtggagctgtgggagggcgaggtggtgaaggagctgagcgtggaggagcagatcaagagaaacagatactacgacgaggacgaggacgaggagtag

SEQ ID NO: 87106 - DNA, 1803 bp, synthetic construct
  misc_feature 1..1803: note = Description of Artificial Sequence: Synthetic coding sequence
  source 1..1803: mol_type = other DNA
atggagaactgcctgggcgagagcagacacgaggtggagaagagcgagatcagcgagaacaccgacgccagcggcaagatcgagaagtacaacgtgcccctgaacagactgaagatgatgttcgagaagggcgagcccacccagaccaagatcctgagagcccagagcagaagcgccagcggcagaaagatcagcgagaacagctacagcctggacgacctggagatcggccccggccagctgagcagcagcaccttcgacagcgagaagaacgagagcagaagaaacctggagctgcccagactgagcgagaccagcatcaaggacagaatggccaagtaccaggccgccgtgagcaagcagagcagcagcaccaactacaccaacgagctgaaggccagcggcggcgagatcaagatccacaagatggagcagaaggagaacgtgccccccggccccgaggtgtgcatcacccaccaggagggcgagaagatcagcgccaacgagaacagcctggccgtgagaagcacccccgccgaggacgacagccccggcgacagccaggtgaagagcgaggtgcagcagcccgtgcaccccaagcccctgagccccgacagcagagccagcagcctgagcgagagcagcccccccaaggccatgaagaagttccaggcccccgccagagagacctgcgtggagtgccagaagaccgtgtaccccatggagagactgctggccaaccagcaggtgttccacatcagctgcttcagatgcagctactgcaacaacaagctgagcctgggcacctacgccagcctgcacggcagaatctactgcaagccccacttcaaccagctgttcaagagcaagggcaactacgacgagggcttcggccacagaccccacaaggacctgtgggccagcaagaacgagaacgaggagatcctggagagacccgcccagctggccaacgccagagagaccccccacagccccggcgtggaggacgcccccatcgccaaggtgggcgtgctggccgccagcatggaggccaaggccagcagccagcaggagaaggaggacaagcccgccgagaccaagaagctgagaatcgcctggcccccccccaccgagctgggcagcagcggcagcgccctggaggagggcatcaagatgagcaagcccaagtggccccccgaggacgagatcagcaagcccgaggtgcccgaggacgtggacctggacctgaagaagctgagaagaagcagcagcctgaaggagagaagcagacccttcaccgtggccgccagcttccagagcaccagcgtgaagagccccaagaccgtgagcccccccatcagaaagggctggagcatgagcgagcagagcgaggagagcgtgggcggcagagtggccgagagaaagcaggtggagaacgccaaggccagcaagaagaacggcaacgtgggcaagaccacctggcagaacaaggagagcaagggcgagaccggcaagagaagcaaggagggccacagcctggagatggagaacgagaacctggtggagaacggcgccgacagcgacgaggacgacaacagcttcctgaagcagcagagcccccaggagcccaagagcctgaactggagcagcttcgtggacaacaccttcgccgaggagttcaccacccagaaccagaagagccaggacgtggagctgtgggagggcgaggtggtgaaggagctgagcgtggaggagcagatcaagagaaacagatactacgacgaggacgaggacgaggagtag

SEQ ID NO: 87107 - DNA, 1800 bp, synthetic construct
  misc_feature 1..1800: note = Description of Artificial Sequence: Synthetic coding sequence
  source 1..1800: mol_type = other DNA
atggagaactgcctgggcgagagcagacacgaggtggagaagagcgagatcagcgagaacaccgacgccagcggcaagatcgagaagtacaacgtgcccctgaacagactgaagatgatgttcgagaagggcgagcccacccagaccaagatcctgagagcccagagcagaagcgccagcggcagaaagatcagcgagaacagctacagcctggacgacctggagatcggccccggccagctgagcagcagcaccttcgacagcgagaagaacgagagcagaagaaacctggagctgcccagactgagcgagaccagcatcaaggacagaatggccaagtaccaggccgccgtgagcaagcagagcagcagcaccaactacaccaacgagctgaaggccagcggcggcgagatcaagatccacaagatggagcagaaggagaacgtgccccccggccccgaggtgtgcatcacccaccaggagggcgagaagatcagcgccaacgagaacagcctggccgtgagaagcacccccgccgaggacgacagcagagacagccaggtgaagagcgaggtgcagcagcccgtgcaccccaagcccctgagccccgacagcagagccagcagcctgagcgagagcagcccccccaaggccatgaagaagttccaggcccccgccagagagacctgcgtggagtgccagaagaccgtgtaccccatggagagactgctggccaaccagcaggtgttccacatcagctgcttcagatgcagctactgcaacaacaagctgagcctgggcacctacgccagcctgcacggcagaatctactgcaagccccacttcaaccagctgttcaagagcaagggcaactacgacgagggcttcggccacagaccccacaaggacctgtgggccagcaagaacgagaacgaggagatcctggagagacccgcccagctggccaacgccagagagaccccccacagccccggcgtggaggacgcccccatcgccaaggtgggcgtgctggccgccagcatggaggccaaggccagcagccagcaggagaaggaggacaagcccgccgagaccaagaagctgagaatcgcctggcccccccccaccgagctgggcagcagcggcagcgccctggaggagggcatcaagatgagcaagcccaagtggccccccgaggacgagatcagcaagcccgaggtgcccgaggacgtggacctggacctgaagaagctgagaagaagcagcagcctgaaggagagaagcagacccttcaccgtggccgccagcttccagagcaccagcgtgaagagccccaagaccgtgagcccccccatcagaaagggctggagcatgagcgagcagagcgaggagagcgtgggcggcagagtggccgagagaaagcaggtggagaacgccaaggccagcaagaagaacggcaacgtgggcaagaccacctggcagaacaaggagagcaagggcgagaccggcaagagaagcaaggagggccacagcctggagatggagaacgagaacctggtggagaacggcgccgacagcgacgaggacgacaacagcttcctgaagcagcagagcccccaggagcccaagagcctgaactggagcagcttcgtggacaacaccttcgccgaggagttcaccacccagaaccagaagagccaggacgtggagctgtgggagggcgaggtggtgaaggagctgagcgtggaggagcagatcaagagaaacagatactacgacgaggacgaggacgaggagtag

SEQ ID NO: 87108 - DNA, 1128 bp, synthetic construct
  misc_feature 1..1128: note = Description of Artificial Sequence: Synthetic coding sequence
  source 1..1128: mol_type = other DNA
atgctggacagagacgtgggccccacccccatgtacccccccacctacctggagcccggcatcggcagacacaccccctacggcaaccagaccgactacagaatcttcgagctgaacaagagactgcagaactggaccgaggagtgcgacaacctgtggtgggacgccttcaccaccgagttcttcgaggacgacgccatgctgaccatcaccttctgcctggaggacggccccaagagatacaccatcggcagaaccctgatccccagatacttcagaagcatcttcgagggcggcgccaccgagctgtactacgtgctgaagcaccccaaggaggccttccacagcaacttcgtgagcctggactgcgaccagggcagcatggtgacccagcacggcaagcccatgttcacccaggtgtgcgtggagggcagactgtacctggagttcatgttcgacgacatgatgagaatcaagacctggcacttcagcatcagacagcacagagagctgatccccagaagcatcctggccatgcacgcccaggacccccagatgctggaccagctgagcaagaacatcaccagatgcggcctgagcaacagcaccctgaactacctgagactgtgcgtgatcctggagcccatgcaggagctgatgagcagacacaagacctacagcctgagccccagagactgcctgaagacctgcctgttccagaagtggcagagaatggtggccccccccgccgagcccaccagacagcagcccagcaagagaagaaagagaaagatgagcggcggcagcaccatgagcagcggcggcggcaacaccaacaacagcaacagcaagaagaagagccccgccagcaccttcgccctgagcagccaggtgcccgacgtgatggtggtgggcgagcccaccctgatgggcggcgagttcggcgacgaggacgagagactgatcaccagactggagaacacccagttcgacgccgccaacggcatcgacgacgaggacagcttcaacaacagccccgccctgggcgccaacagcccctggaacagcaagccccccagcagccaggagagcaagagcgagaaccccaccagccaggccagccagtag

SEQ ID NO: 87109 - DNA, 1236 bp, synthetic construct
  misc_feature 1..1236: note = Description of Artificial Sequence: Synthetic coding sequence
  source 1..1236: mol_type = other DNA
atgagcgtgggctgcgcctgccccggctgcagcagcaagagcttcaagctgtacagccccaaggagccccccaacggcaacgccttcccccccttccaccccggcaccatgctggacagagacgtgggccccacccccatgtacccccccacctacctggagcccggcatcggcagacacaccccctacggcaaccagaccgactacagaatcttcgagctgaacaagagactgcagaactggaccgaggagtgcgacaacctgtggtgggacgccttcaccaccgagttcttcgaggacgacgccatgctgaccatcaccttctgcctggaggacggccccaagagatacaccatcggcagaaccctgatccccagatacttcagaagcatcttcgagggcggcgccaccgagctgtactacgtgctgaagcaccccaaggaggccttccacagcaacttcgtgagcctggactgcgaccagggcagcatggtgacccagcacggcaagcccatgttcacccaggtgtgcgtggagggcagactgtacctggagttcatgttcgacgacatgatgagaatcaagacctggcacttcagcatcagacagcacagagagctgatccccagaagcatcctggccatgcacgcccaggacccccagatgctggaccagctgagcaagaacatcaccagatgcggcctgagcaacagcaccctgaactacctgagactgtgcgtgatcctggagcccatgcaggagctgatgagcagacacaagacctacagcctgagccccagagactgcctgaagacctgcctgttccagaagtggcagagaatggtggccccccccgccgagcccaccagacagcagcccagcaagagaagaaagagaaagatgagcggcggcagcaccatgagcagcggcggcggcaacaccaacaacagcaacagcaagaagaagagccccgccagcaccttcgccctgagcagccaggtgcccgacgtgatggtggtgggcgagcccaccctgatgggcggcgagttcggcgacgaggacgagagactgatcaccagactggagaacacccagttcgacgccgccaacggcatcgacgacgaggacagcttcaacaacagccccgccctgggcgccaacagcccctggaacagcaagccccccagcagccaggagagcaagagcgagaaccccaccagccaggccagccagtag

SEQ ID NO: 87110 - DNA, 1122 bp, synthetic construct
  misc_feature 1..1122: note = Description of Artificial Sequence: Synthetic coding sequence
  source 1..1122: mol_type = other DNA
atgagcagcaccccccacgaccccttctacagcagccccttcggccccttctacagaagacacaccccctacatggtgcagcccgagtacagaatctacgagatgaacaagagactgcagagcagaaccgaggacagcgacaacctgtggtgggacgccttcgccaccgagttcttcgaggacgacgccaccctgaccctgagcttctgcctggaggacggccccaagagatacaccatcggcagaaccctgatccccagatacttcagcaccgtgttcgagggcggcgtgaccgacctgtactacatcctgaagcacagcaaggagagctaccacaacagcagcatcaccgtggactgcgaccagtgcaccatggtgacccagcacggcaagcccatgttcaccaaggtgtgcaccgagggcagactgatcctggagttcaccttcgacgacctgatgagaatcaagacctggcacttcaccatcagacagtacagagagctggtgcccagaagcatcctggccatgcacgcccaggacccccaggtgctggaccagctgagcaagaacatcaccagaatgggcctgaccaacttcaccctgaactacctgagactgtgcgtgatcctggagcccatgcaggagctgatgagcagacacaagacctacaacctgagccccagagactgcctgaagacctgcctgttccagaagtggcagagaatggtggccccccccgccgagcccaccagacagcccaccaccaagagaagaaagagaaagaacagcaccagcagcaccagcaacagcagcgccggcaacaacgccaacagcaccggcagcaagaagaagaccaccgccgccaacctgagcctgagcagccaggtgcccgacgtgatggtggtgggcgagcccaccctgatgggcggcgagttcggcgacgaggacgagagactgatcaccagactggagaacacccagtacgacgccgccaacggcatggacgacgaggaggacttcaacaacagccccgccctgggcaacaacagcccctggaacagcaagccccccgccacccaggagaccaagagcgagaacccccccccccaggccagccagtag

SEQ ID NO: 87111 - DNA, 996 bp, synthetic construct
  misc_feature 1..996: note = Description of Artificial Sequence: Synthetic coding sequence
  source 1..996: mol_type = other DNA
atgagcagcaccccccacgaccccttctacagcagccccttcggccccttctacagaagacacaccccctacatggtgcagcccgagtacagaatctacgagatgaacaagagactgcagagcagaaccgaggacagcgacaacctgtggtgggacgccttcgccaccgagttcttcgaggacgacgccaccctgaccctgagcttctgcctggaggacggccccaagagatacaccatcggcagaaccctgatccccagatacttcagcaccgtgttcgagggcggcgtgaccgacctgtactacatcctgaagcacagcaaggagagctaccacaacagcagcatcaccgtggactgcgaccagtgcaccatggtgacccagcacggcaagcccatgttcaccaaggtgtgcaccgagggcagactgatcctggagttcaccttcgacgacctgatgagaatcaagacctggcacttcaccatcagacagtacagagagctggtgcccagaagcatcctggccatgcacgcccaggacccccaggtgctggaccagctgagcaagaacatcaccagaatgggcctgaccaacttcaccctgaactacctgagactgtgcgtgatcctggagcccatgcaggagctgatgagcagacacaagacctacaacctgagccccagagactgcctgaagacctgcctgttccagaagtggcagagaatggtggccccccccgccgagcccaccagacagcccaccaccaagagaagaaagagaaagaacagcaccagcagcaccagcaacagcagcgccggcaacaacgccaacagcaccggcagcaagaagaagaccaccgccgccaacctgagcctgagcagccaggtgcccggcctgggcgccatccccaactgcagcctgaaccccggcagagacggcgacctgtgccacagcaccgccgtgacccccagcggccagttcaaggagaagcactag

SEQ ID NO: 87112 - DNA, 942 bp, synthetic construct
  misc_feature 1..942: note = Description of Artificial Sequence: Synthetic coding sequence
  source 1..942: mol_type = other DNA
atgagcagcaccccccacgaccccttctacagcagccccttcggccccttctacagaagacacaccccctacatggtgcagcccgagtacagaatctacgagatgaacaagagactgcagagcagaaccgaggacagcgacaacctgtggtgggacgccttcgccaccgagttcttcgaggacgacgccaccctgaccctgagcttctgcctggaggacggccccaagagatacaccatcggcagaaccctgatccccagatacttcagcaccgtgttcgagggcggcgtgaccgacctgtactacatcctgaagcacagcaaggagagctaccacaacagcagcatcaccgtggactgcgaccagtgcaccatggtgacccagcacggcaagcccatgttcaccaaggtgtgcaccgagggcagactgatcctggagttcaccttcgacgacctgatgagaatcaagacctggcacttcaccatcagacagtacagagagctggtgcccagaagcatcctggccatgcacgcccaggacccccaggtgctggaccagctgagcaagaacatcaccagaatgggcctgaccaacttcaccctgaactacctgagactgtgcgtgatcctggagcccatgcaggagctgatgagcagacacaagacctacaacctgagccccagagactgcctgaagacctgcctgttccagaagtggcagagaatggtggccccccccgccgagcccaccagacagcccaccaccaagagaagaaagagaaagaacagcaccagcagcaccagcaacagcagcgccggcaacaacgccaacagcaccggcagcaagaagaagaccaccgccgccaacctgagcctgagcagccaggtgcccatcgccagcatcgccagaagccccgtgagcggctgcgccctgagaacctag

SEQ ID NO: 87113 - DNA, 570 bp, synthetic construct
  misc_feature 1..570: note = Description of Artificial Sequence: Synthetic coding sequence
  source 1..570: mol_type = other DNA
atggtgacccagcacggcaagcccatgttcaccaaggtgtgcaccgagggcagactgatcctggagttcaccttcgacgacctgatgagaatcaagacctggcacttcaccatcagacagtacagagagctggtgcccagaagcatcctggccatgcacgcccaggacccccaggtgctggaccagctgagcaagaacatcaccagaatgggcctgaccaacttcaccctgaactacctgagactgtgcgtgatcctggagcccatgcaggagctgatgagcagacacaagacctacaacctgagccccagagactgcctgaagacctgcctgttccagaagtggcagagaatggtggccccccccgccgagcccaccagacagcccaccaccaagagaagaaagagaaagaacagcaccagcagcaccagcaacagcagcgccggcaacaacgccaacagcaccggcagcaagaagaagaccaccgccgccaacctgagcctgagcagccaggtgcccatcgccagcatcgccagaagccccgtgagcggctgcgccctgagaacctag

SEQ ID NO: 87114 - DNA, 495 bp, synthetic construct
  misc_feature 1..495: note = Description of Artificial Sequence: Synthetic coding sequence
  source 1..495: mol_type = other DNA
atggtgcagcccgagtacagaatctacgagatgaacaagagactgcagagcagaaccgaggacagcgacaacctgtggtgggacgccttcgccaccgagttcttcgaggacgacgccaccctgaccctgagcttctgcctggaggacggccccaagagatacaccatcggcagaaccctgatccccagatacttcagcaccgtgttcgagggcggcgtgaccgacctgtactacatcctgaagcacagcaaggagagctaccacaacagcagcatcaccgtggactgcgaccagtgcaccatggtgacccagcacggcaagcccatgttcaccaaggtgtgcaccgagggcagactgatcctggagttcaccttcgacgacctgatgagaatcaagacctggcacttcaccatcagacagtacagagagctggtgcccagaagcatcctggccatgcacgcccaggacccccaggtgctggaccagctgagctag

SEQ ID NO: 87115 - DNA, 333 bp, synthetic construct
  misc_feature 1..333: note = Description of Artificial Sequence: Synthetic coding sequence
  source 1..333: mol_type = other DNA
atgagcagcaccccccacgaccccttctacagcagccccttcggccccttctacagaagacacaccccctacatggtgcagcccgagtacagaatctacgagatgaacaagagactgcagagcagaaccgaggacagcgacaacctgtggtgggacgccttcgccaccgagttcttcgaggacgacgccaccctgaccctgagcttctgcctggaggacggccccaagagatacatcgtgcacagcgccgccgacgccagaggcaactgcaaccagctgggcgacagcgagcccgacgcctgcgacggcctgctgcagttccccatcatgtag

SEQ ID NO: 87116 - DNA, 321 bp, synthetic construct
  misc_feature 1..321: note = Description of Artificial Sequence: Synthetic coding sequence
  source 1..321: mol_type = other DNA
atgagcagcaccccccacgaccccttctacagcagccccttcggccccttctacagaagacacaccccctacatggtgcagcccgagtacagaatctacgagatgaacaagagactgcagagcagaaccgaggacagcgacaacctgtggtgggacgccttcgccaccgagttcttcgaggacgacgccaccctgaccctgagcttctgcctggaggacggccccaagagatacagaaccaagaacctgagacccatcggcgagaagatgaacatcaacggcaagtgctacagacaggacccccacccccccctgctgtag

SEQ ID NO: 87117 - DNA, 1116 bp, synthetic construct
  misc_feature 1..1116: note = Description of Artificial Sequence: Synthetic coding sequence
  source 1..1116: mol_type = other DNA
atgagcagcaccccccacgaccccttctacagcagccccttcggccccttctacagaagacacaccccctacatggtgcagcccgagtacagaatctacgagatgaacaagagactgcagagcagaaccgaggacagcgacaacctgtggtgggacgccttcgccaccgagttcttcgaggacgacgccaccctgaccctgagcttctgcctggaggacggccccaagagatacaccatcggcagaaccctgatccccagatacttcagcaccgtgttcgagggcggcgtgaccgacctgtactacatcctgaagcacagcaaggagagctaccacaacagcagcatcaccgtggactgcgaccagtgcaccatggtgacccagcacggcaagcccatgttcaccaaggtgtgcaccgagggcagactgatcctggagttcaccttcgacgacctgatgagaatcaagacctggcacttcaccatcagacagtacagagagctggtgcccagaagcatcctggccatgcacgcccaggacccccaggtgctggaccagctgagcaagaacatcaccagaatgggcctgaccaacttcaccctgaactacctgagactgtgcgtgatcctggagcccatgcaggagctgatgagcagacacaagacctacaacctgagccccagagactgcctgaagacctgcctgttccagaagtggcagagaatggtggccccccccgccgagcccaccagacagcccaccaccaagagaagaaagagaaagaacagcaccagcagcaccagcaacagcagcgccggcaacaacgccaacagcaccggcagcaagaagaagaccaccgccgccaacctgagcctgagcagccaggacgtgatggtggtgggcgagcccaccctgatgggcggcgagttcggcgacgaggacgagagactgatcaccagactggagaacacccagtacgacgccgccaacggcatggacgacgaggaggacttcaacaacagccccgccctgggcaacaacagcccctggaacagcaagccccccgccacccaggagaccaagagcgagaacccccccccccaggccagccagtag

SEQ ID NO: 87118 - DNA, 1854 bp, synthetic construct
  misc_feature 1..1854: note = Description of Artificial Sequence: Synthetic coding sequence
  source 1..1854: mol_type = other DNA
atgagctacagcgtgaccctgaccggccccggcccctggggcttcagactgcagggcggcaaggacttcaacatgcccctgaccatcagcagaatcacccccggcagcaaggccgcccagagccagctgagccagggcgacctggtggtggccatcgacggcgtgaacaccgacaccatgacccacctggaggcccagaacaagatcaagagcgccagctacaacctgagcctgaccctgcagaagagcaagagacccatccccatcagcaccaccgccccccccgtgcagacccccctgcccgtgatcccccaccagaaggtggtggtgaacagccccgccaacgccgactaccaggagagattcaaccccagcgccctgaaggacagcgccctgagcacccacaagcccatcgaggtgaagggcctgggcggcaaggccaccatcatccacgcccagtacaacacccccatcagcatgtacagccaggacgccatcatggacgccatcgccggccaggcccaggcccagggcagcgacttcagcggcagcctgcccatcaaggacctggccgtggacagcgccagccccgtgtaccaggccgtgatcaagagccagaacaagcccgaggacgaggccgacgagtgggccagaagaagcagcaacctgcagagcagaagcttcagaatcctggcccagatgaccggcaccgagttcatgcaggaccccgacgaggaggccctgagaagaagcagaccccaggccagcagctacagccccgccgtggccgccagcagcgcccccgccacccacaccagctacagcgagggccccgccgcccccgcccccaagcccagagtggtgaccaccgccagcatcagacccagcgtgtaccagcccgtgcccgccagcacctacagccccagccccggcgccaactacagccccaccccctacacccccagccccgcccccgcctacacccccagccccgcccccgcctacacccccagccccgtgcccacctacacccccagccccgcccccgcctacacccccagccccgcccccaactacaaccccgcccccagcgtggcctacagcggcggccccgccgagcccgccagcagacccccctgggtgaccgacgacagcttcagccagaagttcgcccccggcaagagcaccaccagcatcagcaagcagaccctgcccagaggcggccccgcctacacccccgccggcccccaggtgccccccctggccagaggcaccgtgcagagagccgagagattccccgccagcagcagaacccccctgtgcggccactgcaacaacgtgatcagaggccccttcctggtggccatgggcagaagctggcaccccgaggagttcacctgcgcctactgcaagaccagcctggccgacgtgtgcttcgtggaggagcagaacaacgtgtactgcgagagatgctacgagcagttcttcgcccccctgtgcgccaagtgcaacaccaagatcatgggcgaggtgatgcacgccctgagacagacctggcacaccacctgcttcgtgtgcgccgcctgcaagaagcccttcggcaacagcctgttccacatggaggacggcgagccctactgcgagaaggactacatcaacctgttcagcaccaagtgccacggctgcgacttccccgtggaggccggcgacaagttcatcgaggccctgggccacacctggcacgacacctgcttcatctgcgccgtgtgccacgtgaacctggagggccagcccttctacagcaagaaggacagacccctgtgcaagaagcacgcccacaccatcaacctgtag

SEQ ID NO: 87119 - DNA, 993 bp, synthetic construct
  misc_feature 1..993: note = Description of Artificial Sequence: Synthetic coding sequence
  source 1..993: mol_type = other DNA
atgagctacagcgtgaccctgaccggccccggcccctggggcttcagactgcagggcggcaaggacttcaacatgcccctgaccatcagcagaatcacccccggcagcaaggccgcccagagccagctgagccagggcgacctggtggtggccatcgacggcgtgaacaccgacaccatgacccacctggaggcccagaacaagatcaagagcgccagctacaacctgagcctgaccctgcagaagagcaagagacccatccccatcagcaccaccgccccccccgtgcagacccccctgcccgtgatcccccaccagaaggaccccgccctggacaccaacggcagcctggtggcccccagccccagccccgaggccagagccagccccggcacccccggcacccccgagctgagacccaccttcagccccgccttcagcagacccagcgccttcagcagcctggccgaggccagcgaccccggcccccccagagccagcctgagagccaagaccagccccgagggcgccagagacctgctgggccccaaggccctgcccggcagcagccagcccagacagtacaacaaccccatcggcctgtacagcgccgagaccctgagagagatggcccagatgtaccagatgagcctgagaggcaaggccagcggcgtgggcctgcccggcggcagcctgcccatcaaggacctggccgtggacagcgccagccccgtgtaccaggccgtgatcaagagccagaacaagcccgaggacgaggccgacgagtgggccagaagaagcagcaacctgcagagcagaagcttcagaatcctggcccagatgaccggcaccgagttcatgcaggaccccgacgaggaggccctgagaagaagcagagagagattcgagaccgagagaaacagccccagattcgccaagctgagaaactggcaccacggcctgagcgcccagatcctgaacgtgaagagctag

SEQ ID NO: 87120 - DNA, 1413 bp, synthetic construct
  misc_feature 1..1413: note = Description of Artificial Sequence: Synthetic coding sequence
  source 1..1413: mol_type = other DNA
atgagctacagcgtgaccctgaccggccccggcccctggggcttcagactgcagggcggcaaggacttcaacatgcccctgaccatcagcagaatcacccccggcagcaaggccgcccagagccagctgagccagggcgacctggtggtggccatcgacggcgtgaacaccgacaccatgacccacctggaggcccagaacaagatcaagagcgccagctacaacctgagcctgaccctgcagaagagcaagagacccatccccatcagcaccaccgccccccccgtgcagacccccctgcccgtgatcccccaccagaaggccagcagctacagccccgccgtggccgccagcagcgcccccgccacccacaccagctacagcgagggccccgccgcccccgcccccaagcccagagtggtgaccaccgccagcatcagacccagcgtgtaccagcccgtgcccgccagcacctacagccccagccccggcgccaactacagccccaccccctacacccccagccccgcccccgcctacacccccagccccgcccccgcctacacccccagccccgtgcccacctacacccccagccccgcccccgcctacacccccagccccgcccccaactacaaccccgcccccagcgtggcctacagcggcggccccgccgagcccgccagcagacccccctgggtgaccgacgacagcttcagccagaagttcgcccccggcaagagcaccaccagcatcagcaagcagaccctgcccagaggcggccccgcctacacccccgccggcccccaggtgccccccctggccagaggcaccgtgcagagagccgagagattccccgccagcagcagaacccccctgtgcggccactgcaacaacgtgatcagaggccccttcctggtggccatgggcagaagctggcaccccgaggagttcacctgcgcctactgcaagaccagcctggccgacgtgtgcttcgtggaggagcagaacaacgtgtactgcgagagatgctacgagcagttcttcgcccccctgtgcgccaagtgcaacaccaagatcatgggcgaggtgatgcacgccctgagacagacctggcacaccacctgcttcgtgtgcgccgcctgcaagaagcccttcggcaacagcctgttccacatggaggacggcgagccctactgcgagaaggactacatcaacctgttcagcaccaagtgccacggctgcgacttccccgtggaggccggcgacaagttcatcgaggccctgggccacacctggcacgacacctgcttcatctgcgccgtgtgccacgtgaacctggagggccagcccttctacagcaagaaggacagacccctgtgcaagaagcacgcccacaccatcaacctgtag

SEQ ID NO: 87121 - DNA, 2184 bp, synthetic construct
  misc_feature 1..2184: note = Description of Artificial Sequence: Synthetic coding sequence
  source 1..2184: mol_type = other DNA
atgagctacagcgtgaccctgaccggccccggcccctggggcttcagactgcagggcggcaaggacttcaacatgcccctgaccatcagcagaatcacccccggcagcaaggccgcccagagccagctgagccagggcgacctggtggtggccatcgacggcgtgaacaccgacaccatgacccacctggaggcccagaacaagatcaagagcgccagctacaacctgagcctgaccctgcagaagagcaagagacccatccccatcagcaccaccgccccccccgtgcagacccccctgcccgtgatcccccaccagaaggaccccgccctggacaccaacggcagcctggtggcccccagccccagccccgaggccagagccagccccggcacccccggcacccccgagctgagacccaccttcagccccgccttcagcagacccagcgccttcagcagcctggccgaggccagcgaccccggcccccccagagccagcctgagagccaagaccagccccgagggcgccagagacctgctgggccccaaggccctgcccggcagcagccagcccagacagtacaacaaccccatcggcctgtacagcgccgagaccctgagagagatggcccagatgtaccagatgagcctgagaggcaaggccagcggcgtgggcctgcccggcggcagcctgcccatcaaggacctggccgtggacagcgccagccccgtgtaccaggccgtgatcaagagccagaacaagcccgaggacgaggccgacgagtgggccagaagaagcagcaacctgcagagcagaagcttcagaatcctggcccagatgaccggcaccgagttcatgcaggaccccgacgaggaggccctgagaagaagcagcacccccatcgagcacgcccccgtgtgcaccagccaggccaccacccccctgctgcccgccagcgcccagccccccgccgccgccagccccagcgccgccagcccccccctggccaccgccgccgcccacaccgccatcgccagcgccagcaccaccgcccccgccagcagccccgccgacagccccagaccccaggccagcagctacagccccgccgtggccgccagcagcgcccccgccacccacaccagctacagcgagggccccgccgcccccgcccccaagcccagagtggtgaccaccgccagcatcagacccagcgtgtaccagcccgtgcccgccagcacctacagccccagccccggcgccaactacagccccaccccctacacccccagccccgcccccgcctacacccccagccccgcccccgcctacacccccagccccgtgcccacctacacccccagccccgcccccgcctacacccccagccccgcccccaactacaaccccgcccccagcgtggcctacagcggcggccccgccgagcccgccagcagacccccctgggtgaccgacgacagcttcagccagaagttcgcccccggcaagagcaccaccagcatcagcaagcagaccctgcccagaggcggccccgcctacacccccgccggcccccaggtgccccccctggccagaggcaccgtgcagagagccgagagattccccgccagcagcagaacccccctgtgcggccactgcaacaacgtgatcagaggccccttcctggtggccatgggcagaagctggcaccccgaggagttcacctgcgcctactgcaagaccagcctggccgacgtgtgcttcgtggaggagcagaacaacgtgtactgcgagagatgctacgagcagttcttcgcccccctgtgcgccaagtgcaacaccaagatcatgggcgaggtgatgcacgccctgagacagacctggcacaccacctgcttcgtgtgcgccgcctgcaagaagcccttcggcaacagcctgttccacatggaggacggcgagccctactgcgagaaggactacatcaacctgttcagcaccaagtgccacggctgcgacttccccgtggaggccggcgacaagttcatcgaggccctgggccacacctggcacgacacctgcttcatctgcgccgtgtgccacgtgaacctggagggccagcccttctacagcaagaaggacagacccctgtgcaagaagcacgcccacaccatcaacctgtag

SEQ ID NO: 87122 - DNA, 1197 bp, synthetic construct
  misc_feature 1..1197: note = Description of Artificial Sequence: Synthetic coding sequence
  source 1..1197: mol_type = other DNA
atgagctacagcgtgaccctgaccggccccggcccctggggcttcagactgcagggcggcaaggacttcaacatgcccctgaccatcagcagaatcacccccggcagcaaggccgcccagagccagctgagccagggcgacctggtggtggccatcgacggcgtgaacaccgacaccatgacccacctggaggcccagaacaagatcaagagcgccagctacaacctgagcctgaccctgcagaagagcaagagacccatccccatcagcaccaccgccccccccgtgcagacccccctgcccgtgatcccccaccagaaggaccccgccctggacaccaacggcagcctggtggcccccagccccagccccgaggccagagccagccccggcacccccggcacccccgagctgagacccaccttcagccccgccttcagcagacccagcgccttcagcagcctggccgaggccagcgaccccggcccccccagagccagcctgagagccaagaccagccccgagggcgccagagacctgctgggccccaaggccctgcccggcagcagccagcccagacagtacaacaaccccatcggcctgtacagcgccgagaccctgagagagatggcccagatgtaccagatgagcctgagaggcaaggccagcggcgtgggcctgcccggcggcgccgactaccaggagagattcaaccccagcgccctgaaggacagcgccctgagcacccacaagcccatcgaggtgaagggcctgggcggcaaggccaccatcatccacgcccagtacaacacccccatcagcatgtacagccaggacgccatcatggacgccatcgccggccaggcccaggcccagggcagcgacttcagcggcagcctgcccatcaaggacctggccgtggacagcgccagccccgtgtaccaggccgtgatcaagagccagaacaagcccgaggacgaggccgacgagtgggccagaagaagcagcaacctgcagagcagaagcttcagaatcctggcccagatgaccggcaccgagttcatgcaggaccccgacgaggaggccctgagaagaagcagagagagattcgagaccgagagaaacagccccagattcgccaagctgagaaactggcaccacggcctgagcgcccagatcctgaacgtgaagagctag

SEQ ID NO: 87123 - DNA, 852 bp, synthetic construct
  misc_feature 1..852: note = Description of Artificial Sequence: Synthetic coding sequence
  source 1..852: mol_type = other DNA
atgagctacagcgtgaccctgaccggccccggcccctggggcttcagactgcagggcggcaaggacttcaacatgcccctgaccatcagcagaatcacccccggcagcaaggccgcccagagccagctgagccagggcgacctggtggtggccatcgacggcgtgaacaccgacaccatgacccacctggaggcccagaacaagatcaagagcgccagctacaacctgagcctgaccctgcagaagagcaagagacccatccccatcagcaccaccgccccccccgtgcagacccccctgcccgtgatcccccaccagaaggtggtggtgaacagccccgccaacgccgactaccaggagagattcaaccccagcgccctgaaggacagcgccctgagcacccacaagcccatcgaggtgaagggcctgggcggcaaggccaccatcatccacgcccagtacaacacccccatcagcatgtacagccaggacgccatcatggacgccatcgccggccaggcccaggcccagggcagcgacttcagcggcagcctgcccatcaaggacctggccgtggacagcgccagccccgtgtaccaggccgtgatcaagagccagaacaagcccgaggacgaggccgacgagtgggccagaagaagcagcaacctgcagagcagaagcttcagaatcctggcccagatgaccggcaccgagttcatgcaggaccccgacgaggaggccctgagaagaagcagagagagattcgagaccgagagaaacagccccagattcgccaagctgagaaactggcaccacggcctgagcgcccagatcctgaacgtgaagagctag

SEQ ID NO: 87124 - DNA, 2199 bp, synthetic construct
  misc_feature 1..2199: note = Description of Artificial Sequence: Synthetic coding sequence
  source 1..2199: mol_type = other DNA
atgagctacagcgtgaccctgaccggccccggcccctggggcttcagactgcagggcggcaaggacttcaacatgcccctgaccatcagcagaatcacccccggcagcaaggccgcccagagccagctgagccagggcgacctggtggtggccatcgacggcgtgaacaccgacaccatgacccacctggaggcccagaacaagatcaagagcgccagctacaacctgagcctgaccctgcagaagagcaagagacccatccccatcagcaccaccgccccccccgtgcagacccccctgcccgtgatcccccaccagaaggaccccgccctggacaccaacggcagcctggtggcccccagccccagccccgaggccagagccagccccggcacccccggcacccccgagctgagacccaccttcagccccgccttcagcagacccagcgccttcagcagcctggccgaggccagcgaccccggcccccccagagccagcctgagagccaagaccagccccgagggcgccagagacctgctgggccccaaggccctgcccggcagcagccagcccagacagtacaacaaccccatcggcctgtacagcgccgagaccctgagagagatggcccagatgtaccagatgagcctgagaggcaaggccagcggcgtgggcctgcccggcggcgccgactaccaggagagattcaaccccagcgccctgaaggacagcgccctgagcacccacaagcccatcgaggtgaagggcctgggcggcaaggccaccatcatccacgcccagtacaacacccccatcagcatgtacagccaggacgccatcatggacgccatcgccggccaggcccaggcccagggcagcgacttcagcggcagcctgcccatcaaggacctggccgtggacagcgccagccccgtgtaccaggccgtgatcaagagccagaacaagcccgaggacgaggccgacgagtgggccagaagaagcagcaacctgcagagcagaagcttcagaatcctggcccagatgaccggcaccgagttcatgcaggaccccgacgaggaggccctgagaagaagcagaccccaggccagcagctacagccccgccgtggccgccagcagcgcccccgccacccacaccagctacagcgagggccccgccgcccccgcccccaagcccagagtggtgaccaccgccagcatcagacccagcgtgtaccagcccgtgcccgccagcacctacagccccagccccggcgccaactacagccccaccccctacacccccagccccgcccccgcctacacccccagccccgcccccgcctacacccccagccccgtgcccacctacacccccagccccgcccccgcctacacccccagccccgcccccaactacaaccccgcccccagcgtggcctacagcggcggccccgccgagcccgccagcagacccccctgggtgaccgacgacagcttcagccagaagttcgcccccggcaagagcaccaccagcatcagcaagcagaccctgcccagaggcggccccgcctacacccccgccggcccccaggtgccccccctggccagaggcaccgtgcagagagccgagagattccccgccagcagcagaacccccctgtgcggccactgcaacaacgtgatcagaggccccttcctggtggccatgggcagaagctggcaccccgaggagttcacctgcgcctactgcaagaccagcctggccgacgtgtgcttcgtggaggagcagaacaacgtgtactgcgagagatgctacgagcagttcttcgcccccctgtgcgccaagtgcaacaccaagatcatgggcgaggtgatgcacgccctgagacagacctggcacaccacctgcttcgtgtgcgccgcctgcaagaagcccttcggcaacagcctgttccacatggaggacggcgagccctactgcgagaaggactacatcaacctgttcagcaccaagtgccacggctgcgacttccccgtggaggccggcgacaagttcatcgaggccctgggccacacctggcacgacacctgcttcatctgcgccgtgtgccacgtgaacctggagggccagcccttctacagcaagaaggacagacccctgtgcaagaagcacgcccacaccatcaacctgtag

SEQ ID NO: 87125 - DNA, 1854 bp, synthetic construct; identical to SEQ ID NO: 87118
  misc_feature 1..1854: note = Description of Artificial Sequence: Synthetic coding sequence
  source 1..1854: mol_type = other DNA

SEQ ID NO: 87126 - DNA, 1947 bp, synthetic construct
  misc_feature 1..1947: note = Description of Artificial Sequence: Synthetic coding sequence
  source 1..1947: mol_type = other DNA
atgagctacagcgtgaccctgaccggccccggcccctggggcttcagactgcagggcggcaaggacttcaacatgcccctgaccatcagcagaatcacccccggcagcaaggccgcccagagccagctgagccagggcgacctggtggtggccatcgacggcgtgaacaccgacaccatgacccacctggaggcccagaacaagatcaagagcgccagctacaacctgagcctgaccctgcagaagagcaagagacccatccccatcagcaccaccgccccccccgtgcagacccccctgcccgtgatcccccaccagaaggaccccgccctggacaccaacggcagcctggtggcccccagccccagccccgaggccagagccagccccggcacccccggcacccccgagctgagacccaccttcagccccgccttcagcagacccagcgccttcagcagcctggccgaggccagcgaccccggcccccccagagccagcctgagagccaagaccagccccgagggcgccagagacctgctgggccccaaggccctgcccggcagcagccagcccagacagtacaacaaccccatcggcctgtacagcgccgagaccctgagagagatggcccagatgtaccagatgagcctgagaggcaaggccagcggcgtgggcctgcccggcggcagcctgcccatcaaggacctggccgtggacagcgccagccccgtgtaccaggccgtgatcaagagccagaacaagcccgaggacgaggccgacgagtgggccagaagaagcagcaacctgcagagcagaagcttcagaatcctggcccagatgaccggcaccgagttcatgcaggaccccgacgaggaggccctgagaagaagcagaccccaggccagcagctacagccccgccgtggccgccagcagcgcccccgccacccacaccagctacagcgagggccccgccgcccccgcccccaagcccagagtggtgaccaccgccagcatcagacccagcgtgtaccagcccgtgcccgccagcacctacagccccagccccggcgccaactacagccccaccccctacacccccagccccgtgcccacctacacccccagccccgcccccgcctacacccccagccccgcccccaactacaaccccgcccccagcgtggcctacagcggcggccccgccgagcccgccagcagacccccctgggtgaccgacgacagcttcagccagaagttcgcccccggcaagagcaccaccagcatcagcaagcagaccctgcccagaggcggccccgcctacacccccgccggcccccaggtgccccccctggccagaggcaccgtgcagagagccgagagattccccgccagcagcagaacccccctgtgcggccactgcaacaacgtgatcagaggccccttcctggtggccatgggcagaagctggcaccccgaggagttcacctgcgcctactgcaagaccagcctggccgacgtgtgcttcgtggaggagcagaacaacgtgtactgcgagagatgctacgagcagttcttcgcccccctgtgcgccaagtgcaacaccaagatcatgggcgaggtgatgcacgccctgagacagacctggcacaccacctgcttcgtgtgcgccgcctgcaagaagcccttcggcaacagcctgttccacatggaggacggcgagccctactgcgagaaggactacatcaacctgttcagcaccaagtgccacggctgcgacttccccgtggaggccggcgacaagttcatcgaggccctgggccacacctggcacgacacctgcttcatctgcgccgtgtgccacgtgaacctggagggccagcccttctacagcaagaaggacagacccctgtgcaagaagcacgcccacaccatcaacctgtag

SEQ ID NO: 87127 - DNA, 696 bp, synthetic construct
  misc_feature 1..696: note = Description of Artificial Sequence: Synthetic coding sequence
  source 1..696: mol_type = other DNA
atgagctacagcgtgaccctgaccggccccggcccctggggcttcagactgcagggcggcaaggacttcaacatgcccctgaccatcagcagaatcacccccggcagcaaggccgcccagagccagctgagccagggcgacctggtggtggccatcgacggcgtgaacaccgacaccatgacccacctggaggcccagaacaagatcaagagcgccagctacaacctgagcctgaccctgcagaagagcaagagacccatccccatcagcaccaccgccccccccgtgcagacccccctgcccgtgatcccccaccagaaggaccccgccctggacaccaacggcagcctggtggcccccagccccagccccgaggccagagccagccccggcacccccggcacccccgagctgagacccaccttcagccccgccttcagcagacccagcgccttcagcagcctggccgaggccagcgaccccggcccccccagagccagcctgagagccaagaccagccccgagggcgccagagacctgctgggccccaaggccctgcccggcagcagccagcccagacagtacaacaaccccatcggcctgtacagcgccgagaccctgagagagatggcccagatgtaccagatgagcctgagaggcaaggccagcggcgtgggcctgcccggcggctggtag

SEQ ID NO: 87128 - DNA, 1839 bp, synthetic construct
  misc_feature 1..1839: note = Description of Artificial Sequence: Synthetic coding sequence
  source 1..1839: mol_type = other DNA
atgagccaccccagctggctgccccccaagagcaccggcgagcccctgggccacgtgcccgccagaatggagaccacccacagcttcggcaaccccagcatcagcgtgagcacccagcagccccccaagaagttcgcccccgtggtggcccccaagcccaagtacaacccctacaagcagcccggcggcgagggcgacttcctgccccccccccccccccccctggacgacagcagcgccctgcccagcatcagcggcaacttccccccccccccccccctggacgaggaggccttcaaggtgcagggcaaccccggcggcaagaccctggaggagagaagaagcagcctggacgccgagatcgacagcctgaccagcatcctggccgacctggagtgcagcagcccctacaagcccagacccccccagagcagcaccggcagcaccgccagcccccccgtgagcacccccgtgaccggccacaagagaatggtgatccccaaccagccccccctgaccgccaccaagaagagcaccctgaagccccagcccgccccccaggccggccccatccccgtggcccccatcggcaccctgaagccccagccccagcccgtgcccgccagctacaccaccgccagcaccagcagcagacccaccttcaacgtgcaggtgaagagcgcccagcccagcccccactacatggccgcccccagcagcggccagatctacggcagcggcccccagggctacaacacccagcccgtgcccgtgagcggccagtgccccccccccagcaccagaggcggcatggactacgcctacatccccccccccggcctgcagcccgagcccggctacggctacgcccccaaccagggcagatactacgagggctactacgccgccggccccggctacggcggcagaaacgacagcgaccccacctacggccagcagggccaccccaacacctggaagagagagcccggctacaccccccccggcgccggcaaccagaacccccccggcatgtaccccgtgaccggccccaagaagacctacatcaccgaccccgtgagcgccccctgcgccccccccctgcagcccaagggcggccacagcggccagctgggccccagcagcgtggcccccagcttcagacccgaggacgagctggagcacctgaccaagaagatgctgtacgacatggagaacccccccgccgacgagtacttcggcagatgcgccagatgcggcgagaacgtggtgggcgagggcaccggctgcaccgccatggaccaggtgttccacgtggactgcttcacctgcatcatctgcaacaacaagctgagaggccagcccttctacgccgtggagaagaaggcctactgcgagccctgctacatcaacaccctggagcagtgcaacgtgtgcagcaagcccatcatggagagaatcctgagagccaccggcaaggcctaccacccccactgcttcacctgcgtgatgtgccacagaagcctggacggcatccccttcaccgtggacgccggcggcctgatccactgcatcgaggacttccacaagaagttcgcccccagatgcagcgtgtgcaaggagcccatcatgcccgcccccggccaggaggagaccgtgagaatcgtggccctggacagagacttccacgtgcactgctacagatgcgaggactgcggcggcctgctgagcgagggcgacaaccagggctgctaccccctggacggccacatcctgtgcaagacctgcaacagcgccagaatcagagtgctgaccgccaaggccagcaccgacctgtag

SEQ ID NO: 87129 - DNA, 282 bp, synthetic construct
  misc_feature 1..282: note = Description of Artificial Sequence: Synthetic coding sequence
  source 1..282: mol_type = other DNA
atgagccaccccagctggctgccccccaagagcaccggcgagcccctgggccacgtgcccgccagaatggagaccacccacagcttcggcaaccccagcatcagcgtgagcacccagcagccccccaagaagttcgcccccgtggtggcccccaagcccaagtacaacccctacaagcagcccggcggcgagggcgacttcctgccccccccccccccccccctggacgacagcagcgccctgcccagcatcagcggcaacttcccccccccccccccctag

SEQ ID NO: 87130 - DNA, 456 bp, synthetic construct
  misc_feature 1..456: note = Description of Artificial Sequence: Synthetic coding sequence
  source 1..456: mol_type = other DNA
atgagccaccccagctggctgccccccaagagcaccggcgagcccctgggccacgtgcccgccagaatggagaccacccacagcttcggcaaccccagcatcagcgtgagcacccagcagccccccaagaagttcgcccccgtggtggcccccaagcccaagtacaacccctacaagcagcccggcggcgagggcgacttcctgccccccccccccccccccctggacgacagcagcgccctgcccagcatcagcggcaacttccccccccccccccccctggacgaggaggccttcaaggtgcagggcaaccccggcggcaagaccctggaggagagaagaagcagcctggacgccgagatcgacagcctgaccagcatcctggccgacctggagtgcagcagcccctacaagcccagacccccccagagcagcaccggcagcaccgccagctag

SEQ ID NO: 87131 - DNA, 336 bp, synthetic construct
  misc_feature 1..336: note = Description of Artificial Sequence: Synthetic coding sequence
  source 1..336: mol_type = other DNA
atgagccaccccagctggctgccccccaagagcaccggcgagcccctgggccacgtgcccgccagaatggagaccacccacagcttcggcaaccccagcatcagcgtgagcacccagcagccccccaagaagttcgcccccgtggtggcccccaagcccaagtacaacccctacaagcagcccggcggcgagggcgacttcctgccccccccccccccccccctggacgacagcagcgccctgcccagcatcagcggcaacttccccccccccccccccctggacgaggaggccttcaaggtgcagggcaaccccggcggcaagaccctggagtag

SEQ ID NO: 87132 - DNA, 201 bp, synthetic construct
  misc_feature 1..201: note = Description of Artificial Sequence: Synthetic coding sequence
  source 1..201: mol_type = other DNA
atgagccaccccagctggctgccccccaagagcaccggcgagcccctgggccacgtgcccgccagaatggagaccacccacagcttcggcaaccccagcatcagcgtgagcacccagcagccccccaagaagttcgcccccgtggtggcccccaagcccaagtacaacccctacaagcagcccggcggcgagggcgactag

SEQ ID NO: 87133 - DNA, 162 bp, synthetic construct
  misc_feature 1..162: note = Description of Artificial Sequence: Synthetic coding sequence
  source 1..162: mol_type = other DNA
atgagccaccccagctggctgccccccaagagcaccggcgagcccctgggccacgtgcccgccagaatggagaccacccacagcttcggcaaccccagcatcagcgtgagcacccagcagccccccaagaagttcgcccccgtggtggcccccaagccctag

SEQ ID NO: 87134 - DNA, 144 bp, synthetic construct
  misc_feature 1..144: note = Description of Artificial Sequence: Synthetic coding sequence
  source 1..144: mol_type = other DNA
atgagccaccccagctggctgccccccaagagcaccggcgagcccctgggccacgtgcccgccagaatggagaccacccacagcttcggcaaccccagcatcagcgtgagcacccagcagccccccaagaagttcgccccctag

SEQ ID NO: 87135 - DNA, 1287 bp, synthetic construct
  misc_feature 1..1287: note = Description of Artificial Sequence: Synthetic coding sequence
  source 1..1287: mol_type = other DNA
atgagccaccccagctggctgccccccaagagcaccggcgagcccctgggccacgtgcccgccagaatggagaccacccacagcttcggcaaccccagcatcagcgtgagcacccagcagccccccaagaagttcgcccccgtggtggcccccaagcccaagtacaacccctacaagcagcccggcggcgagggcgacttcctgccccccccccccccccccctggacgacagcagcgccctgcccagcatcagcggcaacttccccccccccccccccctggacgaggaggccttcaaggtgcagggcaaccccggcggcaagaccctggaggagagaagaagcagcctggacgccgagatcgacagcctgaccagcatcctggccgacctggagtgcagcagcccctacaagcccagacccccccagagcagcaccggcagcaccgccagcccccccgtgagcacccccgtgaccggccacaagagaatggtgatccccaaccagccccccctgaccgccaccaagaagagcaccctgaagccccagcccgccccccaggccggccccatccccgtggcccccatcggcaccctgaagccccagccccagcccgtgcccgccagctacaccaccgccagcaccagcagcagacccaccttcaacgtgcaggtgaagagcgcccagcccagcccccactacatggccgcccccagcagcggccagatctacggcagcggcccccagggctacaacacccagcccgtgcccgtgagcggccagtgccccccccccagcaccagaggcggcatggactacgcctacatccccccccccggcctgcagcccgagcccggctacggctacgcccccaaccagggcagatactacgagggctactacgccgccggccccggctacggcggcagaaacgacagcgaccccacctacggccagcagggccaccccaacacctggaagagagagcccggctacaccccccccggcgccggcaaccagaacccccccggcatgtaccccgtgaccggccccaagaagacctacatcaccgaccccgtgagcgccccctgcgccccccccctgcagcccaagggcggccacagcggccagctgggccccagcagcgtggcccccagcttcagacccgaggacgagctggagcacctgaccaagaagatgctgtacgacatggagaacccccccgccgacgagtacttcggcgagtggggcctggagctgaccagcgaggtgaccatcctgctgtag

SEQ ID NO: 87136 - DNA, 198 bp, synthetic construct
  misc_feature 1..198: note = Description of Artificial Sequence: Synthetic coding sequence
  source 1..198: mol_type = other DNA
atgagccaccccagctggctgccccccaagagcaccggcgagcccctgggccacgtgcccgccagaatggagaccacccacagcttcggcaaccccagcatcagcgtgagcacccagcagccccccaagaagttcgcccccgtggtggcccccaagcccaagtacaacccctacaagcagcccggcggcgagggctag

SEQ ID NO: 87137 - DNA, 174 bp, synthetic construct
  misc_feature 1..174: note = Description of Artificial Sequence: Synthetic coding sequence
  source 1..174: mol_type = other DNA
atgagccaccccagctggctgccccccaagagcaccggcgagcccctgggccacgtgcccgccagaatggagaccacccacagcttcggcaaccccagcatcagcgtgagcacccagcagccccccaagaagttcgcccccgtggtggcccccaagcccaagtacaacccctag

SEQ ID NO: 87138 - DNA, 1839 bp, synthetic construct; identical to SEQ ID NO: 87128
  misc_feature 1..1839: note = Description of Artificial Sequence: Synthetic coding sequence
  source 1..1839: mol_type = other DNA

SEQ ID NO: 87139 - DNA, 471 bp, synthetic construct
  misc_feature 1..471: note = Description of Artificial Sequence: Synthetic coding sequence
  source 1..471: mol_type = other DNA
atgcagaagaaggagaagagcttcggcatccagatgctgagcgtgcagcccgacaccaagcccaagggctgcgccggctgcaacagaaagatcaaggacagatacctgctgaaggccctggacaagtactggcacgaggactgcctgaagtgcgcctgctgcgactgcagactgggcgaggtgggcagcaccctgtacaccaaggccaacctgatcctgtgcagaagagactacctgagactgttcggcgtgaccggcaactgcgccgcctgcagcaagctgatccccgccttcgagatggtgatgagagccaaggacaacgtgtaccacctggactgcttcgcctgccagctgtgcaaccagagattctgcgtgggcgacaagttcttcctgaagaacaacatgatcctgtgccagaccgactacgaggagggcctgatgaaggagggctacgccccccaggtgagatag

SEQ ID NO: 87140 - DNA, 438 bp, synthetic construct
  misc_feature 1..438: note = Description of Artificial Sequence: Synthetic coding sequence
  source 1..438: mol_type = other DNA
atgctgagcgtgcagcccgacaccaagcccaagggctgcgccggctgcaacagaaagatcaaggacagatacctgctgaaggccctggacaagtactggcacgaggactgcctgaagtgcgcctgctgcgactgcagactgggcgaggtgggcagcaccctgtacaccaaggccaacctgatcctgtgcagaagagactacctgagactgttcggcgtgaccggcaactgcgccgcctgcagcaagctgatccccgccttcgagatggtgatgagagccaaggacaacgtgtaccacctggactgcttcgcctgccagctgtgcaaccagagattctgcgtgggcgacaagttcttcctgaagaacaacatgatcctgtgccagaccgactacgaggagggcctgatgaaggagggctacgccccccaggtgagatag

SEQ ID NO: 87141 - DNA, 438 bp, synthetic construct; identical to SEQ ID NO: 87140
  misc_feature 1..438: note = Description of Artificial Sequence: Synthetic coding sequence
  source 1..438: mol_type = other DNA

SEQ ID NO: 87142 - DNA, 438 bp, synthetic construct; identical to SEQ ID NO: 87140
  misc_feature 1..438: note = Description of Artificial Sequence: Synthetic coding sequence
  source 1..438: mol_type = other DNA

SEQ ID NO: 87143 - DNA, 438 bp, synthetic construct; identical to SEQ ID NO: 87140
  misc_feature 1..438: note = Description of Artificial Sequence: Synthetic coding sequence
  source 1..438: mol_type = other DNA

SEQ ID NO: 87144 - DNA, 438 bp, synthetic construct; identical to SEQ ID NO: 87140
  misc_feature 1..438: note = Description of Artificial Sequence: Synthetic coding sequence
  source 1..438: mol_type = other DNA

SEQ ID NO: 87145 - DNA, 438 bp, synthetic construct; identical to SEQ ID NO: 87140
  misc_feature 1..438: note = Description of Artificial Sequence: Synthetic coding sequence
  source 1..438: mol_type = other DNA

SEQ ID NO: 87146 - DNA, 438 bp, synthetic construct; identical to SEQ ID NO: 87140
  misc_feature 1..438: note = Description of Artificial Sequence: Synthetic coding sequence
  source 1..438: mol_type = other DNA

SEQ ID NO: 87147 - DNA, 357 bp, synthetic construct
  misc_feature 1..357: note = Description of Artificial Sequence: Synthetic coding sequence
  source 1..357: mol_type = other DNA
atgctgagcgtgcagcccgacaccaagcccaagggctgcgccggctgcaacagaaagatcaaggacagatacctgctgaaggccctggacaagtactggcacgaggactgcctgaagtgcgcctgctgcgactgcagactgggcgaggtgggcagcaccctgtacaccaaggccaacctgatcctgtgcagaagagactacctgagactgttcggcgtgaccggcaactgcgccgcctgcagcaagctgatccccgccttcgagatggtgatgagagccaaggacaacgtgtaccacctggactgcttcgcctgccagctgtgcaaccagagattctgcgtgggcgacaagttctag

SEQ ID NO: 87148 - DNA, 177 bp, synthetic construct
  misc_feature 1..177: note = Description of Artificial Sequence: Synthetic coding sequence
  source 1..177: mol_type = other DNA
atgctgagcgtgcagcccgacaccaagcccaagggctgcgccggctgcaacagaaagatcaaggacagatacctgctgaaggccctggacaagtactggcacgaggactgcctgaagtgcgcctgctgcgactgcagactgggcgaggtgggcagcaccctgtacaccaaggcctag

SEQ ID NO: 87149 - DNA, 294 bp, synthetic construct
  misc_feature 1..294: note = Description of Artificial Sequence: Synthetic coding sequence
  source 1..294: mol_type = other DNA
atgctgagcgtgcagcccgacaccaagcccaagggctgcgccggctgcaacagaaagatcaaggacagatacctgctgaaggccctggacaagtactggcacgaggactgcctgaagtgcgcctgctgcgactgcagactgggcgaggtgggcagcaccctgtacaccaaggccaacctgatcctgtgcagaagagactacctgagactgttcggcgtgaccggcaactgcgccgcctgcagcaagctgatccccgccttcgagatggtgatgagagccaaggacaacgtgtag

SEQ ID NO: 87150 - DNA, 357 bp, synthetic construct; identical to SEQ ID NO: 87147
  misc_feature 1..357: note = Description of Artificial Sequence: Synthetic coding sequence
  source 1..357: mol_type = other DNA

SEQ ID NO: 87151 - DNA, 255 bp, synthetic construct
  misc_feature 1..255: note = Description of Artificial Sequence: Synthetic coding sequence
  source 1..255: mol_type = other DNA
atgctgagcgtgcagcccgacaccaagcccaagggctgcgccggctgcaacagaaagatcaaggacagatacctgctgaaggccctggacaagtactggcacgaggactgcctgaagtgcgcctgctgcgactgcagactgggcgaggtgggcagcaccctgtacaccaaggccaacctgatcctgtgcagaagagactacctgagactgttcggcgtgaccggcaactgcgccgcctgcagcaagctgatctag

SEQ ID NO: 87152 - DNA, 438 bp, synthetic construct; identical to SEQ ID NO: 87140
  misc_feature 1..438: note = Description of Artificial Sequence: Synthetic coding sequence
  source 1..438: mol_type = other DNA

SEQ ID NO: 87153 - DNA, 492 bp, synthetic construct
  misc_feature 1..492: note = Description of Artificial Sequence: Synthetic coding sequence
  source 1..492: mol_type = other DNA
atgctgatggagggcggcagagccgccgccgccagaaacgtgagcagcatccagatgctgagcgtgcagcccgacaccaagcccaagggctgcgccggctgcaacagaaagatcaaggacagatacctgctgaaggccctggacaagtactggcacgaggactgcctgaagtgcgcctgctgcgactgcagactgggcgaggtgggcagcaccctgtacaccaaggccaacctgatcctgtgcagaagagactacctgagactgttcggcgtgaccggcaactgcgccgcctgcagcaagctgatccccgccttcgagatggtgatgagagccaaggacaacgtgtaccacctggactgcttcgcctgccagctgtgcaaccagagattctgcgtgggcgacaagttcttcctgaagaacaacatgatcctgtgccagaccgactacgaggagggcctgatgaaggagggctacgccccccaggtgagatag

SEQ ID NO: 87154 - DNA, 438 bp, synthetic construct; identical to SEQ ID NO: 87140
  misc_feature 1..438: note = Description of Artificial Sequence: Synthetic coding sequence
  source 1..438: mol_type = other DNA

SEQ ID NO: 87155 - DNA, 378 bp, synthetic construct
  misc_feature 1..378: note = Description of Artificial Sequence: Synthetic coding sequence
  source 1..378: mol_type = other DNA
atgctgagcgtgcagcccgacaccaagcccaagggctgcgccggctgcaacagaaagatcaaggacagatacctgctgaaggccctggacaagtactggcacgaggactgcctgaagtgcgcctgctgcgactgcagatgggagagactgttcggcgtgaccggcaactgcgccgcctgcagcaagctgatccccgccttcgagatggtgatgagagccaaggacaacgtgtaccacctggactgcttcgcctgccagctgtgcaaccagagattctgcgtgggcgacaagttcttcctgaagaacaacatgatcctgtgccagaccgactacgaggagggcctgatgaaggagggctacgccccccaggtgagatag

SEQ ID NO: 87156 - DNA, 267 bp, synthetic construct
  misc_feature 1..267: note = Description of Artificial Sequence: Synthetic coding sequence
  source 1..267: mol_type = other DNA
atgctgagcgtgcagcccgacaccaagcccaagggctgcgccggctgcaacagaaagatcaaggacagatacctgctgaaggccctggacaagtactggcacgaggactgcctgaagtgcgcctgctgcgactgcagactgggcgaggtgggcagcaccctgtacaccaaggccaacctgatcctgtgcagaagagactacctgagactgttcggcgtgaccggcaactgcgccgcctgcagcaagctgatccccgccttcgagtag

SEQ ID NO: 87157 - DNA, 333 bp, synthetic construct
  misc_feature 1..333: note = Description of Artificial Sequence: Synthetic coding sequence
  source 1..333: mol_type = other DNA
atgctgagcgtgcagcccgacaccaagcccaagggctgcgccggctgcaacagaaagatcaaggacagatacctgctgaaggccctggacaagtactggcacgaggactgcctgaagtgcgcctgctgcgactgcagactgggcgaggtgggcagcaccctgtacaccaaggccaacctgatcctgtgcagaagagactacctgagactgttcggcgtgaccggcaactgcgccgcctgcagcaagctgatccccgccttcgagatggtgatgagagccaaggacaacgtgtaccacctggactgcttcgcctgccagctgtgcaaccagtag

SEQ ID NO: 87158 - DNA, 357 bp, synthetic construct; identical to SEQ ID NO: 87147
  misc_feature 1..357: note = Description of Artificial Sequence: Synthetic coding sequence
  source 1..357: mol_type = other DNA

SEQ ID NO: 87159 - DNA, 498 bp, synthetic construct
  misc_feature 1..498: note = Description of Artificial Sequence: Synthetic coding sequence
  source 1..498: mol_type = other DNA
atggtgaaccccggcagcagcagccagcccccccccgtgaccgccggcagcctgagctggaagagatgcgccggctgcggcggcaagatcgccgacagattcctgctgtacgccatggacagctactggcacagcagatgcctgaagtgcagctgctgccaggcccagctgggcgacatcggcaccagctgctacaccaagagcggcatgatcctgtgcagaaacgactacatcagactgttcggcaacagcggcgcctgcagcgcctgcggccagagcatccccgccagcgagctggtgatgagagcccagggcaacgtgtaccacctgaagtgcttcacctgcagcacctgcagaaacagactggtgcccggcgacagattccactacatcaacggcagcctgttctgcgagcacgacagacccaccgccctgatcaacggccacctgaacagcctgcagagcaaccccctgctgcccgaccagaaggtgtgctag

SEQ ID NO: 87160 - DNA, 498 bp, synthetic construct; identical to SEQ ID NO: 87159
  misc_feature 1..498: note = Description of Artificial Sequence: Synthetic coding sequence
  source 1..498: mol_type = other DNA

SEQ ID NO: 87161 - DNA, 2031 bp, synthetic construct
  misc_feature 1..2031: note = Description of Artificial Sequence: Synthetic coding sequence
  source 1..2031: mol_type = other DNA
atggacaagtacgacgacctgggcctggaggccagcaagttcatcgaggacctgaacatgtacgaggccagcaaggacggcctgttcagagtggacaagggcgccggcaacaaccccgagttcgaggagaccagaagagtgttcgccaccaagatggccaagatccacctgcagcagcagcagcagcagctgctgcaggaggagaccctgcccagaggcagcagaggccccgtgaacggcggcggcagactgggcccccaggccagatgggaggtggtgggcagcaagctgaccgtggacggcgccgccaagccccccctggccgccagcaccggcgcccccggcgccgtgaccaccctggccgccggccagcccccctaccccccccaggagcagagaagcagaccctacctgcacggcaccagacacggcagccaggactgcggcagcagagagagcctggccaccagcgagatgagcgccttccaccagcccggcccctgcgaggaccccagctgcctgacccacggcgactactacgacaacctgagcctggccagccccaagtggggcgacaagcccggcgtgagccccagcatcggcctgagcgtgggcagcggctggcccagcagccccggcagcgacccccccctgcccaagccctgcggcgaccaccccctgaaccacagacagctgagcctgagcagcagcagaagcagcgagggcagcctgggcggccagaacagcggcatcggcggcagaagcagcgagaagcccaccggcctgtggagcaccgccagcagccagagagtgagccccggcctgcccagccccaacctggagaacggcgcccccgccgtgggccccgtgcagcccagaacccccagcgtgagcgcccccctggccctgagctgccccagacagggcggcctgcccagaagcaacagcggcctgggcggcgaggtgagcggcgtgatgagcaagcccaacgtggacccccagccctggttccaggacggccccaagagctacctgagcagcagcgcccccagcagcagccccgccggcctggacggcagccagcagggcgccgtgcccggcctgggccccaagcccggctgcaccgacctgggcaccggccccaagctgagccccaccagcctggtgcaccccgtgatgagcaccctgcccgagctgagctgcaaggagggccccctgggctggagcagcgacggcagcctgggcagcgtgctgctggacagccccagcagccccagagtgagactgccctgccagcccctggtgcccggccccgagctgagacccagcgccgccgagctgaagctggaggccctgacccagagactggagagagagatggacgcccaccccaaggccgactacttcggcgcctgcgtgaagtgcagcaagggcgtgttcggcgccggccaggcctgccaggccatgggcaacctgtaccacgacacctgcttcacctgcgccgcctgcagcagaaagctgagaggcaaggccttctacttcgtgaacggcaaggtgttctgcgaggaggacttcctgtacagcggcttccagcagagcgccgacagatgcttcctgtgcggccacctgatcatggacatgatcctgcaggccctgggcaagagctaccaccccggctgcttcagatgcgtgatctgcaacgagtgcctggacggcgtgcccttcaccgtggacagcgagaacaagatctactgcgtgagagactaccacaaggtgctggcccccaagtgcgccgcctgcggcctgcccatcctgccccccgagggcagcgacgagaccatcagagtggtgagcatggacagagactaccacgtggagtgctaccactgcgaggactgcggcctggagctgaacgacgaggacggccacagatgctaccccctggaggaccacctgttctgccacagctgccacgtgaagagactggagaagagacccagcagcaccgccctgcaccagcaccacttctag

SEQ ID NO: 87162 - DNA, 1221 bp, synthetic construct
  misc_feature 1..1221: note = Description of Artificial Sequence: Synthetic coding sequence
  source 1..1221: mol_type = other DNA
atggtgcactgcgccggctgcaagagacccatcctggacagattcctgctgaacgtgctggacagagcctggcacgtgaagtgcgtgcagtgctgcgagtgcaagtgcaacctgaccgagaagtgcttcagcagagagggcaagctgtactgcaagaacgacttcttcagatgcttcggcaccaagtgcgccggctgcgcccagggcatcagccccagcgacctggtgagaagagccagaagcaaggtgttccacctgaactgcttcacctgcatgatgtgcaacaagcagctgagcaccggcgaggagctgtacatcatcgacgagaacaagttcgtgtgcaaggaggactacctgagcaacagcagcgtggccaaggagaacagcctgcacagcgccaccaccggcagcgaccccagcctgagccccgacagccaggaccccagccaggacgacgccaaggacagcgagagcgccaacgtgagcgacaaggaggccggcagcaacgagaacgacgaccagaacctgggcgccaagagaagaggccccagaaccaccatcaaggccaagcagctggagaccctgaaggccgccttcgccgccacccccaagcccaccagacacatcagagagcagctggcccaggagaccggcctgaacatgagagtgatccaggtgtggttccagaacagaagaagcaaggagagaagaatgaagcagctgagcgccctgggcgccagaagacacgccttcttcagaagccccagaagaatgagacccctggtggacagactggagcccggcgagctgatccccaacggccccttcagcttctacggcgactaccagagcgagtactacggccccggcggcaactacgacttcttcccccagggcccccccagcagccaggcccagacccccgtggacctgcccttcgtgcccagcagcggccccagcggcacccccctgggcggcctggagcaccccctgcccggccaccaccccagcagcgaggcccagagattcaccgacatcctggcccacccccccggcgacagccccagccccgagcccagcctgcccggccccctgcacagcatgagcgccgaggtgttcggccccagcccccccttcagcagcctgagcgtgaacggcggcgccagctacggcaaccacctgagccacccccccgagatgaacgaggccgccgtgtggtag

SEQ ID NO: 87163 - DNA, 1221 bp, synthetic construct
  misc_feature 1..1221: note = Description of Artificial Sequence: Synthetic coding sequence
  source 1..1221: mol_type = other DNA
atgctgttccacagcctgagcggccccgaggtgcacggcgtgatcgacgagatggacagaagagccaagagcgaggcccccgccatcagcagcgccatcgacagaggcgacaccgagaccaccatgcccagcatcagcagcgacagagccgccctgtgcgccggctgcggcggcaagatcagcgacagatactacctgctggccgtggacaagcagtggcacatgagatgcctgaagtgctgcgagtgcaagctgaacctggagagcgagctgacctgcttcagcaaggacggcagcatctactgcaaggaggactactacagaagattcagcgtgcagagatgcgccagatgccacctgggcatcagcgccagcgagatggtgatgagagccagagacctggtgtaccacctgaactgcttcacctgcaccacctgcaacaagatgctgaccaccggcgaccacttcggcatgaaggacagcctggtgtactgcagactgcacttcgaggccctgctgcagggcgagtaccccgcccacttcaaccacgccgacgtggccgccgccgccgccgccgccgccgccgccaagagcgccggcctgggcgccgccggcgccaaccccctgggcctgccctactacaacggcgtgggcaccgtgcagaagggcagacccagaaagagaaagagccccggccccggcgccgacctggccgcctacaacgccgccctgagctgcaacgagaacgacgccgagcacctggacagagaccagccctaccccagcagccagaagaccaagagaatgagaaccagcttcaagcaccaccagctgagaaccatgaagagctacttcgccatcaaccacaaccccgacgccaaggacctgaagcagctggcccagaagaccggcctgaccaagagagtgctgcaggtgtggttccagaacgccagagccaagttcagaagaaacctgctgagacaggagaacaccggcgtggacaagagcaccgacgccgccctgcagaccggcacccccagcggccccgccagcgagctgagcaacgccagcctgagccccagcagcacccccaccaccctgaccgacctgaccagccccaccctgcccaccgtgaccagcgtgctgaccagcgtgcccggcaacctggagggccacgagccccacagccccagccagaccaccctgaccaacctgttctag

SEQ ID NO: 87164 - DNA, 1194 bp, synthetic construct
  misc_feature 1..1194: note = Description of Artificial Sequence: Synthetic coding sequence
  source 1..1194: mol_type = other DNA
atggaggccagaggcgagctgggccccgccagagagagcgccggcggcgacctgctgctggccctgctggccagaagagccgacctgagaagagagatccccctgtgcgccggctgcgaccagcacatcctggacagattcatcctgaaggccaccgccaccggcaccgccagcgtgagcagcgccgccaccgccacccccctggccgagagatgcttcagcagaggcgagagcgtgtactgcaaggacgacttcttcaagagattcggcaccaagtgcgccgcctgccagctgggcatcccccccacccaggtggtgagaagagcccaggacttcgtgtaccacctgcactgcttcgcctgcgtggtgtgcaagagacagctggccaccggcgacgagttctacctgatggaggacagcagactggtgtgcaaggccgactacgagaccgccaagcagagagaggccgaggccaccgccaagagacccagaaccaccatcaccgccaagcagctggagaccctgaagagcgcctacaacaccagccccaagcccgccagacacgtgagagagcagctgagcagcgagaccggcctggacatgagagtggtgcaggtgtggttccagaacagaagagccaaggagaagagactgaagaaggacgccggcagacagagatggggccagtacttcagaaacatgaagagaagcagaggcggcagcaagagcgacaaggacagcgtgcaggagggccaggacagcgacgccgaggtgagcttccccgtgagcctgccctggagaaagtgggccagacccatggccagcaccggcgcctggggccaccccggcctgggccccgccctgggcagccccggccagctgctgcccggcgcctggagacccggcagacccagagccgtgcccagagccgccagcagacagcccctgagatgcccccccatccccagaagacccgccgagcccccctggccccccctgctgagcagcctggtgtaccccgacaccagcctgggcctggtgcccagcggcgcccccggcggccccccccccatgagagtgctggccggcaacggccccagcagcgacctgagcaccggcagcagcggcggctaccccgacttccccgccagccccgccagctggctggacgaggtggaccacgcccagttctag

SEQ ID NO: 87165 - DNA, 1209 bp, synthetic construct
  misc_feature 1..1209: note = Description of Artificial Sequence: Synthetic coding sequence
  source 1..1209: mol_type = other DNA
atggaggccagaggcgagctgggccccgccagagagagcgccggcggcgacctgctgctggccctgctggccagaagagccgacctgagaagagagatccccctgtgcgccggctgcgaccagcacatcctggacagattcatcctgaaggccctggacagacactggcacagcaagtgcctgaagtgcagcgactgccacacccccctggccgagagatgcttcagcagaggcgagagcgtgtactgcaaggacgacttcttcaagagattcggcaccaagtgcgccgcctgccagctgggcatcccccccacccaggtggtgagaagagcccaggacttcgtgtaccacctgcactgcttcgcctgcgtggtgtgcaagagacagctggccaccggcgacgagttctacctgatggaggacagcagactggtgtgcaaggccgactacgagaccgccaagcagagagaggccgaggccaccgccaagagacccagaaccaccatcaccgccaagcagctggagaccctgaagagcgcctacaacaccagccccaagcccgccagacacgtgagagagcagctgagcagcgagaccggcctggacatgagagtggtgcaggtgtggttccagaacagaagagccaaggagaagagactgaagaaggacgccggcagacagagatggggccagtacttcagaaacatgaagagaagcagaggcggcagcaagagcgacaaggacagcgtgcaggagggccaggacagcgacgccgaggtgagcttccccgacgagcccagcctggccgagatgggccccgccaacggcctgtacggcagcctgggcgagcccacccaggccctgggcagacccagcggcgccctgggcaacttcagcctggagcacggcggcctggccggccccgagcagtacagagagctgagacccggcagcccctacggcgtgccccccagccccgccgccccccagagcctgcccggcccccagcccctgctgagcagcctggtgtaccccgacaccagcctgggcctggtgcccagcggcgcccccggcggccccccccccatgagagtgctggccggcaacggccccagcagcgacctgagcaccggcagcagcggcggctaccccgacttccccgccagccccgccagctggctggacgaggtggaccacgcccagttctag

SEQ ID NO: 87166 - DNA, 1194 bp, synthetic construct
  misc_feature 1..1194: note = Description of Artificial Sequence: Synthetic coding sequence
  source 1..1194: mol_type = other DNA
atgctgctggagaccggcctggagagagacagagccagacccggcgccgccgccgtgtgcaccctgggcggcaccagagagatccccctgtgcgccggctgcgaccagcacatcctggacagattcatcctgaaggccctggacagacactggcacagcaagtgcctgaagtgcagcgactgccacacccccctggccgagagatgcttcagcagaggcgagagcgtgtactgcaaggacgacttcttcaagagattcggcaccaagtgcgccgcctgccagctgggcatcccccccacccaggtggtgagaagagcccaggacttcgtgtaccacctgcactgcttcgcctgcgtggtgtgcaagagacagctggccaccggcgacgagttctacctgatggaggacagcagactggtgtgcaaggccgactacgagaccgccaagcagagagaggccgaggccaccgccaagagacccagaaccaccatcaccgccaagcagctggagaccctgaagagcgcctacaacaccagccccaagcccgccagacacgtgagagagcagctgagcagcgagaccggcctggacatgagagtggtgcaggtgtggttccagaacagaagagccaaggagaagagactgaagaaggacgccggcagacagagatggggccagtacttcagaaacatgaagagaagcagaggcggcagcaagagcgacaaggacagcgtgcaggagggccaggacagcgacgccgaggtgagcttccccgacgagcccagcctggccgagatgggccccgccaacggcctgtacggcagcctgggcgagcccacccaggccctgggcagacccagcggcgccctgggcaacttcagcctggagcacggcggcctggccggccccgagcagtacagagagctgagacccggcagcccctacggcgtgccccccagccccgccgccccccagagcctgcccggcccccagcccctgctgagcagcctggtgtaccccgacaccagcctgggcctggtgcccagcggcgcccccggcggccccccccccatgagagtgctggccggcaacggccccagcagcgacctgagcaccggcagcagcggcggctaccccgacttccccgccagccccgccagctggctggacgaggtggaccacgcccagttctag

SEQ ID NO: 87167 - DNA, 1173 bp, synthetic construct
  misc_feature 1..1173: note = Description of Artificial Sequence: Synthetic coding sequence
  source 1..1173: mol_type = other DNA
atgatgcagagcgccaccgtgcccgccgagggcgccgtgaagggcctgcccgagatgctgggcgtgcccatgcagcagatcccccagtgcgccggctgcaaccagcacatcctggacaagttcatcctgaaggtgctggacagacactggcacagcagctgcctgaagtgcgccgactgccagatgcagctggccgacagatgcttcagcagagccggcagcgtgtactgcaaggaggacttcttcaagagattcggcaccaagtgcaccgcctgccagcagggcatcccccccacccaggtggtgagaaaggcccaggacttcgtgtaccacctgcactgcttcgcctgcatcatctgcaacagacagctggccaccggcgacgagttctacctgatggaggacggcagactggtgtgcaaggaggactacgagaccgccaagcagaacgacgacagcgaggccggcgccaagagacccagaaccaccatcaccgccaagcagctggagaccctgaagaacgcctacaagaacagccccaagcccgccagacacgtgagagagcagctgagcagcgagaccggcctggacatgagagtggtgcaggtgtggttccagaacagaagagccaaggagaagagactgaagaaggacgccggcagacacagatggggccagttctacaagagcgtgaagagaagcagaggcagcagcaagcaggagaaggagagcagcgccgaggactgcggcgtgagcgacagcgagctgagcttcagagaggaccagatcctgagcgagctgggccacaccaacagaatctacggcaacgtgggcgacgtgaccggcggccagctgatgaacggcagcttcagcatggacggcaccggccagagctaccaggacctgagagacggcagcccctacggcatcccccagagccccagcagcatcagcagcctgcccagccacgcccccctgctgaacggcctggactacaccgtggacagcaacctgggcatcatcgcccacgccggccagggcgtgagccagaccctgagagccatggccggcggccccaccagcgacatcagcaccggcagcagcgtgggctaccccgacttccccaccagccccggcagctggctggacgagatggaccacccccccttctag

SEQ ID NO: 87168 - DNA, 1209 bp, synthetic construct
  misc_feature 1..1209: note = Description of Artificial Sequence: Synthetic coding sequence
  source 1..1209: mol_type = other DNA
atgatggtgcactgcgccggctgcgagagacccatcctggacagattcctgctgaacgtgctggacagagcctggcacatcaagtgcgtgcagtgctgcgagtgcaagaccaacctgagcgagaagtgcttcagcagagagggcaagctgtactgcaagaacgacttcttcagaagattcggcaccaagtgcgccggctgcgcccagggcatcagccccagcgacctggtgagaaaggccagaagcaaggtgttccacctgaactgcttcacctgcatggtgtgcaacaagcagctgagcaccggcgaggagctgtacgtgatcgacgagaacaagttcgtgtgcaaggacgactacctgagcagcagcagcctgaaggagggcagcctgaacagcgtgagcagctgcaccgacagaagcctgagccccgacctgcaggacgccctgcaggacgaccccaaggagaccgacaacagcaccagcagcgacaaggagaccgccaacaacgagaacgaggagcagaacagcggcaccaagagaagaggccccagaaccaccatcaaggccaagcagctggagaccctgaaggccgccttcgccgccacccccaagcccaccagacacatcagagagcagctggcccaggagaccggcctgaacatgagagtgatccaggtgtggttccagaacagaagaagcaaggagagaagaatgaagcagctgagcgccctgggcgccagaagacacgccttcttcagaagccccagaagaatgagacccctgggcggcagactggacgagagcgagatgctgggcagcaccccctacacctactacggcgactaccagggcgactactacgcccccggcagcaactacgacttcttcgcccacggcccccccagccaggcccagagccccgccgacagcagcttcctggccgccagcggccccggcagcacccccctgggcgccctggagccccccctggccggcccccacgccgccgacaaccccagattcaccgacatgatcagccaccccgacacccccagccccgagcccggcctgcccggcaccctgcaccccatgcccggcgaggtgttcagcggcggccccagcccccccttccccatgagcggcaccagcggctacagcggccccctgagccaccccaaccccgagctgaacgaggccgccgtgtggtag

SEQ ID NO: 87169 - DNA, 1071 bp, synthetic construct
  misc_feature 1..1071: note = Description of Artificial Sequence: Synthetic coding sequence
  source 1..1071: mol_type = other DNA
atgcagatcctgagcagatgccagggcctgatgagcgaggagtgcggcagaaccaccgccctggccgccggcagaaccagaaagggcgccggcgaggagggcctggtgagccccgagggcgccggcgacgaggacagctgcagcagcagcgcccccctgagccccagcagcagccccagaagcatggccagcggcagcggctgcccccccggcaagtgcgtgtgcaacagctgcggcctggagatcgtggacaagtacctgctgaaggtgaacgacctgtgctggcacgtgagatgcctgagctgcagcgtgtgcagaaccagcctgggcagacacaccagctgctacatcaaggacaaggacatcttctgcaagctggactacttcagaagatacggcaccagatgcagcagatgcggcagacacatccacagcaccgactgggtgagaagagccaagggcaacgtgtaccacctggcctgcttcgcctgcttcagctgcaagagacagctgagcaccggcgaggagttcgccctggtggaggagaaggtgctgtgcagagtgcactacgactgcatgctggacaacctgaagagagaggtggagaacggcaacggcatcagcgtggagggcgccctgctgaccgagcaggacgtgaaccaccccaagcccgccaagagagccagaaccagcttcaccgccgaccagctgcaggtgatgcaggcccagttcgcccaggacaacaaccccgacgcccagaccctgcagaagctggccgagagaaccggcctgagcagaagagtgatccaggtgtggttccagaactgcagagccagacacaagaagcacgtgagccccaaccacagcagcagcacccccgtgaccgccgtgccccccagcagactgagcccccccatgctggaggagatggcctacagcgcctacgtgccccaggacggcaccatgctgaccgccctgcacagctacatggacgcccacagccccaccaccctgggcctgcagcccctgctgccccacagcatgacccagctgcccatcagccacacctag

SEQ ID NO: 87170 - DNA, 1041 bp, synthetic construct
  misc_feature 1..1041: note = Description of Artificial Sequence: Synthetic coding sequence
  source 1..1041: mol_type = other DNA
atgagcgaggagtgcggcagaaccaccgccctggccgccggcagaaccagaaagggcgccggcgaggagggcctggtgagccccgagggcgccggcgacgaggacagctgcagcagcagcgcccccctgagccccagcagcagccccagaagcatggccagcggcagcggctgcccccccggcaagtgcgtgtgcaacagctgcggcctggagatcgtggacaagtacctgctgaaggtgaacgacctgtgctggcacgtgagatgcctgagctgcagcgtgtgcagaaccagcctgggcagacacaccagctgctacatcaaggacaaggacatcttctgcaagctggactacttcagaagatacggcaccagatgcagcagatgcggcagacacatccacagcaccgactgggtgagaagagccaagggcaacgtgtaccacctggcctgcttcgcctgcttcagctgcaagagacagctgagcaccggcgaggagttcgccctggtggaggagaaggtgctgtgcagagtgcactacgactgcatgctggacaacctgaagagagaggtggagaacggcaacggcatcagcgtggagggcgccctgctgaccgagcaggacgtgaaccaccccaagcccgccaagagagccagaaccagcttcaccgccgaccagctgcaggtgatgcaggcccagttcgcccaggacaacaaccccgacgcccagaccctgcagaagctggccgagagaaccggcctgagcagaagagtgatccaggtgtggttccagaactgcagagccagacacaagaagcacgtgagccccaaccacagcagcagcacccccgtgaccgccgtgccccccagcagactgagcccccccatgctggaggagatggcctacagcgcctacgtgccccaggacggcaccatgctgaccgccctgcacagctacatggacgcccacagccccaccaccctgggcctgcagcccctgctgccccacagcatgacccagctgcccatcagccacacctag

SEQ ID NO: 87171 - DNA, 1194 bp, synthetic construct
  misc_feature 1..1194: note = Description of Artificial Sequence: Synthetic coding sequence
  source 1..1194: mol_type = other DNA
atggagatcgtgggctgcagagccgaggacaacagctgccccttcagaccccccgccatgctgttccacggcatcagcggcggccacatccagggcatcatggaggagatggagagaagaagcaagaccgaggccagactggccaagggcgcccagctgaacggcagagacgccggcatgccccccctgagccccgagaagcccgccctgtgcgccggctgcggcggcaagatcagcgacagatactacctgctggccgtggacaagcagtggcacctgagatgcctgaagtgctgcgagtgcaagctggccctggagagcgagctgacctgcttcgccaaggacggcagcatctactgcaaggaggactactacagaagattcagcgtgcagagatgcgccagatgccacctgggcatcagcgccagcgagatggtgatgagagccagagacagcgtgtaccacctgagctgcttcacctgcagcacctgcaacaagaccctgaccaccggcgaccacttcggcatgaaggacagcctggtgtactgcagagcccacttcgagaccctgctgcagggcgagtaccccccccagctgagctacaccgagctggccgccaagagcggcggcctggccctgccctacttcaacggcaccggcaccgtgcagaagggcagacccagaaagagaaagagccccgccctgggcgtggacatcgtgaactacaacagcggctgcaacgagaacgaggccgaccacctggacagagaccagcagccctacccccccagccagaagaccaagagaatgagaaccagcttcaagcaccaccagctgagaaccatgaagagctacttcgccatcaaccacaaccccgacgccaaggacctgaagcagctggcccagaagaccggcctgaccaagagagtgctgcaggtgtggttccagaacgccagagccaagttcagaagaaacctgctgagacaggagaacggcggcgtggacaaggccgacggcaccagcctgcccgccccccccagcgccgacagcggcgccctgaccccccccggcaccgccaccaccctgaccgacctgaccaaccccaccatcaccgtggtgaccagcgtgaccagcaacatggacagccacgagagcggcagccccagccagaccaccctgaccaacctgttctag

SEQ ID NO: 87172 - DNA, 1167 bp, synthetic construct
  misc_feature 1..1167: note = Description of Artificial Sequence: Synthetic coding sequence
  source 1..1167: mol_type = other DNA
atgctgaacggcaccaccctggaggccgccatgctgttccacggcatcagcggcggccacatccagggcatcatggaggagatggagagaagaagcaagaccgaggccagactggccaagggcgcccagctgaacggcagagacgccggcatgccccccctgagccccgagaagcccgccctgtgcgccggctgcggcggcaagatcagcgacagatactacctgctggccgtggacaagcagtggcacctgagatgcctgaagtgctgcgagtgcaagctggccctggagagcgagctgacctgcttcgccaaggacggcagcatctactgcaaggaggactactacagaagattcagcgtgcagagatgcgccagatgccacctgggcatcagcgccagcgagatggtgatgagagccagagacagcgtgtaccacctgagctgcttcacctgcagcacctgcaacaagaccctgaccaccggcgaccacttcggcatgaaggacagcctggtgtactgcagagcccacttcgagaccctgctgcagggcgagtaccccccccagctgagctacaccgagctggccgccaagagcggcggcctggccctgccctacttcaacggcaccggcaccgtgcagaagggcagacccagaaagagaaagagccccgccctgggcgtggacatcgtgaactacaacagcggctgcaacgagaacgaggccgaccacctggacagagaccagcagccctacccccccagccagaagaccaagagaatgagaaccagcttcaagcaccaccagctgagaaccatgaagagctacttcgccatcaaccacaaccccgacgccaaggacctgaagcagctggcccagaagaccggcctgaccaagagagtgctgcaggtgtggttccagaacgccagagccaagttcagaagaaacctgctgagacaggagaacggcggcgtggacaaggccgacggcaccagcctgcccgccccccccagcgccgacagcggcgccctgaccccccccggcaccgccaccaccctgaccgacctgaccaaccccaccatcaccgtggtgaccagcgtgaccagcaacatggacagccacgagagcggcagccccagccagaccaccctgaccaacctgttctag

SEQ ID NO: 87173 - DNA, 1149 bp, synthetic construct
  misc_feature 1..1149: note = Description of Artificial Sequence: Synthetic coding sequence
  source 1..1149: mol_type = other DNA
atgctggacggcctgaagatggaggagaacttccagagcgccatcgacaccagcgccagcttcagcagcctgctgggcagagccgtgagccccaagagcgtgtgcgagggctgccagagagtgatcctggacagattcctgctgagactgaacgacagcttctggcacgagcagtgcgtgcagtgcgccagctgcaaggagcccctggagaccacctgcttctacagagacaagaagctgtactgcaagtacgactacgagaagctgttcgccgtgaagtgcggcggctgcttcgaggccatcgcccccaacgagttcgtgatgagagcccagaagagcgtgtaccacctgagctgcttctgctgctgcgtgtgcgagagacagctgcagaagggcgacgagttcgtgctgaaggagggccagctgctgtgcaagggcgactacgagaaggagagagagctgctgagcctggtgagccccgccgccagcgacagcggcaagagcgacgacgaggagagcctgtgcaagagcgcccacggcgccggcaagggcaccgccgaggagggcaaggaccacaagagacccaagagacccagaaccatcctgaccacccagcagagaagagccttcaaggccagcttcgaggtgagcagcaagccctgcagaaaggtgagagagaccctggccgccgagaccggcctgagcgtgagagtggtgcaggtgtggttccagaaccagagagccaagatgaagaagctggccagaagacagcagcagcagcagcaggaccagcagaacacccagagactgagcagcgcccagaccaacggcggcggcagcgccggcatggagggcatcatgaacccctacaccgccctgcccaccccccagcagctgctggccatcgagcagagcgtgtacagcagcgaccccttcagacagggcctgacccccccccagatgcccggcgaccacatgcacccctacggcgccgagcccctgttccacgacctggacagcgacgacaccagcctgagcaacctgggcgactgcttcctggccaccagcgaggccggccccctgcagagcagagtgggcaaccccatcgaccacctgtacagcatgcagaacagctacttcaccagctag

SEQ ID NO: 87174 - DNA, 1149 bp, synthetic construct; identical to SEQ ID NO: 87173
  misc_feature 1..1149: note = Description of Artificial Sequence: Synthetic coding sequence
  source 1..1149: mol_type = other DNA

SEQ ID NO: 87175 - DNA, 1149 bp, synthetic construct; identical to SEQ ID NO: 87173
  misc_feature 1..1149: note = Description of Artificial Sequence: Synthetic coding sequence
  source 1..1149: mol_type = other DNA

SEQ ID NO: 87176 - DNA, 1221 bp, synthetic construct
  misc_feature 1..1221: note = Description of Artificial Sequence: Synthetic coding sequence
  source 1..1221: mol_type = other DNA
atggacatcgccaccggccccgagagcctggagagatgcttccccagaggccagaccgactgcgccaagatgctggacggcatcaagatggaggagcacgccctgagacccggccccgccaccctgggcgtgctgctgggcagcgactgcccccaccccgccgtgtgcgagggctgccagagacccatcagcgacagattcctgatgagagtgaacgagagcagctggcacgaggagtgcctgcagtgcgccgcctgccagcaggccctgaccaccagctgctacttcagagacagaaagctgtactgcaagcaggactaccagcagctgttcgccgccaagtgcagcggctgcatggagaagatcgcccccaccgagttcgtgatgagagccctggagtgcgtgtaccacctgggctgcttctgctgctgcgtgtgcgagagacagctgagaaagggcgacgagttcgtgctgaaggagggccagctgctgtgcaagggcgactacgagaaggagaaggacctgctgagcagcgtgagccccgacgagagcgacagcgtgaagagcgaggacgaggacggcgacatgaagcccgccaagggccagggcagccagagcaagggcagcggcgacgacggcaaggaccccagaagacccaagagacccagaaccatcctgaccacccagcagagaagagccttcaaggccagcttcgaggtgagcagcaagccctgcagaaaggtgagagagaccctggccgccgagaccggcctgagcgtgagagtggtgcaggtgtggttccagaaccagagagccaagatgaagaagctggccagaagacaccagcagcagcaggagcagcagaacagccagagactgggccagggcgagcccggccccggccagggcctgggccaggaggtgctgagcagcagaatggagggcatgatggccagctacacccccctggcccccccccagcagcagatcgtggccatggagcagagcccctacggcagcagcgaccccttccagcagggcctgacccccccccagatgcccggcaacgacagcatcttccacgacatcgacagcgacaccagcctgaccagcctgagcgactgcttcctgggcagcagcgacgtgggcagcctgcaggccagagtgggcaaccccatcgacagactgtacagcatgcagagcagctacttcgccagctag

SEQ ID NO: 87177 - DNA, 1209 bp, synthetic construct
  misc_feature 1..1209: note = Description of Artificial Sequence: Synthetic coding sequence
  source 1..1209: mol_type = other DNA
atggacatcgccaccggccccgagagcctggagagatgcttccccagaggccagaccgactgcgccaagatgctggacggcatcaagatggaggagcacgccctgagacccggccccgccaccctgggcgtgctgctgggcagcgactgcccccaccccgccgtgtgcgagggctgccagagacccatcagcgacagattcctgatgagagtgaacgagagcagctggcacgaggagtgcctgcagtgcgccgcctgccagcaggccctgaccaccagctgctacttcagagacagaaagctgtactgcaagcaggactaccagcagctgttcgccgccaagtgcagcggctgcatggagaagatcgcccccaccgagttcgtgatgagagccctggagtgcgtgtaccacctgggctgcttctgctgctgcgtgtgcgagagacagctgagaaagggcgacgagttcgtgctgaaggagggccagctgctgtgcaagggcgactacgagaaggagaaggacctgctgagcagcgtgagccccgacgagagcgacagcgtgaagagcgaggacgaggacggcgacatgaagcccgccaagggccagggcagccagagcaagggcagcggcgacgacggcaaggaccccagaagacccaagagacccagaaccatcctgaccacccagcagagaagagccttcaaggccagcttcgaggtgagcagcaagccctgcagaaaggtgagagagaccctggccgccgagaccggcctgagcgtgagagtggtgcaggtgtggttccagaaccagagagccaagatgaagaagctggccagaagacaccagcagcagcaggagcagcagaacagccagagactgggccaggaggtgctgagcagcagaatggagggcatgatggccagctacacccccctggcccccccccagcagcagatcgtggccatggagcagagcccctacggcagcagcgaccccttccagcagggcctgacccccccccagatgcccggcgaccacatgaacccctacggcaacgacagcatcttccacgacatcgacagcgacaccagcctgaccagcctgagcgactgcttcctgggcagcagcgacgtgggcagcctgcaggccagagtgggcaaccccatcgacagactgtacagcatgcagagcagctacttcgccagctag

SEQ ID NO: 87178 - DNA, 1119 bp, synthetic construct
  misc_feature 1..1119: note = Description of Artificial Sequence: Synthetic coding sequence
  source 1..1119: mol_type = other DNA
atgctggacggcatcaagatggaggagcacgccctgagacccggccccgccaccctgggcgtgctgctgggcagcgactgcccccaccccgccgtgtgcgagggctgccagagacccatcagcgacagattcctgatgagagtgaacgagagcagctggcacgaggagtgcctgcagtgcgccgcctgccagcaggccctgaccaccagctgctacttcagagacagaaagctgtactgcaagcaggactaccagcagctgttcgccgccaagtgcagcggctgcatggagaagatcgcccccaccgagttcgtgatgagagccctggagtgcgtgtaccacctgggctgcttctgctgctgcgtgtgcgagagacagctgagaaagggcgacgagttcgtgctgaaggagggccagctgctgtgcaagggcgactacgagaaggagaaggacctgctgagcagcgtgagccccgacgagagcgacagcgtgaagagcgaggacgaggacggcgacatgaagcccgccaagggccagggcagccagagcaagggcagcggcgacgacggcaaggaccccagaagacccaagagacccagaaccatcctgaccacccagcagagaagagccttcaaggccagcttcgaggtgagcagcaagccctgcagaaaggtgagagagaccctggccgccgagaccggcctgagcgtgagagtggtgcaggtgtggttccagaaccagagagccaagatgaagaagctggccagaagacaccagcagcagcaggagcagcagaacagccagagactgggccaggaggtgctgagcagcagaatggagggcatgatggccagctacacccccctggcccccccccagcagcagatcgtggccatggagcagagcccctacggcagcagcgaccccttccagcagggcctgacccccccccagatgcccggcaacgacagcatcttccacgacatcgacagcgacaccagcctgaccagcctgagcgactgcttcctgggcagcagcgacgtgggcagcctgcaggccagagtgggcaaccccatcgacagactgtacagcatgcagagcagctacttcgccagctag

SEQ ID NO: 87179 - DNA, 1188 bp, synthetic construct
  misc_feature 1..1188: note = Description of Artificial Sequence: Synthetic coding sequence
  source 1..1188: mol_type = other DNA
atggacatcgccaccggccccgagagcctggagagatgcttccccagaggccagaccgactgcgccaagatgctggacggcatcaagatggaggagcacgccctgagacccggccccgccaccctgggcgtgctgctgggcagcgactgcccccaccccgccgtgtgcgagggctgccagagacccatcagcgacagattcctgatgagagtgaacgagagcagctggcacgaggagtgcctgcagtgcgccgcctgccagcaggccctgaccaccagctgctacttcagagacagaaagctgtactgcaagcaggactaccagcagctgttcgccgccaagtgcagcggctgcatggagaagatcgcccccaccgagttcgtgatgagagccctggagtgcgtgtaccacctgggctgcttctgctgctgcgtgtgcgagagacagctgagaaagggcgacgagttcgtgctgaaggagggccagctgctgtgcaagggcgactacgagaaggagaaggacctgctgagcagcgtgagccccgacgagagcgacagcgtgaagagcgaggacgaggacggcgacatgaagcccgccaagggccagggcagccagagcaagggcagcggcgacgacggcaaggaccccagaagacccaagagacccagaaccatcctgaccacccagcagagaagagccttcaaggccagcttcgaggtgagcagcaagccctgcagaaaggtgagagagaccctggccgccgagaccggcctgagcgtgagagtggtgcaggtgtggttccagaaccagagagccaagatgaagaagctggccagaagacaccagcagcagcaggagcagcagaacagccagagactgggccaggaggtgctgagcagcagaatggagggcatgatggccagctacacccccctggcccccccccagcagcagatcgtggccatggagcagagcccctacggcagcagcgaccccttccagcagggcctgacccccccccagatgcccggcaacgacagcatcttccacgacatcgacagcgacaccagcctgaccagcctgagcgactgcttcctgggcagcagcgacgtgggcagcctgcaggccagagtgggcaaccccatcgacagactgtacagcatgcagagcagctacttcgccagctag

SEQ ID NO: 87180 - DNA, 318 bp, synthetic construct
  misc_feature 1..318: note = Description of Artificial Sequence: Synthetic coding sequence
  source 1..318: mol_type = other DNA
atgagcatctacttccccatccactgccccgactacctgagaagcgccaagatgaccgaggtgatgatgaacacccagcccatggaggagatcggcctgagccccagaaaggacggcctgagctaccagatcttccccgaccccagcgacttcgacagatgctgcaagctgaaggacagactgcccagcatcgtggtggagcccaccgagggcgaggtggagagcggcgagctgagatggccccccgaggagttcctggtgcaggaggacgagcaggacaactgcgaggagaccgccaaggagaacaaggagcagtag

SEQ ID NO: 87181 - DNA, 264 bp, synthetic construct
  misc_feature 1..264: note = Description of Artificial Sequence: Synthetic coding sequence
  source 1..264: mol_type = other DNA
atggtgagcagcgtggtgggcttctacagcctgagattcttcggcaacttcacccccaagaaggacgacaccaccatgaccaagatcatcggcaactgcgtgagcatcctggtgctgagcagcgccctgcccgtgatgagcagaaccctgggcctgcacaagctgcacctgcccaacaccagcagagacagcgagaccgccagcgtgatgaccagcagcgccagagacaccggcttccaccacctgcaggccctgatgtgctag

SEQ ID NO: 87182 - DNA, 687 bp, synthetic construct
  misc_feature 1..687: note = Description of Artificial Sequence: Synthetic coding sequence
  source 1..687: mol_type = other DNA
atggagggccaggacgaggtgagcgccagagagcagcacttccacagccaggtgagagagagcaccatctgcttcctgctgttcgccatcctgtacgtggtgagctacttcatcatcaccagatacaagagaaagagcgacgagcaggaggacgaggacgccatcgtgaacagaatcagcctgttcctgagcaccttcaccctggccgtgagcgccggcgccgtgctgctgctgcccttcagcatcatcagcaacgagatcctgctgagcttcccccagaactactacatccagtggctgaacggcagcctgatccacggcctgtggaacctggccagcctgttcagcaacctgtgcctgttcgtgctgatgcccttcgccttcttcttcctggagagcgagggcttcgccggcctgaagaagggcatcagagccagaatcctggagaccctggtgatgctgctgctgctggccctgctgatcctgggcatcgtgtgggtggccagcgccctgatcgacaacgacgccgccagcatggagagcctgtacgacctgtgggagttctacctgccctacctgtacagctgcatcagcctgatgggctgcctgctgctgcacctgcccaacaccagcagagacagcgagaccgccaagcccagcgtgaacggccaccagaaggccctgtag

SEQ ID NO: 87183 - DNA, 1473 bp, synthetic construct
  misc_feature 1..1473: note = Description of Artificial Sequence: Synthetic coding sequence
  source 1..1473: mol_type = other DNA
atggagggccaggacgaggtgagcgccagagagcagcacttccacagccaggtgagagagagcaccatctgcttcctgctgttcgccatcctgtacgtggtgagctacttcatcatcaccagatacaagagaaagagcgacgagcaggaggacgaggacgccatcgtgaacagaatcagcctgttcctgagcaccttcaccctggccgtgagcgccggcgccgtgctgctgctgcccttcagcatcatcagcaacgagatcctgctgagcttcccccagaactactacatccagtggctgaacggcagcctgatccacggcctgtggaacctggccagcctgttcagcaacctgtgcctgttcgtgctgatgcccttcgccttcttcttcctggagagcgagggcttcgccggcctgaagaagggcatcagagccagaatcctggagaccctggtgatgctgctgctgctggccctgctgatcctgggcatcgtgtgggtggccagcgccctgatcgacaacgacgccgccagcatggagagcctgtacgacctgtgggagttctacctgccctacctgtacagctgcatcagcctgatgggctgcctgctgctgctgctgtgcacccccgtgggcctgagcagaatgttcaccgtgatgggccagctgctggtgaagcccaccatcctggaggacctggacgagcagatctacatcatcaccctggaggaggaggccctgcagagaagactgaacggcctgagcagcagcgtggagtacaacatcatggagctggagcaggagctggagaacgtgaagaccctgaagaccaagctggagagaagaaagaaggccagcgcctgggagagaaacctggtgtaccccgccgtgatggtgctgctgctgatcgagaccagcatcagcgtgctgctggtggcctgcaacatcctgtgcctgctggtggacgagaccgccatgcccaagggcaccagaggccccggcatcggcaacgccagcctgagcaccttcggcttcgtgggcgccgccctggagatcatcctgatcttctacctgatggtgagcagcgtggtgggcttctacagcctgagattcttcggcaacttcacccccaagaaggacgacaccaccatgaccaagatcatcggcaactgcgtgagcatcctggtgctgagcagcgccctgcccgtgatgagcagaaccctgggcatcaccagattcgacctgctgggcgacttcggcagattcaactggctgggcaacttctacatcgtgctgagctacaacctgctgttcgccatcgtgaccaccctgtgcctggtgagaaagttcaccagcgccgtgagagaggagctgttcaaggccctgggcctgcacaagctgcacctgcccaacaccagcagagacagcgagaccgccaagcccagcgtgaacggccaccagaaggccctgtag

SEQ ID NO: 87184 - DNA, 1596 bp, synthetic construct
  misc_feature 1..1596: note = Description of Artificial Sequence: Synthetic coding sequence
  source 1..1596: mol_type = other DNA
atggagggccaggacgaggtgagcgccagagagcagcacttccacagccaggtgagagagagcaccatctgcttcctgctgttcgccatcctgtacgtggtgagctacttcatcatcaccagatacaagagaaagagcgacgagcaggaggacgaggacgccatcgtgaacagaatcagcctgttcctgagcaccttcaccctggccgtgagcgccggcgccgtgctgctgctgcccttcagcatcatcagcaacgagatcctgctgagcttcccccagaactactacatccagtggctgaacggcagcctgatccacggcctgtggaacctggccagcctgttcagcaacctgtgcctgttcgtgctgatgcccttcgccttcttcttcctggagagcgagggcttcgccggcctgaagaagggcatcagagccagaatcctggagaccctggtgatgctgctgctgctggccctgctgatcctgggcatcgtgtgggtggccagcgccctgatcgacaacgacgccgccagcatggagagcctgtacgacctgtgggagttctacctgccctacctgtacagctgcatcagcctgatgggctgcctgctgctgctgctgtgcacccccgtgggcctgagcagaatgttcaccgtgatgggccagctgctggtgaagcccaccatcctggaggacctggacgagcagatctacatcatcaccctggaggaggaggccctgcagagaagactgaacgtgggcatgctgtgcgccggcaaccccgaggtggccaccggcagacaggtgcccgaggagcaggccggccagctgctgctgggcaagtggatccaggagggcggcgacatgatcgccaaccccagactgagcagcagcgtggagtacaacatcatggagctggagcaggagctggagaacgtgaagaccctgaagaccaagctggagagaagaaagaaggccagcgcctgggagagaaacctggtgtaccccgccgtgatggtgctgctgctgatcgagaccagcatcagcgtgctgctggtggcctgcaacatcctgtgcctgctggtggacgagaccgccatgcccaagggcaccagaggccccggcatcggcaacgccagcctgagcaccttcggcttcgtgggcgccgccctggagatcatcctgatcttctacctgatggtgagcagcgtggtgggcttctacagcctgagattcttcggcaacttcacccccaagaaggacgacaccaccatgaccaagatcatcggcaactgcgtgagcatcctggtgctgagcagcgccctgcccgtgatgagcagaaccctgggcatcaccagattcgacctgctgggcgacttcggcagattcaactggctgggcaacttctacatcgtgctgagctacaacctgctgttcgccatcgtgaccaccctgtgcctggtgagaaagttcaccagcgccgtgagagaggagctgttcaaggccctgggcctgcacaagctgcacctgcccaacaccagcagagacagcgagaccgccaagcccagcgtgaacggccaccagaaggccctgtag

SEQ ID NO: 87185 - DNA, 855 bp, synthetic construct
  misc_feature 1..855: note = Description of Artificial Sequence: Synthetic coding sequence
  source 1..855: mol_type = other DNA
atgctgctgctgctggccctgctgatcctgggcatcgtgtgggtggccagcgccctgatcgacaacgacgccgccagcatggagagcctgtacgacctgtgggagttctacctgccctacctgtacagctgcatcagcctgatgggctgcctgctgctgctgctgtgcacccccgtgggcctgagcagaatgttcaccgtgatgggccagctgctggtgaagcccaccatcctggaggacctggacgagcagatctacatcatcaccctggaggaggaggccctgcagagaagactgaacggcctgagcagcagcgtggagtacaacatcatggagctggagcaggagctggagaacgtgaagaccctgaagaccaagctggagagaagaaagaaggccagcgcctgggagagaaacctggtgtaccccgccgtgatggtgctgctgctgatcgagaccagcatcagcgtgctgctggtggcctgcaacatcctgtgcctgctggtggacgagaccgccatgcccaagggcaccagaggccccggcatcggcaacgccagcctgagcaccttcggcttcgtgggcgccgccctggagatcatcctgatcttctacctgatggtgagcagcgtggtgggcttctacagcctgagattcttcggcaacttcacccccaagaaggacgacaccaccatgaccaagatcatcggcaactgcgtgagcatcctggtgctgagcagcgccctgcccgtgatgagcagaaccctgggcctgcacaagctgcacctgcccaacaccagcagagacagcgagaccgccaagcccagcgtgaacggccaccagaaggccctgtag

SEQ ID NO: 87186 - DNA, 1590 bp, synthetic construct
  misc_feature 1..1590: note = Description of Artificial Sequence: Synthetic coding sequence
  source 1..1590: mol_type = other DNA
ggccaggacgaggtgagcgccagagagcagcacttccacagccaggtgagagagagcaccatctgcttcctgctgttcgccatcctgtacgtggtgagctacttcatcatcaccagatacaagagaaagagcgacgagcaggaggacgaggacgccatcgtgaacagaatcagcctgttcctgagcaccttcaccctggccgtgagcgccggcgccgtgctgctgctgcccttcagcatcatcagcaacgagatcctgctgagcttcccccagaactactacatccagtggctgaacggcagcctgatccacggcctgtggaacctggccagcctgttcagcaacctgtgcctgttcgtgctgatgcccttcgccttcttcttcctggagagcgagggcttcgccggcctgaagaagggcatcagagccagaatcctggagaccctggtgatgctgctgctgctggccctgctgatcctgggcatcgtgtgggtggccagcgccctgatcgacaacgacgccgccagcatggagagcctgtacgacctgtgggagttctacctgccctacctgtacagctgcatcagcctgatgggctgcctgctgctgctgctgtgcacccccgtgggcctgagcagaatgttcaccgtgatgggccagctgctggtgaagcccaccatcctggaggacctggacgagcagatctacatcatcaccctggaggaggaggccctgcagagaagactgaacgtgggcatgctgtgcgccggcaaccccgaggtggccaccggcagacaggtgcccgaggagcaggccggccagctgctgctgggcaagtggatccaggagggcggcgacatgatcgccaaccccagactgagcagcagcgtggagtacaacatcatggagctggagcaggagctggagaacgtgaagaccctgaagaccaagctggagagaagaaagaaggccagcgcctgggagagaaacctggtgtaccccgccgtgatggtgctgctgctgatcgagaccagcatcagcgtgctgctggtggcctgcaacatcctgtgcctgctggtggacgagaccgccatgcccaagggcaccagaggccccggcatcggcaacgccagcctgagcaccttcggcttcgtgggcgccgccctggagatcatcctgatcttctacctgatggtgagcagcgtggtgggcttctacagcctgagattcttcggcaacttcacccccaagaaggacgacaccaccatgaccaagatcatcggcaactgcgtgagcatcctggtgctgagcagcgccctgcccgtgatgagcagaaccctgggcatcaccagattcgacctgctgggcgacttcggcagattcaactggctgggcaacttctacatcgtgctgagctacaacctgctgttcgccatcgtgaccaccctgtgcctggtgagaaagttcaccagcgccgtgagagaggagctgttcaaggccctgggcctgcacaagctgcacctgcccaacaccagcagagacagcgagaccgccaagcccagcgtgaacggccaccagaaggccctgtag

SEQ ID NO: 87187 - DNA, 1248 bp, synthetic construct
  misc_feature 1..1248: note = Description of Artificial Sequence: Synthetic coding sequence
  source 1..1248: mol_type = other DNA
atgaaggaggacggcagagccggcagaggcgtgggcgccggcgccgccctgccccagcccagcgccggcgtgcacgacgagcaggaggacgaggacgccatcgtgaacagaatcagcctgttcctgagcaccttcaccctggccgtgagcgccggcgccgtgctgctgctgcccttcagcatcatcagcaacgagatcctgctgagcttcccccagaactactacatccagtggctgaacggcagcctgatccacggcctgtggaacctggccagcctgttcagcaacctgtgcctgttcgtgctgatgcccttcgccttcttcttcctggagagcgagggcttcgccggcctgaagaagggcatcagagccagaatcctggagaccctggtgatgctgctgctgctggccctgctgatcctgggcatcgtgtgggtggccagcgccctgatcgacaacgacgccgccagcatggagagcctgtacgacctgtgggagttctacctgccctacctgtacagctgcatcagcctgatgggctgcctgctgctgctgctgtgcacccccgtgggcctgagcagaatgttcaccgtgatgggccagctgctggtgaagcccaccatcctggaggacctggacgagcagatctacatcatcaccctggaggaggaggccctgcagagaagactgaacggcctgagcagcagcgtggagtacaacatcatggagctggagcaggagctggagaacgtgaagaccctgaagaccaagctggagagaagaaagaaggccagcgcctgggagagaaacctggtgtaccccgccgtgatggtgctgctgctgatcgagaccagcatcagcgtgctgctggtggcctgcaacatcctgtgcctgctggtggacgagaccgccatgcccaagggcaccagaggccccggcatcggcaacgccagcctgagcaccttcggcttcgtgggcgccgccctggagatcatcctgatcttctacctgatggtgagcagcgtggtgggcttctacagcctgagattcttcggcaacttcacccccaagaaggacgacaccaccatgaccaagatcatcggcaactgcgtgagcatcctggtgctgagcagcgccctgcccgtgatgagcagaaccctgggcctgcacaagctgcacctgcccaacaccagcagagacagcgagaccgccaagcccagcgtgaacggccaccagaaggccctgtag

SEQ ID NO: 87188 - DNA, 1470 bp, synthetic construct
  misc_feature 1..1470: note = Description of Artificial Sequence: Synthetic coding sequence
  source 1..1470: mol_type = other DNA
atggaggcccccgactacgaggtgctgagcgtgagagagcagctgttccacgagagaatcagagagtgcatcatcagcaccctgctgttcgccaccctgtacatcctgtgccacatcttcctgaccagattcaagaagcccgccgagttcaccaccgtggacgacgaggacgccaccgtgaacaagatcgccctggagctgtgcaccttcaccctggccatcgccctgggcgccgtgctgctgctgcccttcagcatcatcagcaacgaggtgctgctgagcctgcccagaaactactacatccagtggctgaacggcagcctgatccacggcctgtggaacctggtgttcctgttcagcaacctgagcctgatcttcctgatgcccttcgcctacttcttcaccgagagcgagggcttcgccggcagcagaaagggcgtgctgggcagagtgtacgagaccgtggtgatgctgatgctgctgaccctgctggtgctgggcatggtgtgggtggccagcgccatcgtggacaagaacaaggccaacagagagagcctgtacgacttctgggagtactacctgccctacctgtacagctgcatcagcttcctgggcgtgctgctgctgctggtgtgcacccccctgggcctggccagaatgttcagcgtgaccggcaagctgctggtgaagcccagactgctggaggacctggaggagcagctgtactgcagcgccttcgaggaggccgccctgaccagaagaatctgcaaccccaccagctgctggctgcccctggacatggagctgctgcacagacaggtgctggccctgcagacccagagagtgctgctggagaagagaagaaaggccagcgcctggcagagaaacctgggctaccccctggccatgctgtgcctgctggtgctgaccggcctgagcgtgctgatcgtggccatccacatcctggagctgctgatcgacgaggccgccatgcccagaggcatgcagggcaccagcctgggccaggtgagcttcagcaagctgggcagcttcggcgccgtgatccaggtggtgctgatcttctacctgatggtgagcagcgtggtgggcttctacagcagccccctgttcagaagcctgagacccagatggcacgacaccgccatgacccagatcatcggcaactgcgtgtgcctgctggtgctgagcagcgccctgcccgtgttcagcagaaccctgggcctgaccagattcgacctgctgggcgacttcggcagattcaactggctgggcaacttctacatcgtgttcctgtacaacgccgccttcgccggcctgaccaccctgtgcctggtgaagaccttcaccgccgccgtgagagccgagctgatcagagccttcggcctggacagactgcccctgcccgtgagcggcttcccccaggccagcagaaagacccagcaccagtag

SEQ ID NO: 87189 - DNA, 1455 bp, synthetic construct
  misc_feature 1..1455: note = Description of Artificial Sequence: Synthetic coding sequence
  source 1..1455: mol_type = other DNA
atggtgaacgtgaaggccctgtgcgagcccgaggtgagcaactgctggatgaacgtgatcaccggcaccggcagcgtgagcagccccctgctggtgctgccccagcccggccccgagaccagcctgatgaccggcgagcccgtggacgacgaggacgccaccgtgaacaagatcgccctggagctgtgcaccttcaccctggccatcgccctgggcgccgtgctgctgctgcccttcagcatcatcagcaacgaggtgctgctgagcctgcccagaaactactacatccagtggctgaacggcagcctgatccacggcctgtggaacctggtgttcctgttcagcaacctgagcctgatcttcctgatgcccttcgcctacttcttcaccgagagcgagggcttcgccggcagcagaaagggcgtgctgggcagagtgtacgagaccgtggtgatgctgatgctgctgaccctgctggtgctgggcatggtgtgggtggccagcgccatcgtggacaagaacaaggccaacagagagagcctgtacgacttctgggagtactacctgccctacctgtacagctgcatcagcttcctgggcgtgctgctgctgctggtgtgcacccccctgggcctggccagaatgttcagcgtgaccggcaagctgctggtgaagcccagactgctggaggacctggaggagcagctgtactgcagcgccttcgaggaggccgccctgaccagaagaatctgcaaccccaccagctgctggctgcccctggacatggagctgctgcacagacaggtgctggccctgcagacccagagagtgctgctggagaagagaagaaaggccagcgcctggcagagaaacctgggctaccccctggccatgctgtgcctgctggtgctgaccggcctgagcgtgctgatcgtggccatccacatcctggagctgctgatcgacgaggccgccatgcccagaggcatgcagggcaccagcctgggccaggtgagcttcagcaagctgggcagcttcggcgccgtgatccaggtggtgctgatcttctacctgatggtgagcagcgtggtgggcttctacagcagccccctgttcagaagcctgagacccagatggcacgacaccgccatgacccagatcatcggcaactgcgtgtgcctgctggtgctgagcagcgccctgcccgtgttcagcagaaccctgggcctgaccagattcgacctgctgggcgacttcggcagattcaactggctgggcaacttctacatcgtgttcctgtacaacgccgccttcgccggcctgaccaccctgtgcctggtgaagaccttcaccgccgccgtgagagccgagctgatcagagccttcggcctggacagactgcccctgcccgtgagcggcttcccccaggccagcagaaagacccagcaccagtag

SEQ ID NO: 87190 - DNA, 1410 bp, synthetic construct
  misc_feature 1..1410: note = Description of Artificial Sequence: Synthetic coding sequence
  source 1..1410: mol_type = other DNA
atggaggcccccgactacgaggtgctgagcgtgagagagcagctgttccacgagagaatcagagagtgcatcatcagcaccctgctgttcgccaccctgtacatcctgtgccacatcttcctgaccagattcaagaagcccgccgagttcaccaccgtggacgacgaggacgccaccgtgaacaagatcgccctggagctgtgcaccttcaccctggccatcgccctgggcgccgtgctgctgctgcccttcagcatcatcagcaacgaggtgctgctgagcctgcccagaaactactacatccagtggctgaacggcagcctgatccacggcctgtggaacctggtgttcctgttcagcaacctgagcctgatcttcctgatgcccttcgcctacttcttcaccgagagcgagggcttcgccggcagcagaaagggcgtgctgggcagagtgtacgagaccgtggtgatgctgatgctgctgaccctgctggtgctgggcatggtgtgggtggccagcgccatcgtggacaagaacaaggccaacagagagagcctgtacgacttctgggagtactacctgccctacctgtacagctgcatcagcttcctgggcgtgctgctgctgctggtgtgcacccccctgggcctggccagaatgttcagcgtgaccggcaagctgctggtgaagcccagactgctggaggacctggaggagcagctgtactgcagcgccttcgaggaggccgccctgaccagaagaatctgcaaccccaccagctgctggctgcccctggacatggagctgctgcacagacaggtgctggccctgcagacccagagagtgctgctggagaagagaagaaaggccagcgcctggcagagaaacctgggctaccccctggccatgctgtgcctgctggtgctgaccggcctgagcgtgctgatcgtggccatccacatcctggagctgctgatcgacgaggccgccatgcccagaggcatgcaggtggtgctgatcttctacctgatggtgagcagcgtggtgggcttctacagcagccccctgttcagaagcctgagacccagatggcacgacaccgccatgacccagatcatcggcaactgcgtgtgcctgctggtgctgagcagcgccctgcccgtgttcagcagaaccctgggcctgaccagattcgacctgctgggcgacttcggcagattcaactggctgggcaacttctacatcgtgttcctgtacaacgccgccttcgccggcctgaccaccctgtgcctggtgaagaccttcaccgccgccgtgagagccgagctgatcagagccttcggcctggacagactgcccctgcccgtgagcggcttcccccaggccagcagaaagacccagcaccagtag

SEQ ID NO: 87191 - DNA, 384 bp, synthetic construct
  misc_feature 1..384: note = Description of Artificial Sequence: Synthetic coding sequence
  source 1..384: mol_type = other DNA
atggaggcccccgactacgaggtgctgagcgtgagagagcagctgttccacgagagaatcagagagtgcatcatcagcaccctgctgttcgccaccctgtacatcctgtgccacatcttcctgaccagattcaagaagcccgccgagttcaccaccgtggacgacgaggacgccaccgtgaacaagatcgccctggagctgtgcaccttcaccctggccatcgccctgggcgccgtgctgctgctgcccttcagcatcatcagcaacgaggtgctgctgagcctgcccagaaactactacatccagtggctgaacggcagcctgatccacggcctgtggaacctggtgttcctgttcagcaacctgagcctgatcttcctgtag

SEQ ID NO: 87192 - DNA, 1017 bp, synthetic construct
  misc_feature 1..1017: note = Description of Artificial Sequence: Synthetic coding sequence
  source 1..1017: mol_type = other DNA
atggtgagaagagtgcagcccgacagaaagcagctgcccctggtgctgctgagactgctgtgcctgctgcccaccggcctgcccgtgagaagcgtggacttcaacagaggcaccgacaacatcaccgtgagacagggcgacaccgccatcctgagatgcgtggtggaggacaagaacagcaaggtggcctggctgaacagaagcggcatcatcttcgccggccacgacaagtggagcctggaccccagagtggagctggagaagagacacagcctggagtacagcctgagaatccagaaggtggacgtgtacgacgagggcagctacacctgcagcgtgcagacccagcacgagcccaagaccagccaggtgtacctgatcgtgcaggtgccccccaagatcagcaacatcagcagcgacgtgaccgtgaacgagggcagcaacgtgaccctggtgtgcatggccaacggcagacccgagcccgtgatcacctggagacacctgacccccaccggcagagagttcgagggcgaggaggagtacctggagatcctgggcatcaccagagagcagagcggcaagtacgagtgcaaggccgccaacgaggtgagcagcgccgacgtgaagcaggtgaaggtgaccgtgaactacccccccaccatcaccgagagcaagagcaacgaggccaccaccggcagacaggccagcctgaagtgcgaggccagcgccgtgcccgcccccgacttcgagtggtacagagacgacaccagaatcaacagcgccaacggcctggagatcaagagcaccgagggccagagcagcctgaccgtgaccaacgtgaccgaggagcactacggcaactacacctgcgtggccgccaacaagctgggcgtgaccaacgccagcctggtgctgttcagacccggcagcgtgagaggcatcaacggcagcatcagcctggccgtgcccctgtggctgctggccgccagcctgctgtgcctgctgagcaagtgctag

SEQ ID NO: 87193 - DNA, 1077 bp, synthetic construct
  misc_feature 1..1077: note = Description of Artificial Sequence: Synthetic coding sequence
  source 1..1077: mol_type = other DNA
atgagaacctactggctgcacagcgtgtgggtgctgggcttcttcctgagcctgttcagcctgcagggcctgcccgtgagaagcgtggacttcaacagaggcaccgacaacatcaccgtgagacagggcgacaccgccatcctgagatgcgtggtggaggacaagaacagcaaggtggcctggctgaacagaagcggcatcatcttcgccggccacgacaagtggagcctggaccccagagtggagctggagaagagacacagcctggagtacagcctgagaatccagaaggtggacgtgtacgacgagggcagctacacctgcagcgtgcagacccagcacgagcccaagaccagccaggtgtacctgatcgtgcaggtgccccccaagatcagcaacatcagcagcgacgtgaccgtgaacgagggcagcaacgtgaccctggtgtgcatggccaacggcagacccgagcccgtgatcacctggagacacctgacccccaccggcagagagttcgagggcgaggaggagtacctggagatcctgggcatcaccagagagcagagcggcaagtacgagtgcaaggccgccaacgaggtgagcagcgccgacgtgaagcaggtgaaggtgaccgtgaactacccccccaccatcaccgagagcaagagcaacgaggccaccaccggcagacaggccagcctgaagtgcgaggccagcgccgtgcccgcccccgacttcgagtggtacagagacgacaccagaatcaacagcgccaacggcctggagatcaagagcaccgagggccagagcagcctgaccgtgaccaacgtgaccgaggagcactacggcaactacacctgcgtggccgccaacaagctgggcgtgaccaacgccagcctggtgctgttcaagagagtgctgcccaccatcccccaccccatccaggagatcggcaccaccgtgcacttcaagcagaagggccccggcagcgtgagaggcatcaacggcagcatcagcctggccgtgcccctgtggctgctggccgccagcctgctgtgcctgctgagcaagtgctag

SEQ ID NO: 87194 - DNA, 753 bp, synthetic construct
  misc_feature 1..753: note = Description of Artificial Sequence: Synthetic coding sequence
  source 1..753: mol_type = other DNA
atggccgagggcggcgccagcaagggcggcggcgaggagcccggcaagctgcccgagcccgccgaggaggagagccaggtgctgagaggcaccggccactgcaagtggttcaacgtgagaatgggcttcggcttcatcagcatgatcaacagagagggcagccccctggacatccccgtggacgtgttcgtgcaccagagcaagctgttcatggagggcttcagaagcctgaaggagggcgagcccgtggagttcaccttcaagaagagcagcaagggcctggagagcatcagagtgaccggccccggcggcagcccctgcctgggcagcgagagaagacccaagggcaagaccctgcagaagagaaagcccaagggcgacagatgctacaactgcggcggcctggaccaccacgccaaggagtgcagcctgcccccccagcccaagaagtgccactactgccagagcatcatgcacatggtggccaactgcccccacaagaacgtggcccagccccccgccagcagccagggcagacaggaggccgagagccagccctgcaccagcaccctgcccagagaggtgggcggcggccacggctgcaccagcccccccttcccccaggaggccagagccgagatcagcgagagaagcggcagaagcccccaggaggccagcagcaccaagagcagcatcgcccccgaggagcagagcaagaagggccccagcgtgcagaagagaaagaagacctag

SEQ ID NO: 87195 - DNA, 2250 bp, synthetic construct
  misc_feature 1..2250: note = Description of Artificial Sequence: Synthetic coding sequence
  source 1..2250: mol_type = other DNA
atggaggtggtgcccgccgaggtgaacagcctgctgcccgaggagatcatggacaccggcatcaccctggtggacgacgacagcatcgaggccgtgatcgtgagcagccccatccccatggagaccgagctggaggagatcgtgaacatcaacagcaccggcgacagcaccgccacccccatcagcaccgagcccatcaccgtgtacagcaaccacaccaaccaggtggccgtgaacaccaccatcaccaaggccgacagcaacaccaccgtgaagcccgccttccccagcggcctgcagaagctgggcgcccagacccccgtgaccatcagcgccaaccagatcatcctgaacaaggtgagccagaccagcgacctgaagctgggcaaccagaccctgaagcccgacggccagaagctgatcctgaccaccctgggcaagagcggcagccccatcgtgctggccctgccccacagccagctgccccaggcccagaaggtgaccacccaggcccagagcggcgacgccaagctgcccccccagcagatcaaggtggtgaccatcggcggcagacccgaggtgaagcccgtgatcggcgtgagcgccctgacccccggcagccagctgatcaacaccaccacccagcccagcgtgctgcagacccagcagctgaagaccgtgcagatcgccaagaagcccagaacccccaccagcggccccgtgatcaccaagctgatcttcgccaagcccatcaacagcaaggccgtgaccggccagaccacccaggtgagcccccccgtgatcgccggcagagtgctgagccagagcacccccggcacccccagcaagaccatcaccatcagcgagagcggcgtgatcggcagcaccctgaacagcaccacccagacccccaacaagatcgccatcagccccctgaagagccccaacaaggccgtgaagagcaccgtgcagaccatcaccgtgggcggcgtgagcaccagccagttcaagaccatcatccccctggccaccgcccccaacgtgcagcagatccaggtgcccggcagcaagttccactacgtgagactggtgaccgccaccagcgccagcagcagcacccagcccgtgagccagaaccccagcaccaacacccagcccctgcagcaggccaagcccgtggtggtgaacaccacccccgtgagaatgagcgtgcccatcgtgagcgcccaggccgtgaagcaggtggtgcccaagcccatcaaccccaccagccagatcgtgaccaccagccagccccagcagagactgatcatgcccgccacccccctgccccagatccagcccaacctgaccaacctgccccccggcaccgtgctggcccccgcccccggcaccggcaacgtgggctacgccgtgctgcccgcccagtacgtgacccagctgcagcagagcagctacgtgagcatcgccagcaacagcaccttcaccggcaccagcggcatccagacccaggccagactgcccttcaacggcatcatccccagcgagagcgccagcagacccagaaagccctgcaactgcaccaagagcctgtgcctgaagctgtactgcgactgcttcgccaacggcgagttctgcaacaactgcaactgcaccaactgctacaacaacctggagcacgagaacgagagacagaaggccatcaaggcctgcctggacagaaaccccgaggccttcaagcccaagatcggcaagggcaaggagggcgagagcgacagaagacacagcaagggctgcaactgcaagagaagcggctgcctgaagaactactgcgagtgctacgaggccaagatcatgtgcagcagcatctgcaagtgcatcggctgcaagaacttcgaggagagccccgagagaaagaccctgatgcacctggccgacgccgccgaggtgagagtgcagcagcagaccgccgccaagaccaagctgagcagccagatcagcgacctgctgaccagacccacccccgccctgaacagcggcggcggcaagctgcccttcaccttcgtgaccaaggaggtggccgaggccacctgcaactgcctgctggcccaggccgagcaggccgacaagaagggcaagagcaaggccgccgccgagagaatgatcctggaggagttcggcagatgcctgatgagcgtgatcaacagcgccggcaaggccaagagcgacccctgcgccatgaactgctag

SEQ ID NO: 87196 - DNA, 732 bp, synthetic construct
  misc_feature 1..732: note = Description of Artificial Sequence: Synthetic coding sequence
  source 1..732: mol_type = other DNA
atggaggtggtgcccgccgaggtgaacagcctgctgcccgaggagatcatggacaccggcatcaccctggtggacgacgacagcatcgaggccgtgatcgtgagcagccccatccccatggagaccgagctggaggagatcgtgaacatcaacagcaccggcgacagcaccgccacccccatcagcaccgagcccatcaccgtgtacagcaaccacaccaaccaggtggccgtgaacaccaccatcaccaaggccgacagcaacaccaccgtgaagcccgccttccccagcggcctgcagaagctgggcgcccagacccccgtgaccatcagcgccaaccagatcatcctgaacaaggtgagccagaccagcgacctgaagctgggcaaccagaccctgaagcccgacggccagaagctgatcctgaccaccctgggcaagagcggcagccccatcgtgctggccctgccccacagccagctgccccaggcccagaaggtgaccacccaggcccagagcggcgacgccaagctgcccccccagcagatcaaggtggtgaccatcggcggcagacccgaggtgaagcccgtgatcggcgtgagcgccctgacccccggcagccagctgatcaacaccaccacccagcccagcgtgctgcagacccagcagctgaagaccgtgcaggtgggcttcttccacagcctgctgcccgagctgcaccagagaccctag

SEQ ID NO: 87197 - DNA, 1983 bp, synthetic construct
  misc_feature 1..1983: note = Description of Artificial Sequence: Synthetic coding sequence
  source 1..1983: mol_type = other DNA
atggaggtggtgcccgccgaggtgaacagcctgctgcccgaggagatcatggacaccggcatcaccctggtggacgacgacagcatcgaggccgtgatcgtgagcagccccatccccatggagaccgagctggaggagatcgtgaacatcaacagcaccggcgacagcaccgccacccccatcagcaccgagcccatcaccgtgtacagcaaccacaccaaccaggtggccgtgaacaccaccatcaccaaggccgacagcaacaccaccgtgaagcccgccttccccagcggcctgcagaagctgggcgcccagacccccgtgaccatcagcgccaaccagatcatcctgaacaaggtgagccagaccagcgacctgaagctgggcaaccagaccctgaagcccgacggccagaagctgatcctgaccaccctgggcaagagcggcagccccatcgtgctggccctgccccacagccagctgccccaggcccagaaggtgaccacccaggcccagagcggcgacgccaagctgcccccccagcagatcaaggtggtgaccatcggcggcagacccgaggtgaagcccgtgatcggcgtgagcgccctgacccccggcagccagctgatcaacaccaccacccagcccagcgtgctgcagacccagcagctgaagaccgtgcaggccgtgaagagcaccgtgcagaccatcaccgtgggcggcgtgagcaccagccagttcaagaccatcatccccctggccaccgcccccaacgtgcagcagatccaggtgcccggcagcaagttccactacgtgagactggtgaccgccaccagcgccagcagcagcacccagcccgtgagccagaaccccagcaccaacacccagcccctgcagcaggccaagcccgtggtggtgaacaccacccccgtgagaatgagcgtgcccatcgtgagcgcccaggccgtgaagcaggtggtgcccaagcccatcaaccccaccagccagatcgtgaccaccagccagccccagcagagactgatcatgcccgccacccccctgccccagatccagcccaacctgaccaacctgccccccggcaccgtgctggcccccgcccccggcaccggcaacgtgggctacgccgtgctgcccgcccagtacgtgacccagctgcagcagagcagctacgtgagcatcgccagcaacagcaccttcaccggcaccagcggcatccagacccaggccagactgcccttcaacggcatcatccccagcgagagcgccagcagacccagaaagccctgcaactgcaccaagagcctgtgcctgaagctgtactgcgactgcttcgccaacggcgagttctgcaacaactgcaactgcaccaactgctacaacaacctggagcacgagaacgagagacagaaggccatcaaggcctgcctggacagaaaccccgaggccttcaagcccaagatcggcaagggcaaggagggcgagagcgacagaagacacagcaagggctgcaactgcaagagaagcggctgcctgaagaactactgcgagtgctacgaggccaagatcatgtgcagcagcatctgcaagtgcatcggctgcaagaacttcgaggagagccccgagagaaagaccctgatgcacctggccgacgccgccgaggtgagagtgcagcagcagaccgccgccaagaccaagctgagcagccagatcagcgacctgctgaccagacccacccccgccctgaacagcggcggcggcaagctgcccttcaccttcgtgaccaaggaggtggccgaggccacctgcaactgcctgctggcccaggccgagcaggccgacaagaagggcaagagcaaggccgccgccgagagaatgatcctggaggagttcggcagatgcctgatgagcgtgatcaacagcgccggcaaggccaagagcgacccctgcgccatgaactgctag

SEQ ID NO: 87198 - DNA, 1587 bp, synthetic construct
  misc_feature 1..1587: note = Description of Artificial Sequence: Synthetic coding sequence
  source 1..1587: mol_type = other DNA
atggaggtggtgcccgccgagatcgccaagaagcccagaacccccaccagcggccccgtgatcaccaagctgatcttcgccaagcccatcaacagcaaggccgtgaccggccagaccacccaggtgagcccccccgtgatcgccggcagagtgctgagccagagcacccccggcacccccagcaagaccatcaccatcagcgagagcggcgtgatcggcagcaccctgaacagcaccacccagacccccaacaagatcgccatcagccccctgaagagccccaacaaggccgtgaagagcaccgtgcagaccatcaccgtgggcggcgtgagcaccagccagttcaagaccatcatccccctggccaccgcccccaacgtgcagcagatccaggtgcccggcagcaagttccactacgtgagactggtgaccgccaccagcgccagcagcagcacccagcccgtgagccagaaccccagcaccaacacccagcccctgcagcaggccaagcccgtggtggtgaacaccacccccgtgagaatgagcgtgcccatcgtgagcgcccaggccgtgaagcaggtggtgcccaagcccatcaaccccaccagccagatcgtgaccaccagccagccccagcagagactgatcatgcccgccacccccctgccccagatccagcccaacctgaccaacctgccccccggcaccgtgctggcccccgcccccggcaccggcaacgtgggctacgccgtgctgcccgcccagtacgtgacccagctgcagcagagcagctacgtgagcatcgccagcaacagcaccttcaccggcaccagcggcatccagacccaggccagactgcccttcaacggcatcatccccagcgagagcgccagcagacccagaaagccctgcaactgcaccaagagcctgtgcctgaagctgtactgcgactgcttcgccaacggcgagttctgcaacaactgcaactgcaccaactgctacaacaacctggagcacgagaacgagagacagaaggccatcaaggcctgcctggacagaaaccccgaggccttcaagcccaagatcggcaagggcaaggagggcgagagcgacagaagacacagcaagggctgcaactgcaagagaagcggctgcctgaagaactactgcgagtgctacgaggccaagatcatgtgcagcagcatctgcaagtgcatcggctgcaagaacttcgaggagagccccgagagaaagaccctgatgcacctggccgacgccgccgaggtgagagtgcagcagcagaccgccgccaagaccaagctgagcagccagatcagcgacctgctgaccagacccacccccgccctgaacagcggcggcggcaagctgcccttcaccttcgtgaccaaggaggtggccgaggccacctgcaactgcctgctggcccaggccgagcaggccgacaagaagggcaagagcaaggccgccgccgagagaatgatcctggaggagttcggcagatgcctgatgagcgtgatcaacagcgccggcaaggccaagagcgacccctgcgccatgaactgctag

SEQ ID NO: 87199 - DNA, 1587 bp, synthetic construct; identical to SEQ ID NO: 87198
  misc_feature 1..1587: note = Description of Artificial Sequence: Synthetic coding sequence
  source 1..1587: mol_type = other DNA

SEQ ID NO: 87200 - DNA, 2250 bp, synthetic construct; identical to SEQ ID NO: 87195
  misc_feature 1..2250: note = Description of Artificial Sequence: Synthetic coding sequence
  source 1..2250: mol_type = other DNA

SEQ ID NO: 87201 - DNA, 1587 bp, synthetic construct; identical to SEQ ID NO: 87198
  misc_feature 1..1587: note = Description of Artificial Sequence: Synthetic coding sequence
  source 1..1587: mol_type = other DNA

SEQ ID NO: 87202 - DNA, 2025 bp, synthetic construct
  misc_feature 1..2025: note = Description of Artificial Sequence: Synthetic coding sequence
  source 1..2025: mol_type = other DNA
atgtggcacgaggccagaaagcacgagagaaagctgagaggcatgatggtggactacaagaagagagccgagagaagaagagagtactacgagaagatcaagaaggaccccgcccagttcctgcaggtgcacggcagagcctgcaaggtgcacctggacagcgccgtggccctggccgccgagagccccgtgaacatgatgccctggcagggcgacaccaacaacatgatcgacagattcgacgtgagagcccacctggaccacatccccgactacaccccccccctgctgaccaccatcagccccgagcaggagagcgacgagagaaagtgcaactacgagagatacagaggcctggtgcagaacgacttcgccggcatcagcgaggagcagtgcctgtaccagatctacatcgacgagctgtacggcggcctgcagagacccagcgaggacgagaagaagaagctggccgagaagaaggccagcatcggctacacctacgaggacagcaccgtggccaaggtggagaaggccgccgagaagcccgaggaggaggagagcgccgccgaggaggagagcaacagcgacgaggacgaggtgatccccgacatcgacgtggaggtggacgtggacgagctgaaccaggagcaggtggccgacctgaacaagcaggccaccacctacggcatggccgacggcgacttcgtgagaatgctgagaaaggacaaggaggaggccgaggccatcaagcacgccaaggccctggaggaggagaaggccatgtacagcggcagaagaagcagaagacagagaagagagttcagagagaagagactgagaggcagaaagatcagcccccccagctacgccagaagagacagccccacctacgacccctacaagagaagccccagcgagagcagcagcgagagcagaagcagaagcagaagccccacccccggcagagaggagaagatcaccttcatcaccagcttcggcggcagcgacgaggaggccgccgccgccgccgccgccgccgccgccagcggcgtgaccaccggcaagccccccgcccccccccagcccggcggccccgcccccggcagaaacgccagcgccagaagaagaagcagcagcagcagcagcagcagcagcgccagcagaaccagcagcagcagaagcagcagcagaagcagcagcagaagcagaagaggcggcggctactacagaagcggcagacacgccagaagcagaagcagaagctggagcagaagcagaagcagaagcagaagatacagcagaagcagaagcagaggcagaagacacagcggcggcggcagcagagacggccacagatacagcagaagccccgccagaagaggcggctacggccccagaagaagaagcagaagcagaagccacagcggcgacagatacagaagaggcggcagaggcctgagacaccacagcagcagcagaagcagaagcagctggagcctgagccccagcagaagcagaagcctgaccagaagcagaagccacagccccagccccagccagagcagaagcagaagcagaagcagaagccagagccccagccccagccccgccagagagaagctgaccagacccgccgccagccccgccgtgggcgagaagctgaagaagaccgagcccgccgccggcaaggagaccggcgccgccaagcccaagctgaccccccaggagaagctgaagctgagaatgcagaaggccctgaacagacagttcaaggccgacaagaaggccgcccaggagaagatgatccagcaggagcacgagagacaggagagagaggacgagctgagagccatggccagaaagatcagaatgaaggagagagagagaagagagaaggagagagaggagtgggagagacagtacagcagacagagcagaagccccagccccagatacagcagagagtacagcagcagcagaagaagaagcagaagcagaagcagaagcccccactacagacactag

SEQ ID NO: 87203 - DNA, 594 bp, synthetic construct
  misc_feature 1..594: note = Description of Artificial Sequence: Synthetic coding sequence
  source 1..594: mol_type = other DNA
atggccgccctgggcgagcccgtgagactggagagagacatctgcagagccatcgagctgctggagaagctgcagagaagcggcgaggtgcccccccagaagctgcaggccctgcagagagtgctgcagagcgagttctgcaacgccgtgagagaggtgtacgagcacgtgtacgagaccgtggacatcagcagcagccccgaggtgagagccaacgccaccgccaaggccaccgtggccgccttcgccgccagcgagggccacagccaccccagagtggtggagctgcccaagaccgaggagggcctgggcttcaacatcatgggcggcaaggagcagaacagccccatctacatcagcagaatcatccccggcggcatcgccgacagacacggcggcctgaagagaggcgaccagctgctgagcgtgaacggcgtgagcgtggagggcgagcaccacgagaaggccgtggagctgctgaaggccgcccagggcaaggtgaagctggtggtgagatacacccccaaggtgctggaggagatggagagcagattcgagaagatgagaagcgccaagagaagacagcagacctag

SEQ ID NO: 87204 - DNA, 759 bp, synthetic construct
  misc_feature 1..759: note = Description of Artificial Sequence: Synthetic coding sequence
  source 1..759: mol_type = other DNA
atggaggaggccatcctggtgccctgcgtgctgggcctgctgctgctgcccatcctggccatgctgatggccctgtgcgtgcactgccacagactgcccggcagctacgacagcaccagcagcgacagcctgtaccccagaggcatccagttcaagagaccccacaccgtggccccctggccccccgcctacccccccgtgaccagctacccccccctgagccagcccgacctgctgcccatccccagaagcccccagcccagaagagacagcgacggcgccaacagcgtggccagctacgagaacgagggcgccagcggcatcagaggcgcccaggccggctggggcgtgtggggccccagctggaccagactgacccccgtgagcctgccccccgagcccgcctgcgaggacgccgacgaggacgaggacgactaccacaaccccggctacctggtggtgctgcccgacagcacccccgccaccagcaccgccgcccccagcgcccccgccctgagcacccccggcatcagagacagcgccttcagcatggagagcatcgacgactacgtgaacgtgcccgagagcggcgagagcgccgaggccagcctggacggcagcagagagtacgtgaacgtgagccaggagctgcaccccggcgccgccaagaccgagcccgccgccctgagcagccaggaggccgaggaggtggaggaggagggcgcccccgactacgagaacctgcaggagctgaactag

SEQ ID NO: 87205 - DNA, 789 bp, synthetic construct
  misc_feature 1..789: note = Description of Artificial Sequence: Synthetic coding sequence
  source 1..789: mol_type = other DNA
atggaggaggccatcctggtgccctgcgtgctgggcctgctgctgctgcccatcctggccatgctgatggccctgtgcgtgcactgccacagactgcccggcagctacgacagcaccagcagcgacagcctgtaccccagaggcatccagttcaagagaccccacaccgtggccccctggccccccgcctacccccccgtgaccagctacccccccctgagccagcccgacctgctgcccatccccagaagcccccagcccctgggcggcagccacagaacccccagcagcagaagagacagcgacggcgccaacagcgtggccagctacgagaacgagggcgccagcggcatcagaggcgcccaggccggctggggcgtgtggggccccagctggaccagactgacccccgtgagcctgccccccgagcccgcctgcgaggacgccgacgaggacgaggacgactaccacaaccccggctacctggtggtgctgcccgacagcacccccgccaccagcaccgccgcccccagcgcccccgccctgagcacccccggcatcagagacagcgccttcagcatggagagcatcgacgactacgtgaacgtgcccgagagcggcgagagcgccgaggccagcctggacggcagcagagagtacgtgaacgtgagccaggagctgcaccccggcgccgccaagaccgagcccgccgccctgagcagccaggaggccgaggaggtggaggaggagggcgcccccgactacgagaacctgcaggagctgaactag

SEQ ID NO: 87206 - DNA, 702 bp, synthetic construct
  misc_feature 1..702: note = Description of Artificial Sequence: Synthetic coding sequence
  source 1..702: mol_type = other DNA
atggaggaggccatcctggtgccctgcgtgctgggcctgctgctgctgcccatcctggccatgctgatggccctgtgcgtgcactgccacagactgcccggcagctacgacagcaccagcagcgacagcctgtaccccagaggcatccagttcaagagaccccacaccgtggccccctggccccccgcctacccccccgtgaccagctacccccccctgagccagcccgacctgctgcccatccccagaagcccccagcccctgggcggcagccacagaacccccagcagcagaagagacagcgacggcgccaacagcgtggccagctacgagaacgaggagcccgcctgcgaggacgccgacgaggacgaggacgactaccacaaccccggctacctggtggtgctgcccgacagcacccccgccaccagcaccgccgcccccagcgcccccgccctgagcacccccggcatcagagacagcgccttcagcatggagagcatcgacgactacgtgaacgtgcccgagagcggcgagagcgccgaggccagcctggacggcagcagagagtacgtgaacgtgagccaggagctgcaccccggcgccgccaagaccgagcccgccgccctgagcagccaggaggccgaggaggtggaggaggagggcgcccccgactacgagaacctgcaggagctgaactag

SEQ ID NO: 87207 - DNA, 810 bp, synthetic construct
  misc_feature 1..810: note = Description of Artificial Sequence: Synthetic coding sequence
  source 1..810: mol_type = other DNA
atggaggccaccgccgccagctggcaggtggccgtgcccgtgctgggcggcgccagcagacccctgggccccagaggcgccgccagcctgctgagagcccccctgcagatggaggaggccatcctggtgccctgcgtgctgggcctgctgctgctgcccatcctggccatgctgatggccctgtgcgtgcactgccacagactgcccggcagctacgacagcaccagcagcgacagcctgtaccccagaggcatccagttcaagagaccccacaccgtggccccctggccccccgcctacccccccgtgaccagctacccccccctgagccagcccgacctgctgcccatccccagaagcccccagcccctgggcggcagccacagaacccccagcagcagaagagacagcgacggcgccaacagcgtggccagctacgagaacgaggagcccgcctgcgaggacgccgacgaggacgaggacgactaccacaaccccggctacctggtggtgctgcccgacagcacccccgccaccagcaccgccgcccccagcgcccccgccctgagcacccccggcatcagagacagcgccttcagcatggagagcatcgacgactacgtgaacgtgcccgagagcggcgagagcgccgaggccagcctggacggcagcagagagtacgtgaacgtgagccaggagctgcaccccggcgccgccaagaccgagcccgccgccctgagcagccaggaggccgaggaggtggaggaggagggcgcccccgactacgagaacctgcaggagctgaactag

SEQ ID NO: 87208 - DNA, 699 bp, synthetic construct
  misc_feature 1..699: note = Description of Artificial Sequence: Synthetic coding sequence
  source 1..699: mol_type = other DNA
atggaggaggccatcctggtgccctgcgtgctgggcctgctgctgctgcccatcctggccatgctgatggccctgtgcgtgcactgccacagactgcccggcagctacgacagcaccagcagcgacagcctgtaccccagaggcatccagttcaagagaccccacaccgtggccccctggccccccgcctacccccccgtgaccagctacccccccctgagccagcccgacctgctgcccatccccagcccccagcccctgggcggcagccacagaacccccagcagcagaagagacagcgacggcgccaacagcgtggccagctacgagaacgaggagcccgcctgcgaggacgccgacgaggacgaggacgactaccacaaccccggctacctggtggtgctgcccgacagcacccccgccaccagcaccgccgcccccagcgcccccgccctgagcacccccggcatcagagacagcgccttcagcatggagagcatcgacgactacgtgaacgtgcccgagagcggcgagagcgccgaggccagcctggacggcagcagagagtacgtgaacgtgagccaggagctgcaccccggcgccgccaagaccgagcccgccgccctgagcagccaggaggccgaggaggtggaggaggagggcgcccccgactacgagaacctgcaggagctgaactag

SEQ ID NO: 87209 - DNA, 732 bp, synthetic construct
  misc_feature 1..732: note = Description of Artificial Sequence: Synthetic coding sequence
  source 1..732: mol_type = other DNA
atgagcagcggcaccgagctgctgtggcccggcgccgccctgctggtgctgctgggcgtggccgccagcctgtgcgtgagatgcagcagacccggcgccaagagaagcgagaagatctaccagcagagaagcctgagagaggaccagcagagcttcaccggcagcagaacctacagcctggtgggccaggcctggcccggccccctggccgacatggcccccaccagaaaggacaagctgctgcagttctaccccagcctggaggaccccgccagcagcagataccagaacttcagcaagggcagcagacacggcagcgaggaggcctacatcgaccccatcgccatggagtactacaactggggcagattcagcaagccccccgaggacgacgacgccaacagctacgagaacgtgctgatctgcaagcagaagaccaccgagaccggcgcccagcaggagggcatcggcggcctgtgcagaggcgacctgagcctgagcctggccctgaagaccggccccaccagcggcctgtgccccagcgccagccccgaggaggacgaggagagcgaggactaccagaacagcgccagcatccaccagtggagagagagcagaaaggtgatgggccagctgcagagagaggccagccccggccccgtgggcagccccgacgaggaggacggcgagcccgactacgtgaacggcgaggtggccgccaccgaggcctag

SEQ ID NO: 87210 - DNA, 732 bp, synthetic construct; identical to SEQ ID NO: 87209
  misc_feature 1..732: note = Description of Artificial Sequence: Synthetic coding sequence
  source 1..732: mol_type = other DNA

SEQ ID NO: 87211 - DNA, 195 bp, synthetic construct
  misc_feature 1..195: note = Description of Artificial Sequence: Synthetic coding sequence
  source 1..195: mol_type = other DNA
atgagcagcggcaccgagctgctgtggcccggcgccgccctgctggtgctgctgggcgtggccgccagcctgtgcgtgagatgcagcagacccggcgccaagagaagcgagaagatctaccagcagagaagcctgagagaggaccagcagagcttcaccggcagcagaacctacagcctggtgggccaggcctag

SEQ ID NO: 87212 - DNA, 732 bp, synthetic construct; identical to SEQ ID NO: 87209
  misc_feature 1..732: note = Description of Artificial Sequence: Synthetic coding sequence
  source 1..732: mol_type = other DNA

SEQ ID NO: 87213 - DNA, 732 bp, synthetic construct; identical to SEQ ID NO: 87209
  misc_feature 1..732: note = Description of Artificial Sequence: Synthetic coding sequence
  source 1..732: mol_type = other DNA

SEQ ID NO: 87214 - DNA, 177 bp, synthetic construct
  misc_feature 1..177: note = Description of Artificial Sequence: Synthetic coding sequence
  source 1..177: mol_type = other DNA
atgagcagcggcaccgagctgctgtggcccggcgccgccctgctggtgctgctgggcgtggccgccagcctgtgcgtgagatgcagcagacccggcgccaagagaagcgagaagatctaccagcagagaagcctgagagaggaccagcagagcttcaccggcagcagaacctactag

SEQ ID NO: 87215 - DNA, 303 bp, synthetic construct
  misc_feature 1..303: note = Description of Artificial Sequence: Synthetic coding sequence
  source 1..303: mol_type = other DNA
atgagcagcggcaccgagctgctgtggcccggcgccgccctgctggtgctgctgggcgtggccgccagcctgtgcgtgagatgcagcagacccggcgccaagagaagcgagaagatctaccagcagagaagcctgagagaggaccagcagagcttcaccggcagcagaacctacagcctggtgggccaggcctggcccggccccctggccgacatggcccccaccagaaaggacaagctgctgcagttctaccccagcctggaggaccccgccagcagcagataccagaacttcagcaagtag

SEQ ID NO: 87216 - DNA, 1704 bp, synthetic construct
  misc_feature 1..1704: note = Description of Artificial Sequence: Synthetic coding sequence
  source 1..1704: mol_type = other DNA
atgagacccgacagccccaccatggccgcccccgccgagagcctgagaagaagaaagaccggctacagcgaccccgagcccgagagcccccccgcccccggcagaggccccgccggcagccccgcccacctgcacaccggcaccttctggctgaccagaatcgtgctgctgaaggccctggccttcgtgtacttcgtggccttcctggtggccttccaccagaacaagcagctgatcggcgacagaggcctgctgccctgcagagtgttcctgaagaacttccagcagtacttccaggacagaaccagctgggaggtgttcagctacatgcccaccatcctgtggctgatggactggagcgacatgaacagcaacctggacctgctggccctgctgggcctgggcatcagcagcttcgtgctgatcaccggctgcgccaacatgctgctgatggccgccctgtggggcctgtacatgagcctggtgaacgtgggccacgtgtggtacagcttcggctgggagagccagctgctggagaccggcttcctgggcatcttcctgtgccccctgtggaccctgagcagactgccccagcacacccccaccagcagaatcgtgctgtggggcttcagatggctgatcttcagaatcatgctgggcgccggcctgatcaagatcagaggcgacagatgctggagagacctgacctgcatggacttccactacgagacccagcccatgcccaaccccgtggcctactacctgcaccacagcccctggtggttccacagattcgagaccctgagcaaccacttcatcgagctgctggtgcccttcttcctgttcctgggcagaagagcctgcatcatccacggcgtgctgcagatcctgttccaggccgtgctgatcgtgagcggcaacctgagcttcctgaactggctgaccatggtgcccagcctggcctgcttcgacgacgccaccctgggcttcctgttccccagcggccccggcagcctgaaggacagagtgctgcagatgcagagagacatcagaggcgccagacccgagcccagattcggcagcgtggtgagaagagccgccaacgtgagcctgggcgtgctgctggcctggctgagcgtgcccgtggtgctgaacctgctgagcagcagacaggtgatgaacacccacttcaacagcctgcacatcgtgaacacctacggcgccttcggcagcatcaccaaggagagagccgaggtgatcctgcagggcaccgccagcagcaacgccagcgcccccgacgccatgtgggaggactacgagttcaagtgcaagcccggcgaccccagcagaagaccctgcctgatcagcccctaccactacagactggactggctgatgtggttcgccgccttccagacctacgagcacaacgactggatcatccacctggccggcaagctgctggccagcgacgccgaggccctgagcctgctggcccacaaccccttcgccggcagacccccccccagatgggtgagaggcgagcactacagatacaagttcagcagacccggcggcagacacgccgccgagggcaagtggtgggtgagaaagagaatcggcgcctacttcccccccctgagcctggaggagctgagaccctacttcagagacagaggctggcccctgcccggccccctgtag

SEQ ID NO: 87217 - DNA, 1704 bp, synthetic construct
  misc_feature 1..1704: note = Description of Artificial Sequence: Synthetic coding sequence
  source 1..1704: mol_type = other DNA
atgagacccgacagccccaccatggccgcccccgccgagagcctgagaagaagaaagaccggctacagcgaccccgagcccgagagcccccccgcccccggcagaggccccgccggcagccccgcccacctgcacaccggcaccttctggctgaccagaatcgtgctgctgaaggccctggccttcgtgtacttcgtggccttcctggtggccttccaccagaacaagcagctgatcggcgacagaggcctgctgccctgcagagtgttcctgaagaacttccagcagtacttccaggacagaaccagctgggaggtgttcagctacatgcccaccatcctgtggctgatggactggagcgacatgaacagcaacctggacctgctggccctgctgggcctgggcatcagcagcttcgtgctgatcaccggctgcgccaacatgctgctgatggccgccctgtggggcctgtacatgagcctggtgaacgtgggccacgtgtggtacagcttcagatgggagagccagctgctggagaccggcttcctgggcatcttcctgtgccccctgtggaccctgagcagactgccccagcacacccccaccagcagaatcgtgctgtggggcttcagatggctgatcttcagaatcatgctgggcgccggcctgatcaagatcagaggcgacagatgctggagagacctgacctgcatggacttccactacgagacccagcccatgcccaaccccgtggcctactacctgcaccacagcccctggtggttccacagattcgagaccctgagcaaccacttcatcgagctgctggtgcccttcttcctgttcctgggcagaagagcctgcatcatccacggcgtgctgcagatcctgttccaggccgtgctgatcgtgagcggcaacctgagcttcctgaactggctgaccatggtgcccagcctggcctgcttcgacgacgccaccctgggcttcctgttccccagcggccccggcagcctgaaggacagagtgctgcagatgcagagagacatcagaggcgccagacccgagcccagattcggcagcgtggtgagaagagccgccaacgtgagcctgggcgtgctgctggcctggctgagcgtgcccgtggtgctgaacctgctgagcagcagacaggtgatgaacacccacttcaacagcctgcacatcgtgaacacctacggcgccttcggcagcatcaccaaggagagagccgaggtgatcctgcagggcaccgccagcagcaacgccagcgcccccgacgccatgtgggaggactacgagttcaagtgcaagcccggcgaccccagcagaagaccctgcctgatcagcccctaccactacagactggactggctgatgtggttcgccgccttccagacctacgagcacaacgactggatcatccacctggccggcaagctgctggccagcgacgccgaggccctgagcctgctggcccacaaccccttcgccggcagacccccccccagatgggtgagaggcgagcactacagatacaagttcagcagacccggcggcagacacgccgccgagggcaagtggtgggtgagaaagagaatcggcgcctacttcccccccctgagcctggaggagctgagaccctacttcagagacagaggctggcccctgcccggccccctgtag

SEQ ID NO: 87218 - DNA, 558 bp, synthetic construct
  misc_feature 1..558: note = Description of Artificial Sequence: Synthetic coding sequence
  source 1..558: mol_type = other DNA
atgagacccgacagccccaccatggccgcccccgccgagagcctgagaagaagaaagaccggctacagcgaccccgagcccgagagcccccccgcccccggcagaggccccgccggcagccccgcccacctgcacaccggcaccttctggctgaccagaatcgtgctgctgaaggccctggccttcgtgtacttcgtggccttcctggtggccttccaccagaacaagcagctgatcggcgacagaggcctgctgccctgcagagtgttcctgaagaacttccagcagtacttccaggacagaaccagctgggaggtgttcagctacatgcccaccatcctgtggctgatggactggagcgacatgaacagcaacctggacctgctggccctgctgggcctgggcatcagcagcttcgtgctgatcaccggctgcgccaacatgctgctgatggccgccctgtggggcctgtacatgagcctggtgaacgtgggccacgtgtggtgccccagcctggccagcgccatcagcctgcccagcatgcacggcggccagtag

SEQ ID NO: 87219 - DNA, 501 bp, synthetic construct
  misc_feature 1..501: note = Description of Artificial Sequence: Synthetic coding sequence
  source 1..501: mol_type = other DNA
atggccgcccccgccgagagcctgagaagaagaaagaccggctacagcgaccccgagcccgagagcccccccgcccccggcagaggccccgccggcagccccgcccacctgcacaccggcaccttctggctgaccagaatcgtgctgctgaaggccctggccttcgtgtacttcgtggccttcctggtggccttccaccagaacaagcagctgatcggcgacagaggcctgctgccctgcagagtgttcctgaagaacttccagcagtacttccaggacagaaccagctgggaggtgttcagctacatgcccaccatcctgtggctgatggactggagcgacatgaacagcaacctggacctgctggccctgctgggcctgggcatcagcagcttcgtgctgatcaccggctgcgccaacatgctgctgatggccgccctgtggggcctgtacatgagcctggtgaacgtgggccacgtgtggtacagcttcggcaagtag

SEQ ID NO: 87220 - DNA, 1053 bp, synthetic construct
  misc_feature 1..1053: note = Description of Artificial Sequence: Synthetic coding sequence
  source 1..1053: mol_type = other DNA
atgagaggcgccggcctgatcaagatcagaggcgacagatgctggagagacctgacctgcatggacttccactacgagacccagcccatgcccaaccccgtggcctactacctgcaccacagcccctggtggttccacagattcgagaccctgagcaaccacttcatcgagctgctggtgcccttcttcctgttcctgggcagaagagcctgcatcatccacggcgtgctgcagatcctgttccaggccgtgctgatcgtgagcggcaacctgagcttcctgaactggctgaccatggtgcccagcctggcctgcttcgacgacgccaccctgggcttcctgttccccagcggccccggcagcctgaaggacagagtgctgcagatgcagagagacatcagaggcgccagacccgagcccagattcggcagcgtggtgagaagagccgccaacgtgagcctgggcgtgctgctggcctggctgagcgtgcccgtggtgctgaacctgctgagcagcagacaggtgatgaacacccacttcaacagcctgcacatcgtgaacacctacggcgccttcggcagcatcaccaaggagagagccgaggtgatcctgcagggcaccgccagcagcaacgccagcgcccccgacgccatgtgggaggactacgagttcaagtgcaagcccggcgaccccagcagaagaccctgcctgatcagcccctaccactacagactggactggctgatgtggttcgccgccttccagacctacgagcacaacgactggatcatccacctggccggcaagctgctggccagcgacgccgaggccctgagcctgctggcccacaaccccttcgccggcagacccccccccagatgggtgagaggcgagcactacagatacaagttcagcagacccggcggcagacacgccgccgagggcaagtggtgggtgagaaagagaatcggcgcctacttcccccccctgagcctggaggagctgagaccctacttcagagacagaggctggcccctgcccggccccctgtag

SEQ ID NO: 87221 - DNA, 993 bp, synthetic construct
  misc_feature 1..993: note = Description of Artificial Sequence: Synthetic coding sequence
  source 1..993: mol_type = other DNA
atggacttccactacgagacccagcccatgcccaaccccgtggcctactacctgcaccacagcccctggtggttccacagattcgagaccctgagcaaccacttcatcgagctgctggtgcccttcttcctgttcctgggcagaagagcctgcatcatccacggcgtgctgcagatcctgttccaggccgtgctgatcgtgagcggcaacctgagcttcctgaactggctgaccatggtgcccagcctggcctgcttcgacgacgccaccctgggcttcctgttccccagcggccccggcagcctgaaggacagagtgctgcagatgcagagagacatcagaggcgccagacccgagcccagattcggcagcgtggtgagaagagccgccaacgtgagcctgggcgtgctgctggcctggctgagcgtgcccgtggtgctgaacctgctgagcagcagacaggtgatgaacacccacttcaacagcctgcacatcgtgaacacctacggcgccttcggcagcatcaccaaggagagagccgaggtgatcctgcagggcaccgccagcagcaacgccagcgcccccgacgccatgtgggaggactacgagttcaagtgcaagcccggcgaccccagcagaagaccctgcctgatcagcccctaccactacagactggactggctgatgtggttcgccgccttccagacctacgagcacaacgactggatcatccacctggccggcaagctgctggccagcgacgccgaggccctgagcctgctggcccacaaccccttcgccggcagacccccccccagatgggtgagaggcgagcactacagatacaagttcagcagacccggcggcagacacgccgccgagggcaagtggtgggtgagaaagagaatcggcgcctacttcccccccctgagcctggaggagctgagaccctacttcagagacagaggctggcccctgcccggccccctgtag

SEQ ID NO: 87222 - DNA, 792 bp, synthetic construct
  misc_feature 1..792: note = Description of Artificial Sequence: Synthetic coding sequence
  source 1..792: mol_type = other DNA
atgcccaaccccgtggcctactacctgcaccacagcccctggtggttccacagattcgagaccctgagcaaccacttcatcgagctgctggtgcccttcttcctgttcctgggcagaagagcctgcatcatccacggcgtgctgcagatcctgttccaggccgtgctgatcgtgagcggcaacctgagcttcctgaactggctgaccatggtgcccagcctggcctgcttcgacgacgccaccctgggcttcctgttccccagcggccccggcagcctgaaggacagagtgctgcagatgcagagagacatcagaggcgccagacccgagcccagattcggcagcgtggtgagaagagccgccaacgtgagcctgggcgtgctgctggcctggctgagcgtgcccgtggtgctgaacctgctgagcagcagacaggtgatgaacacccacttcaacagcctgcacatcgtgaacacctacggcgccttcggcagcatcaccaaggagagagccgaggtgatcctgcagggcaccgccagcagcaacgccagcgcccccgacgccatgtgggaggactacgagttcaagtgcaagcccggcgaccccagcagaagaccctgcctgatcagcccctaccactacagactggactggctgatgtggttcgccgccttccagacctacgagcacaacgactggatcatccacctggccggcaagctgctggccagcgacgccgaggccctgagcctgctggcccacaaccccttcgccggcagaccccccccctag

SEQ ID NO: 87223 - DNA, 1503 bp, synthetic construct
  misc_feature 1..1503: note = Description of Artificial Sequence: Synthetic coding sequence
  source 1..1503: mol_type = other DNA
atgagcaacagcgtgcccctgctgtgcttctggagcctgtgctactgcttcgccgccggcagccccgtgcccttcggccccgagggcagactggaggacaagctgcacaagcccaaggccacccagaccgaggtgaagcccagcgtgagattcaacctgagaaccagcaaggaccccgagcacgagggctgctacctgagcgtgggccacagccagcccctggaggactgcagcttcaacatgaccgccaagaccttcttcatcatccacggctggaccatgagcggcatcttcgagaactggctgcacaagctggtgagcgccctgcacaccagagagaaggacgccaacgtggtggtggtggactggctgcccctggcccaccagctgtacaccgacgccgtgaacaacaccagagtggtgggccacagcatcgccagaatgctggactggctgcaggagaaggacgacttcagcctgggcaacgtgcacctgatcggctacagcctgggcgcccacgtggccggctacgccggcaacttcgtgaagggcaccgtgggcagaatcaccggcctggaccccgccggccccatgttcgagggcgccgacatccacaagagactgagccccgacgacgccgacttcgtggacgtgctgcacacctacaccagaagcttcggcctgagcatcggcatccagatgcccgtgggccacatcgacatctaccccaacggcggcgacttccagcccggctgcggcctgaacgacgtgctgggcagcatcgcctacggcaccatcaccgaggtggtgaagtgcgagcacgagagagccgtgcacctgttcgtggacagcctggtgaaccaggacaagcccagcttcgccttccagtgcaccgacagcaacagattcaagaagggcatctgcctgagctgcagaaagaacagatgcaacagcatcggctacaacgccaagaagatgagaaacaagagaaacagcaagatgtacctgaagaccagagccggcatgcccttcagagtgtaccactaccagatgaagatccacgtgttcagctacaagaacatgggcgagatcgagcccaccttctacgtgaccctgtacggcaccaacgccgacagccagaccctgcccctggagatcgtggagagaatcgagcagaacgccaccaacaccttcctggtgtacaccgaggaggacctgggcgacctgctgaagatccagctgacctgggagggcgccagccagagctggtacaacctgtggaaggagttcagaagctacctgagccagcccagaaaccccggcagagagctgaacatcagaagaatcagagtgaagagcggcgagacccagagaaagctgaccttctgcaccgaggaccccgagaacaccagcatcagccccggcagagagctgtggttcagaaagtgcagagacggctggagaatgaagaacgagaccagccccaccgtggagctgccctag

SEQ ID NO: 87224 - DNA, 1281 bp, synthetic construct
  misc_feature 1..1281: note = Description of Artificial Sequence: Synthetic coding sequence
  source 1..1281: mol_type = other DNA
atgagcaacagcgtgcccctgctgtgcttctggagcctgtgctactgcttcgccgccggcagccccgtgcccttcggccccgagggcagactggaggacaagctgcacaagcccaaggccacccagaccgaggtgaagcccagcgtgagattcaacctgagaaccagcaaggaccccgagcacgagggctgctacctgagcgtgggccacagccagcccctggaggactgcagcttcaacatgaccgccaagaccttcttcatcatccacggctggaccatgagcggcatcttcgagaactggctgcacaagctggtgagcgccctgcacaccagagagaaggacgccaacgtggtggtggtggactggctgcccctggcccaccagctgtacaccgacgccgtgaacaacaccagagtggtgggccacagcatcgccagaatgctggactggctgcaggagaaggacgacttcagcctgggcaacgtgcacctgatcggctacagcctgggcgcccacgtggccggctacgccggcaacttcgtgaagggcaccgtgggcagaatcaccgccatcaccgaggtggtgaagtgcgagcacgagagagccgtgcacctgttcgtggacagcctggtgaaccaggacaagcccagcttcgccttccagtgcaccgacagcaacagattcaagaagggcatctgcctgagctgcagaaagaacagatgcaacagcatcggctacaacgccaagaagatgagaaacaagagaaacagcaagatgtacctgaagaccagagccggcatgcccttcagagtgtaccactaccagatgaagatccacgtgttcagctacaagaacatgggcgagatcgagcccaccttctacgtgaccctgtacggcaccaacgccgacagccagaccctgcccctggagatcgtggagagaatcgagcagaacgccaccaacaccttcctggtgtacaccgaggaggacctgggcgacctgctgaagatccagctgacctgggagggcgccagccagagctggtacaacctgtggaaggagttcagaagctacctgagccagcccagaaaccccggcagagagctgaacatcagaagaatcagagtgaagagcggcgagacccagagaaagctgaccttctgcaccgaggaccccgagaacaccagcatcagccccggcagagagctgtggttcagaaagtgcagagacggctggagaatgaagaacgagaccagccccaccgtggagctgccctag

SEQ ID NO: 87225 - DNA, 1101 bp, synthetic construct
  misc_feature 1..1101: note = Description of Artificial Sequence: Synthetic coding sequence
  source 1..1101: mol_type = other DNA
atgaacatcagccagatcatcagctactggggctaccccgacgaggagtacgacatcgtgaccgaggacggctacatcctgggcctgtacagaatcccctactggagaaccgacaacaacaagaacctggcccagagagtggtggtgtacctgcagcacggcctgctgaccagcgccagcagctggatcagcaacctgcccaacaacagcctgggcttcatcctggccgacgccggctacgacgtgtggatgggcaacagcagaggcaacacctggagcagaaagcacctgtacctggagaccagcagcaaggagttctgggccttcagcttcgacgagatggccaagtacgacctgcccgccagcatcgacttcaccgtgaagcagaccagacaggaggagatcttctacgtgggccacagccagggcaccaccatcggcttcatcaccttcagcaccatcagcaagatcgccgagagaatcaagatcttcttcgccctggcccccgtgttcagcaccaagtacctgaagagccccctgatcagaatgacctacaagtggaagagcatcgtgatggccttcagcggcaacaaggacttcctgcccaagaccagcttcaagaagttcatcggcagcaagctgtgccccctgcagatcttcgacaagatctgcctgaacatcctgttcatgatgttcggctacgaccccaagaacctgaacatgagcagactggacgtgtacttcagccacaaccccgccggcaccagcgtgcagaacatgctgcactggagccagctgctgaacagcacccacctgaaggcctacgactggggcagccccgacctgaacctggtgcactacaaccagaccaccagccccctgtacaacatgaccaacatgaacgtggccaccgccatctggaacggcaagagcgacctgctggccgaccccgaggacgtgaacatcctgcacagcgagatcaccaaccacatctactacaagaccatcagctactacaaccacatcgacagcctgttcggcctggacgtgtacgaccaggtgtaccacgagatcatcgacatcatccaggacaacctgtag

SEQ ID NO: 87226 - DNA, 1200 bp, synthetic construct
  misc_feature 1..1200: note = Description of Artificial Sequence: Synthetic coding sequence
  source 1..1200: mol_type = other DNA
atgtggcagctgctggccgccgcctgctggatgctgctgctgggcagcatgtacggctacgacaagaagggcaacaacgccaaccccgaggccaacatgaacatcagccagatcatcagctactggggctacccctacgaggagtacgacgtgaccaccaaggacggctacatcctgggcatctacagaatcccccacggcagaggctgccccggcagaaccgcccccaagcccgccgtgtacctgcagcacggcctgatcgccagcgccagcaactggatctgcaacctgcccaacaacagcctggccttcctgctggccgacagcggctacgacgtgtggctgggcaacagcagaggcaacacctggagcagaaagcacctgaagctgagccccaagagccccgagtactgggccttcagcctggacgagatggccaagtacgacctgcccgccaccatcaacttcatcatcgagaagaccggccagaagagactgtactacgtgggccacagccagggcaccaccatcgccttcatcgccttcagcaccaaccccgagctggccaagaagatcaagatcttcttcgccctggcccccgtggtgaccgtgaagtacacccagagccccatgaagaagctgaccaccctgagcagaagagtggtgaaggtgctgttcggcgacaagatgttccacccccacaccctgttcgaccagttcatcgccaccaaggtgtgcaacagaaagctgttcagaagaatctgcagcaacttcctgttcaccctgagcggcttcgacccccagaacctgaacatgagcagactggacgtgtacctgagccacaaccccgccggcaccagcgtgcagaacatgctgcactgggcccaggccgtgaacagcggccagctgcaggccttcgactggggcaacagcgaccagaacatgatgcacttccaccagctgaccccccccctgtacaacatcaccaagatggaggtgcccaccgccatctggaacggcggccaggacatcgtggccgaccccaaggacgtggagaacctgctgccccagatcgccaacctgatctactacaagctgatcccccactacaaccacgtggacttctacctgggcgaggacgccccccaggagatctaccaggacctgatcatcctgatggaggagtacctgcagaactag

SEQ ID NO: 87227 - DNA, 1272 bp, synthetic construct
  misc_feature 1..1272: note = Description of Artificial Sequence: Synthetic coding sequence
  source 1..1272: mol_type = other DNA
atgctggagaccctgagcagacagtggatcgtgagccacagaatggagatgtggctgctgatcctggtggcctacatgttccagagaaacgtgaacagcgtgcacatgcccaccaaggccgtggaccccgaggccttcatgaacatcagcgagatcatccagcaccagggctacccctgcgaggagtacgaggtggccaccgaggacggctacatcctgagcgtgaacagaatccccagaggcctggtgcagcccaagaagaccggcagcagacccgtggtgctgctgcagcacggcctggtgggcggcgccagcaactggatcagcaacctgcccaacaacagcctgggcttcatcctggccgacgccggcttcgacgtgtggatgggcaacagcagaggcaacgcctggagcagaaagcacaagaccctgagcatcgaccaggacgagttctgggccttcagctacgacgagatggccagattcgacctgcccgccgtgatcaacttcatcctgcagaagaccggccaggagaagatctactacgtgggctacagccagggcaccaccatgggcttcatcgccttcagcaccatgcccgagctggcccagaagatcaagatgtacttcgccctggcccccatcgccaccgtgaagcacgccaagagccccggcaccaagttcctgctgctgcccgacatgatgatcaagggcctgttcggcaagaaggagttcctgtaccagaccagattcctgagacagctggtgatctacctgtgcggccaggtgatcctggaccagatctgcagcaacatcatgctgctgctgggcggcttcaacaccaacaacatgaacatgagcagagccagcgtgtacgccgcccacaccctggccggcaccagcgtgcagaacatcctgcactggagccaggccgtgaacagcggcgagctgagagccttcgactggggcagcgagaccaagaacctggagaagtgcaaccagcccacccccgtgagatacagagtgagagacatgaccgtgcccaccgccatgtggaccggcggccaggactggctgagcaaccccgaggacgtgaagatgctgctgagcgaggtgaccaacctgatctaccacaagaacatccccgagtgggcccacgtggacttcatctggggcctggacgccccccacagaatgtacaacgagatcatccacctgatgcagcaggaggagaccaacctgagccagggcagatgcgaggccgtgctgtag

SEQ ID NO: 87228 - DNA, 1152 bp, synthetic construct
  misc_feature 1..1152: note = Description of Artificial Sequence: Synthetic coding sequence
  source 1..1152: mol_type = other DNA
atgaccagacccctggacagaaagcagagcgagatcatccagcaccagggctacccctgcgaggagtacgaggtggccaccgaggacggctacatcctgagcgtgaacagaatccccagaggcctggtgcagcccaagaagaccggcagcagacccgtggtgctgctgcagcacggcctggtgggcggcgccagcaactggatcagcaacctgcccaacaacagcctgggcttcatcctggccgacgccggcttcgacgtgtggatgggcaacagcagaggcaacgcctggagcagaaagcacaagaccctgagcatcgaccaggacgagttctgggccttcagctacgacgagatggccagattcgacctgcccgccgtgatcaacttcatcctgcagaagaccggccaggagaagatctactacgtgggctacagccagggcaccaccatgggcttcatcgccttcagcaccatgcccgagctggcccagaagatcaagatgtacttcgccctggcccccatcgccaccgtgaagcacgccaagagccccggcaccaagttcctgctgctgcccgacatgatgatcaagggcctgttcggcaagaaggagttcctgtaccagaccagattcctgagacagctggtgatctacctgtgcggccaggtgatcctggaccagatctgcagcaacatcatgctgctgctgggcggcttcaacaccaacaacatgaacatgagcagagccagcgtgtacgccgcccacaccctggccggcaccagcgtgcagaacatcctgcactggagccaggccgtgaacagcggcgagctgagagccttcgactggggcagcgagaccaagaacctggagaagtgcaaccagcccacccccgtgagatacagagtgagagacatgaccgtgcccaccgccatgtggaccggcggccaggactggctgagcaaccccgaggacgtgaagatgctgctgagcgaggtgaccaacctgatctaccacaagaacatccccgagtgggcccacgtggacttcatctggggcctggacgccccccacagaatgtacaacgagatcatccacctgatgcagcaggaggagaccaacctgagccagggcagatgcgaggccgtgctgtag

SEQ ID NO: 87229 - DNA, 1197 bp, synthetic construct
  misc_feature 1..1197: note = Description of Artificial Sequence: Synthetic coding sequence
  source 1..1197: mol_type = other DNA
atgatgtggctgctgctgaccaccacctgcctgatctgcggcaccctgaacgccggcggcttcctggacctggagaacgaggtgaaccccgaggtgtggatgaacaccagcgagatcatcatctacaacggctaccccagcgaggagtacgaggtgaccaccgaggacggctacatcctgctggtgaacagaatcccctacggcagaacccacgccagaagcaccggccccagacccgtggtgtacatgcagcacgccctgttcgccgacaacgcctactggctggagaactacgccaacggcagcctgggcttcctgctggccgacgccggctacgacgtgtggatgggcaacagcagaggcaacacctggagcagaagacacaagaccctgagcgagaccgacgagaagttctgggccttcagcttcgacgagatggccaagtacgacctgcccggcgtgatcgacttcatcgtgaacaagaccggccaggagaagctgtacttcatcggccacagcctgggcaccaccatcggcttcgtggccttcagcaccatgcccgagctggcccagagaatcaagatgaacttcgccctgggccccaccatcagcttcaagtaccccaccggcatcttcaccagattcttcctgctgcccaacagcatcatcaaggccgtgttcggcaccaagggcttcttcctggaggacaagaagaccaagatcgccagcaccaagatctgcaacaacaagatcctgtggctgatctgcagcgagttcatgagcctgtgggccggcagcaacaagaagaacatgaaccagagcagaatggacgtgtacatgagccacgcccccaccggcagcagcgtgcacaacatcctgcacatcaagcagctgtaccacagcgacgagttcagagcctacgactggggcaacgacgccgacaacatgaagcactacaaccagagccacccccccatctacgacctgaccgccatgaaggtgcccaccgccatctgggccggcggccacgacgtgctggtgaccccccaggacgtggccagaatcctgccccagatcaagagcctgcactacttcaagctgctgcccgactggaaccacttcgacttcgtgtggggcctggacgccccccagagaatgtacagcgagatcatcgccctgatgaaggcctacagctag

SEQ ID NO: 87230 - DNA, 1500 bp, synthetic construct
  misc_feature 1..1500: note = Description of Artificial Sequence: Synthetic coding sequence
  source 1..1500: mol_type = other DNA
atggacaccagccccctgtgcttcagcatcctgctggtgctgtgcatcttcatccagagcagcgccctgggccagagcctgaagcccgagcccttcggcagaagagcccaggccgtggagaccaacaagaccctgcacgagatgaagaccagattcctgctgttcggcgagaccaaccagggctgccagatcagaatcaaccaccccgacaccctgcaggagtgcggcttcaacagcagcctgcccctggtgatgatcatccacggctggagcgtggacggcgtgctggagaactggatctggcagatggtggccgccctgaagagccagcccgcccagcccgtgaacgtgggcctggtggactggatcaccctggcccacgaccactacaccatcgccgtgagaaacaccagactggtgggcaaggaggtggccgccctgctgagatggctggaggagagcgtgcagctgagcagaagccacgtgcacctgatcggctacagcctgggcgcccacgtgagcggcttcgccggcagcagcatcggcggcacccacaagatcggcagaatcaccggcctggacgccgccggccccctgttcgagggcagcgcccccagcaacagactgagccccgacgacgccaacttcgtggacgccatccacaccttcaccagagagcacatgggcctgagcgtgggcatcaagcagcccatcggccactacgacttctaccccaacggcggcagcttccagcccggctgccacttcctggagctgtacagacacatcgcccagcacggcttcaacgccatcacccagaccatcaagtgcagccacgagagaagcgtgcacctgttcatcgacagcctgctgcacgccggcacccagagcatggcctacccctgcggcgacatgaacagcttcagccagggcctgtgcctgagctgcaagaagggcagatgcaacaccctgggctaccacgtgagacaggagcccagaagcaagagcaagagactgttcctggtgaccagagcccagagccccttcaaggtgtaccactaccagttcaagatccagttcatcaaccagaccgagacccccatccagaccaccttcaccatgagcctgctgggcaccaaggagaagatgcagaagatccccatcaccctgggcaagggcatcgccagcaacaagacctacagcttcctgatcaccctggacgtggacatcggcgagctgatcatgatcaagttcaagtgggagaacagcgccgtgtgggccaacgtgtgggacaccgtgcagaccatcatcccctggagcaccggccccagacacagcggcctggtgctgaagaccatcagagtgaaggccggcgagacccagcagagaatgaccttctgcagcgagaacaccgacgacctgctgctgagacccacccaggagaagatcttcgtgaagtgcgagatcaagagcaagaccagcaagagaaagatcagatag

SEQ ID NO: 87231 - DNA, 1500 bp, synthetic construct; identical to SEQ ID NO: 87230
  misc_feature 1..1500: note = Description of Artificial Sequence: Synthetic coding sequence
  source 1..1500: mol_type = other DNA

SEQ ID NO: 87232 - DNA, 3231 bp, synthetic construct
  misc_feature 1..3231: note = Description of Artificial Sequence: Synthetic coding sequence
  source 1..3231: mol_type = other DNA
atggagcccggcagcaagagcgtgagcagaagcgactggcagcccgagccccaccagagacccatcacccccctggagcccggccccgagaagacccccatcgcccagcccgagagcaagaccctgcagggcagcaacacccagcagaagcccgccagcaaccagagacccctgacccagcaggagacccccgcccagcacgacgccgagagccagaaggagcccagagcccagcagaagagcgccagccaggaggagttcctggccccccagaagcccgccccccagcagagcccctacatccagagagtgctgctgacccagcaggaggccgccagccagcagggccccggcctgggcaaggagagcatcacccagcaggagcccgccctgagacagagacacgtggcccagcccggccccggccccggcgagcccccccccgcccagcaggaggccgagagcacccccgccgcccaggccaagcccggcgccaagagagagcccagcgcccccaccgagagcaccagccaggagacccccgagcagagcgacaagcagaccacccccgtgcagggcgccaagagcaagcagggcagcctgaccgagctgggcttcctgaccaagctgcaggagctgagcatccagagaagcgccctggagtggaaggccctgagcgagtgggtgaccgacagcgagagcgagagcgacgtgggcagcagcagcgacaccgacagccccgccaccatgggcggcatggtggcccagggcgtgaagctgggcttcaagggcaagagcggctacaaggtgatgagcggctacagcggcaccagcccccacgagaagaccagcgccagaaaccacagacactaccaggacaccgccagcagactgatccacaacatggacctgagaaccatgacccagagcctggtgaccctggccgaggacaacatcgccttcttcagcagccagggccccggcgagaccgcccagagactgagcggcgtgttcgccggcgtgagagagcaggccctgggcctggagcccgccctgggcagactgctgggcgtggcccacctgttcgacctggaccccgagacccccgccaacggctacagaagcctggtgcacaccgccagatgctgcctggcccacctgctgcacaagagcagatacgtggccagcaacagaagaagcatcttcttcagaaccagccacaacctggccgagctggaggcctacctggccgccctgacccagctgagagccctggtgtactacgcccagagactgctggtgaccaacagacccggcgtgctgttcttcgagggcgacgagggcctgaccgccgacttcctgagagagtacgtgaccctgcacaagggctgcttctacggcagatgcctgggcttccagttcacccccgccatcagacccttcctgcagaccatcagcatcggcctggtgagcttcggcgagcactacaagagaaacgagaccggcctgagcgtggccgccagcagcctgttcaccagcggcagattcgccatcgaccccgagctgagaggcgccgagttcgagagaatcacccagaacctggacgtgcacttctggaaggccttctggaacatcaccgagatggaggtgctgagcagcctggccaacatggccagcgccaccgtgagagtgagcagactgctgagcctgccccccgaggccttcgagatgcccctgaccgccgaccccaccctgaccgtgaccatcagcccccccctggcccacaccggccccggccccgtgctggtgagactgatcagctacgacctgagagagggccaggacagcgaggagctgagcagcctgatcaagagcaacggccagagaagcctggagctgtggcccagaccccagcaggcccccagaagcagaagcctgatcgtgcacttccacggcggcggcttcgtggcccagaccagcagaagccacgagccctacctgaagagctgggcccaggagctgggcgcccccatcatcagcatcgactacagcctggcccccgaggcccccttccccagagccctggaggagtgcttcttcgcctactgctgggccatcaagcactgcgccctgctgggcagcaccggcgagagaatctgcctggccggcgacagcgccggcggcaacctgtgcttcaccgtggccctgagagccgccgcctacggcgtgagagtgcccgacggcatcatggccgcctaccccgccaccatgctgcagcccgccgccagccccagcagactgctgagcctgatggaccccctgctgcccctgagcgtgctgagcaagtgcgtgagcgcctacgccggcgccaagaccgaggaccacagcaacagcgaccagaaggccctgggcatgatgggcctggtgagaagagacaccgccctgctgctgagagacttcagactgggcgccagcagctggctgaacagcttcctggagctgagcggcagaaagagccagaagatgagcgagcccatcgccgagcccatgagaagaagcgtgagcgaggccgccctggcccagccccagggccccctgggcaccgacagcctgaagaacctgaccctgagagacctgagcctgagaggcaacagcgagaccagcagcgacacccccgagatgagcctgagcgccgagaccctgagccccagcacccccagcgacgtgaacttcctgctgccccccgaggacgccggcgaggaggccgaggccaagaacgagctgagccccatggacagaggcctgggcgtgagagccgccttccccgagggcttccaccccagaagaagcagccagggcgccacccagatgcccctgtacagcagccccatcgtgaagaaccccttcatgagccccctgctggcccccgacagcatgctgaagagcctgccccccgtgcacatcgtggcctgcgccctggaccccatgctggacgacagcgtgatgctggccagaagactgagaaacctgggccagcccgtgaccctgagagtggtggaggacctgccccacggcttcctgaccctggccgccctgtgcagagagaccagacaggccgccgagctgtgcgtggagagaatcagactggtgctgaccccccccgccggcgccggccccagcggcgagaccggcgccgccggcgtggacggcggctgcggcggcagacactag

SEQ ID NO: 87233 - DNA, 1356 bp, synthetic construct
  misc_feature 1..1356: note = Description of Artificial Sequence: Synthetic coding sequence
  source 1..1356: mol_type = other DNA
atgctgagattctacctgttcatcagcctgctgtgcctgagcagaagcgacgccgaggagacctgccccagcttcaccagactgagcttccacagcgccgtggtgggcaccggcctgaacgtgagactgatgctgtacaccagaaagaacctgacctgcgcccagaccatcaacagcagcgccttcggcaacctgaacgtgaccaagaagaccaccttcatcgtgcacggcttcagacccaccggcagcccccccgtgtggatggacgacctggtgaagggcctgctgagcgtggaggacatgaacgtggtggtggtggactggaacagaggcgccaccaccctgatctacacccacgccagcagcaagaccagaaaggtggccatggtgctgaaggagttcatcgaccagatgctggccgagggcgccagcctggacgacatctacatgatcggcgtgagcctgggcgcccacatcagcggcttcgtgggcgagatgtacgacggctggctgggcagaatcaccggcctggaccccgccggccccctgttcaacggcaagccccaccaggacagactggaccccagcgacgcccagttcgtggacgtgatccacagcgacaccgacgccctgggctacaaggagcccctgggcaacatcgacttctaccccaacggcggcctggaccagcccggctgccccaagaccatcctgggcggcttccagtacttcaagtgcgaccaccagagaagcgtgtacctgtacctgagcagcctgagagagagctgcaccatcaccgcctacccctgcgacagctaccaggactacagaaacggcaagtgcgtgagctgcggcaccagccagaaggagagctgccccctgctgggctactacgccgacaactggaaggaccacctgagaggcaaggacccccccatgaccaaggccttcttcgacaccgccgaggagagccccttctgcatgtaccactacttcgtggacatcatcacctggaacaagaacgtgagaagaggcgacatcaccatcaagctgagagacaaggccggcaacaccaccgagagcaagatcaaccacgagcccaccaccttccagaagtaccaccaggtgagcctgctggccagattcaaccaggacctggacaaggtggccgccatcagcctgatgttcagcaccggcagcctgatcggccccagatacaagctgagaatcctgagaatgaagctgagaagcctggcccaccccgagagaccccagctgtgcagatacgacctggtgctgatggagaacgtggagaccgtgttccagcccatcctgtgccccgagctgcagctgtag

SEQ ID NO: 87234 - DNA, 1446 bp, synthetic construct
  misc_feature 1..1446: note = Description of Artificial Sequence: Synthetic coding sequence
  source 1..1446: mol_type = other DNA
atgctgctgaagtgcctgcacaacaacctgtgccagaagtacagcgcccacgccttccagttcagccccagaaacgtgctgtggctgctggtggtgtgcctgagaagcgacaacaagagaccctgcctggagttcagccagctgagcgtgaaggacagcttcagagacctgttcatccccagaatcgagaccatcctgatgatgtacaccagaaacaacctgaactgcgccgagcccctgttcgagcagaacaacagcctgaacgtgaacttcaacacccagaagaagaccgtgtggctgatccacggctacagacccgtgggcagcatccccctgtggctgcagaacttcgtgagaatcctgctgaacgaggaggacatgaacgtgatcgtggtggactggagcagaggcgccaccaccttcatctacaacagagccgtgaagaacaccagaaaggtggccgtgagcctgagcgtgcacatcaagaacctgctgaagcacggcgccagcctggacaacttccacttcatcggcgtgagcctgggcgcccacatcagcggcttcgtgggcaagatcttccacggccagctgggcagaatcaccggcctggaccccgccggccccagattcagcagaaagcccccctacagcagactggactacaccgacgccaagttcgtggacgtgatccacagcgacagcaacggcctgggcatccaggagcccctgggccacatcgacttctaccccaacggcggcaacaagcagcccggctgccccaagagcatcttcagcggcatccagttcatcaagtgcaaccaccagagagccgtgcacctgttcatggccagcctggagaccaactgcaacttcatcagcttcccctgcagaagctacaaggactacaagaccagcctgtgcgtggactgcgactgcttcaaggagaagagctgccccagactgggctaccaggccaagctgttcaagggcgtgctgaaggagagaatggagggcagacccctgagaaccaccgtgttcctggacaccagcggcacctaccccttctgcacctactacttcgtgctgagcatcatcgtgcccgacaagaccatgatggacggcagcttcagcttcaagctgctgaaccagctgggcatgatcgaggagcccagactgtacgagaagaacaagcccttctacaagctgcaggaggtgaagatcctggcccagttctacaacgacttcgtgaacatcagcagcatcggcctgacctacttccagagcagcaacctgcagtgcagcacctgcacctacaagatccagagactgatgctgaagagcctgacctaccccgagagaccccccctgtgcagatacaacatcgtgctgaaggacagagaggaggtgttcctgaaccccaacacctgcacccccaagaacacctag

SEQ ID NO: 87235 - DNA, 471 bp, synthetic construct
  misc_feature 1..471: note = Description of Artificial Sequence: Synthetic coding sequence
  source 1..471: mol_type = other DNA
atgaacgtgatcgtggtggactggagcagaggcgccaccaccttcatctacaacagagccgtgaagaacaccagaaaggtggccgtgagcctgagcgtgcacatcaagaacctgctgaagcacggcgccagcctggacaacttccacttcatcggcgtgagcctgggcgcccacatcagcggcttcgtgggcaagatcttccacggccagctgggcagaatcaccggcctggaccccgccggccccagattcagcagaaagcccccctacagcagactggactacaccgacgccaagttcgtggacgtgatccacagcgacagcaacggcatccagttcatcaagtgcaaccaccagagagccgtgcacctgttcatggccagcctggagaccaactgcaacttcatcagcttcccctgcagaagctacaaggactacaagaccagcctgtgcgtggactgcgactgctag

SEQ ID NO: 87236 - DNA, 426 bp, synthetic construct
  misc_feature 1..426: note = Description of Artificial Sequence: Synthetic coding sequence
  source 1..426: mol_type = other DNA
tgatacaacagagccgtgaagaacaccagaaaggtggccgtgagcctgagcgtgcacatcaagaacctgctgaagcacggcgccagcctggacaacttccacttcatcggcgtgagcctgggcgcccacatcagcggcttcgtgggcaagatcttccacggccagctgggcagaatcaccggcctggaccccgccggccccagattcagcagaaagcccccctacagcagactggactacaccgacgccaagttcgtggacgtgatccacagcgacagcaacggcatccagttcatcaagtgcaaccaccagagagccgtgcacctgttcatggccagcctggagaccaactgcaacttcatcagcttcccctgcagaagctacaaggactacaagaccagcctgtgcgtggactgcgactgctag

SEQ ID NO: 87237 - DNA, 1383 bp, synthetic construct
  misc_feature 1..1383: note = Description of Artificial Sequence: Synthetic coding sequence
  source 1..1383: mol_type = other DNA
atgagagtgtacatcttcctgtgcctgatgtgctgggtgagaagcgacaacaagagaccctgcctggagttcagccagctgagcgtgaaggacagcttcagagacctgttcatccccagaatcgagaccatcctgatgatgtacaccagaaacaacctgaactgcgccgagcccctgttcgagcagaacaacagcctgaacgtgaacttcaacacccagaagaagaccgtgtggctgatccacggctacagacccgtgggcagcatccccctgtggctgcagaacttcgtgagaatcctgctgaacgaggaggacatgaacgtgatcgtggtggactggagcagaggcgccaccaccttcatctacaacagagccgtgaagaacaccagaaaggtggccgtgagcctgagcgtgcacatcaagaacctgctgaagcacggcgccagcctggacaacttccacttcatcggcgtgagcctgggcgcccacatcagcggcttcgtgggcaagatcttccacggccagctgggcagaatcaccggcctggaccccgccggccccagattcagcagaaagcccccctacagcagactggactacaccgacgccaagttcgtggacgtgatccacagcgacagcaacggcctgggcatccaggagcccctgggccacatcgacttctaccccaacggcggcaacaagcagcccggctgccccaagagcatcttcagcggcatccagttcatcaagtgcaaccaccagagagccgtgcacctgttcatggccagcctggagaccaactgcaacttcatcagcttcccctgcagaagctacaaggactacaagaccagcctgtgcgtggactgcgactgcttcaaggagaagagctgccccagactgggctaccaggccaagctgttcaagggcgtgctgaaggagagaatggagggcagacccctgagaaccaccgtgttcctggacaccagcggcacctaccccttctgcacctactacttcgtgctgagcatcatcgtgcccgacaagaccatgatggacggcagcttcagcttcaagctgctgaaccagctgggcatgatcgaggagcccagactgtacgagaagaacaagcccttctacaagctgcaggaggtgaagatcctggcccagttctacaacgacttcgtgaacatcagcagcatcggcctgacctacttccagagcagcaacctgcagtgcagcacctgcacctacaagatccagagactgatgctgaagagcctgacctaccccgagagaccccccctgtgcagatacaacatcgtgctgaaggacagagaggaggtgttcctgaaccccaacacctgcacccccaagaacacctag

SEQ ID NO: 87238 - DNA, 2673 bp, synthetic construct
  misc_feature 1..2673: note = Description of Artificial Sequence: Synthetic coding sequence
  source 1..2673: mol_type = other DNA
atgaactacgtgggccagctggccggccaggtgttcgtgaccgtgaaggagctgtacaagggcctgaaccccgccaccctgagcggctgcatcgacatcatcgtgatcagacagcccaacggcaacctgcagtgcagccccttccacgtgagattcggcaagatgggcgtgctgagaagcagagagaaggtggtggacatcgagatcaacggcgagagcgtggacctgcacatgaagctgggcgacaacggcgaggccttcttcgtgcaggagaccgacaacgaccaggaggtgatccccatgcacctggccaccagccccatcctgagcgagggcgccagcagaatggagtgccagctgaagagaggcagcgtggacagaatgagaggcctggaccccagcacccccgcccaggtgatcgcccccagcgagacccccagcagcagcagcgtggtgaagaagagaagaaagagaagaagaaagagccagctggacagcctgaagagagacgacaacatgaacaccagcgaggacgaggacatgttccccatcgagatgagcagcgacgaggccatggagctgctggagagcagcagaaccctgcccaacgacatcccccccttccaggacgacatccccgaggagaacctgagcctggccgtgatctacccccagagcgccagctaccccaacagcgacagagagtggagccccacccccagccccagcggcagcagacccagcacccccaagagcgacagcgagctggtgagcaagagcaccgagagaaccggccagaagaaccccgagatgctgtggctgtggggcgagctgccccaggccgccaagagcagcagcccccacaagatgaaggagagcagccccctgagcagcagaaagatctgcgacaagagccacttccaggccatccacagcgagagcagcgacaccttcagcgaccagagccccaccctggtgggcggcgccctgctggaccagaacaagccccagaccgagatgcagttcgtgaacgaggaggacctggagaccctgggcgccgccgcccccctgctgcccatgatcgaggagctgaagccccccagcgccagcgtggtgcagaccgccaacaagaccgacagccccagcagaaagagagacaagagaagcagacacctgggcgccgacggcgtgtacctggacgacctgaccgacatggaccccgaggtggccgccctgtacttccccaagaacggcgaccccagcggcctggccaagcacgccagcgacaacggcgccagaagcgccaaccagagcccccagagcgtgggcagcagcggcgtggacagcggcgtggagagcaccagcgacggcctgagagacctgcccagcatcgccatcagcctgtgcggcggcctgagcgaccacagagagatcaccaaggacgccttcctggagcaggccgtgagctaccagcagttcgtggacaaccccgccatcatcgacgaccccaacctggtggtgaagatcggcagcaagtactacaactggaccaccgccgcccccctgctgctggccatgcaggccttccagaagcccctgcccaaggccaccgtggagagcatcatgagagacaagatgcccaagaagggcggcagatggtggttcagctggagaggcagaaacaccaccatcaaggaggagagcaagcccgagcagtgcctggccggcaaggcccacagcaccggcgagcagcccccccagctgagcctggccaccagagtgaagcacgagagcagcagcagcgacgaggagagagccgccgccaagcccagcaacgccggccacctgcccctgctgcccaacgtgagctacaagaagaccctgagactgaccagcgagcagctgaagagcctgaagctgaagaacggccccaacgacgtggtgttcagcgtgaccacccagtaccagggcacctgcagatgcgagggcaccatctacctgtggaactgggacgacaaggtgatcatcagcgacatcgacggcaccatcaccagaagcgacaccctgggccacatcctgcccaccctgggcaaggactggacccaccagggcatcgccaagctgtaccacaaggtgagccagaacggctacaagttcctgtactgcagcgccagagccatcggcatggccgacatgaccagaggctacctgcactgggtgaacgagagaggcaccgtgctgccccagggccccctgctgctgagccccagcagcctgttcagcgccctgcacagagaggtgatcgagaagaagcccgagaagttcaaggtgcagtgcctgaccgacatcaagaacctgttcttccccaacaccgagcccttctacgccgccttcggcaacagacccgccgacgtgtacagctacaagcaggtgggcgtgagcctgaacagaatcttcaccgtgaaccccaagggcgagctggtgcaggagcacgccaagaccaacatcagcagctacgtgagactgtgcgaggtggtggaccacgtgttccccctgctgaagagaagccacagcagcgacttcccctgcagcgacaccttcagcaacttcaccttctggagagagcccctgccccccttcgagaaccaggacatccacagcgccagcgcctag

SEQ ID NO: 87239 - DNA, 1863 bp, synthetic construct
  misc_feature 1..1863: note = Description of Artificial Sequence: Synthetic coding sequence
  source 1..1863: mol_type = other DNA
atgctgtggctgtggggcgagctgccccaggccgccaagagcagcagcccccacaagatgaaggagagcagccccctgagcagcagaaagatctgcgacaagagccacttccaggccatccacagcgagagcagcgacaccttcagcgaccagagccccaccctggtgggcggcgccctgctggaccagaacaagccccagaccgagatgcagttcgtgaacgaggaggacctggagaccctgggcgccgccgcccccctgctgcccatgatcgaggagctgaagccccccagcgccagcgtggtgcagaccgccaacaagaccgacagccccagcagaaagagagacaagagaagcagacacctgggcgccgacggcgtgtacctggacgacctgaccgacatggaccccgaggtggccgccctgtacttccccaagaacggcgaccccagcggcctggccaagcacgccagcgacaacggcgccagaagcgccaaccagagcccccagagcgtgggcagcagcggcgtggacagcggcgtggagagcaccagcgacggcctgagagacctgcccagcatcgccatcagcctgtgcggcggcctgagcgaccacagagagatcaccaaggacgccttcctggagcaggccgtgagctaccagcagttcgtggacaaccccgccatcatcgacgaccccaacctggtggtgaagatcggcagcaagtactacaactggaccaccgccgcccccctgctgctggccatgcaggccttccagaagcccctgcccaaggccaccgtggagagcatcatgagagacaagatgcccaagaagggcggcagatggtggttcagctggagaggcagaaacaccaccatcaaggaggagagcaagcccgagcagtgcctggccggcaaggcccacagcaccggcgagcagcccccccagctgagcctggccaccagagtgaagcacgagagcagcagcagcgacgaggagagagccgccgccaagcccagcaacgccggccacctgcccctgctgcccaacgtgagctacaagaagaccctgagactgaccagcgagcagctgaagagcctgaagctgaagaacggccccaacgacgtggtgttcagcgtgaccacccagtaccagggcacctgcagatgcgagggcaccatctacctgtggaactgggacgacaaggtgatcatcagcgacatcgacggcaccatcaccagaagcgacaccctgggccacatcctgcccaccctgggcaaggactggacccaccagggcatcgccaagctgtaccacaaggtgagccagaacggctacaagttcctgtactgcagcgccagagccatcggcatggccgacatgaccagaggctacctgcactgggtgaacgagagaggcaccgtgctgccccagggccccctgctgctgagccccagcagcctgttcagcgccctgcacagagaggtgatcgagaagaagcccgagaagttcaaggtgcagtgcctgaccgacatcaagaacctgttcttccccaacaccgagcccttctacgccgccttcggcaacagacccgccgacgtgtacagctacaagcaggtgggcgtgagcctgaacagaatcttcaccgtgaaccccaagggcgagctggtgcaggagcacgccaagaccaacatcagcagctacgtgagactgtgcgaggtggtggaccacgtgttccccctgctgaagagaagccacagcagcgacttcccctgcagcgacaccttcagcaacttcaccttctggagagagcccctgccccccttcgagaaccaggacatccacagcgccagcgcctag

SEQ ID NO: 87240 - DNA, 2799 bp, synthetic construct
  misc_feature 1..2799: note = Description of Artificial Sequence: Synthetic coding sequence
  source 1..2799: mol_type = other DNA
atgagcagagtgcagaccatgaactacgtgggccagctggccggccaggtgttcgtgaccgtgaaggagctgtacaagggcctgaaccccgccaccctgagcggctgcatcgacatcatcgtgatcagacagcccaacggcaacctgcagtgcagccccttccacgtgagattcggcaagatgggcgtgctgagaagcagagagaaggtggtggacatcgagatcaacggcgagagcgtggacctgcacatgaagctgggcgacaacggcgaggccttcttcgtgcaggagaccgacaacgaccaggaggtgatccccatgcacctggccaccagccccatcctgagcgagggcgccagcagaatggagtgccagctgaagagaggcagcgtggacagaatgagaggcctggaccccagcacccccgcccaggtgatcgcccccagcgagacccccagcagcagcagcgtggtgaagaagagaagaaagagaagaagaaagagccagctggacagcctgaagagagacgacaacatgaacaccagcgaggacgaggacatgttccccatcgagatgagcagcgacgaggccatggagctgctggagagcagcagaaccctgcccaacgacatcccccccttccaggacgacatccccgaggagaacctgagcctggccgtgatctacccccagagcgccagctaccccaacagcgacagagagtggagccccacccccagcagcctggtggactgcaagagaaccgccccccacctggccgtggccgccgagggcggcctgagcagcagctgccccccccagagcagcctgttccaccccagcgagagccccagcggcagcagacccagcacccccaagagcgacagcgagctggtgagcaagagcaccgagagaaccggccagaagaaccccgagatgctgtggctgtggggcgagctgccccaggccgccaagagcagcagcccccacaagatgaaggagagcagccccctgagcagcagaaagatctgcgacaagagccacttccaggccatccacagcgagagcagcgacaccttcagcgaccagagccccaccctggtgggcggcgccctgctggaccagaacaagccccagaccgagatgcagttcgtgaacgaggaggacctggagaccctgggcgccgccgcccccctgctgcccatgatcgaggagctgaagccccccagcgccagcgtggtgcagaccgccaacaagaccgacagccccagcagaaagagagacaagagaagcagacacctgggcgccgacggcgtgtacctggacgacctgaccgacatggaccccgaggtggccgccctgtacttccccaagaacggcgaccccagcggcctggccaagcacgccagcgacaacggcgccagaagcgccaaccagagcccccagagcgtgggcagcagcggcgtggacagcggcgtggagagcaccagcgacggcctgagagacctgcccagcatcgccatcagcctgtgcggcggcctgagcgaccacagagagatcaccaaggacgccttcctggagcaggccgtgagctaccagcagttcgtggacaaccccgccatcatcgacgaccccaacctggtggtgaagatcggcagcaagtactacaactggaccaccgccgcccccctgctgctggccatgcaggccttccagaagcccctgcccaaggccaccgtggagagcatcatgagagacaagatgcccaagaagggcggcagatggtggttcagctggagaggcagaaacaccaccatcaaggaggagagcaagcccgagcagtgcctggccggcaaggcccacagcaccggcgagcagcccccccagctgagcctggccaccagagtgaagcacgagagcagcagcagcgacgaggagagagccgccgccaagcccagcaacgccggccacctgcccctgctgcccaacgtgagctacaagaagaccctgagactgaccagcgagcagctgaagagcctgaagctgaagaacggccccaacgacgtggtgttcagcgtgaccacccagtaccagggcacctgcagatgcgagggcaccatctacctgtggaactgggacgacaaggtgatcatcagcgacatcgacggcaccatcaccagaagcgacaccctgggccacatcctgcccaccctgggcaaggactggacccaccagggcatcgccaagctgtaccacaaggtgagccagaacggctacaagttcctgtactgcagcgccagagccatcggcatggccgacatgaccagaggctacctgcactgggtgaacgagagaggcaccgtgctgccccagggccccctgctgctgagccccagcagcctgttcagcgccctgcacagagaggtgatcgagaagaagcccgagaagttcaaggtgcagtgcctgaccgacatcaagaacctgttcttccccaacaccgagcccttctacgccgccttcggcaacagacccgccgacgtgtacagctacaagcaggtgggcgtgagcctgaacagaatcttcaccgtgaaccccaagggcgagctggtgcaggagcacgccaagaccaacatcagcagctacgtgagactgtgcgaggtggtggaccacgtgttccccctgctgaagagaagccacagcagcgacttcccctgcagcgacaccttcagcaacttcaccttctggagagagcccctgccccccttcgagaaccaggacatccacagcgccagcgcctag

SEQ ID NO: 87241 - DNA, 1176 bp, synthetic construct
  misc_feature 1..1176: note = Description of Artificial Sequence: Synthetic coding sequence
  source 1..1176: mol_type = other DNA
atgcaggccttccagaagcccctgcccaagagcagctgcctgagctacctgcacgtgatcctggacgccatcagattctgcttcagcaagatcttcaacgcccagatcgccaccgtggagagcatcatgagagacaagatgcccaagaagggcggcagatggtggttcagctggagaggcagaaacaccaccatcaaggaggagagcaagcccgagcagtgcctggccggcaaggcccacagcaccggcgagcagcccccccagctgagcctggccaccagagtgaagcacgagagcagcagcagcgacgaggagagagccgccgccaagcccagcaacgccggccacctgcccctgctgcccaacgtgagctacaagaagaccctgagactgaccagcgagcagctgaagagcctgaagctgaagaacggccccaacgacgtggtgttcagcgtgaccacccagtaccagggcacctgcagatgcgagggcaccatctacctgtggaactgggacgacaaggtgatcatcagcgacatcgacggcaccatcaccagaagcgacaccctgggccacatcctgcccaccctgggcaaggactggacccaccagggcatcgccaagctgtaccacaaggtgagccagaacggctacaagttcctgtactgcagcgccagagccatcggcatggccgacatgaccagaggctacctgcactgggtgaacgagagaggcaccgtgctgccccagggccccctgctgctgagccccagcagcctgttcagcgccctgcacagagaggtgatcgagaagaagcccgagaagttcaaggtgcagtgcctgaccgacatcaagaacctgttcttccccaacaccgagcccttctacgccgccttcggcaacagacccgccgacgtgtacagctacaagcaggtgggcgtgagcctgaacagaatcttcaccgtgaaccccaagggcgagctggtgcaggagcacgccaagaccaacatcagcagctacgtgagactgtgcgaggtggtggaccacgtgttccccctgctgaagagaagccacagcagcgacttcccctgcagcgacaccttcagcaacttcaccttctggagagagcccctgccccccttcgagaaccaggacatccacagcgccagcgcctag

SEQ ID NO: 87242 - DNA, 87 bp, synthetic construct
  misc_feature 1..87: note = Description of Artificial Sequence: Synthetic coding sequence
  source 1..87: mol_type = other DNA
atgaactacgtgggccagctggccggccaggtgttcgtgaccgtgaaggagctgtacaagggcctgaaccccgccaccctgagctag

SEQ ID NO: 87243 - DNA, 2691 bp, synthetic construct
  misc_feature 1..2691: note = Description of Artificial Sequence: Synthetic coding sequence
  source 1..2691: mol_type = other DNA
atgagcagagtgcagaccatgaactacgtgggccagctggccggccaggtgttcgtgaccgtgaaggagctgtacaagggcctgaaccccgccaccctgagcggctgcatcgacatcatcgtgatcagacagcccaacggcaacctgcagtgcagccccttccacgtgagattcggcaagatgggcgtgctgagaagcagagagaaggtggtggacatcgagatcaacggcgagagcgtggacctgcacatgaagctgggcgacaacggcgaggccttcttcgtgcaggagaccgacaacgaccaggaggtgatccccatgcacctggccaccagccccatcctgagcgagggcgccagcagaatggagtgccagctgaagagaggcagcgtggacagaatgagaggcctggaccccagcacccccgcccaggtgatcgcccccagcgagacccccagcagcagcagcgtggtgaagaagagaagaaagagaagaagaaagagccagctggacagcctgaagagagacgacaacatgaacaccagcgaggacgaggacatgttccccatcgagatgagcagcgacgaggccatggagctgctggagagcagcagaaccctgcccaacgacatcccccccttccaggacgacatccccgaggagaacctgagcctggccgtgatctacccccagagcgccagctaccccaacagcgacagagagtggagccccacccccagccccagcggcagcagacccagcacccccaagagcgacagcgagctggtgagcaagagcaccgagagaaccggccagaagaaccccgagatgctgtggctgtggggcgagctgccccaggccgccaagagcagcagcccccacaagatgaaggagagcagccccctgagcagcagaaagatctgcgacaagagccacttccaggccatccacagcgagagcagcgacaccttcagcgaccagagccccaccctggtgggcggcgccctgctggaccagaacaagccccagaccgagatgcagttcgtgaacgaggaggacctggagaccctgggcgccgccgcccccctgctgcccatgatcgaggagctgaagccccccagcgccagcgtggtgcagaccgccaacaagaccgacagccccagcagaaagagagacaagagaagcagacacctgggcgccgacggcgtgtacctggacgacctgaccgacatggaccccgaggtggccgccctgtacttccccaagaacggcgaccccagcggcctggccaagcacgccagcgacaacggcgccagaagcgccaaccagagcccccagagcgtgggcagcagcggcgtggacagcggcgtggagagcaccagcgacggcctgagagacctgcccagcatcgccatcagcctgtgcggcggcctgagcgaccacagagagatcaccaaggacgccttcctggagcaggccgtgagctaccagcagttcgtggacaaccccgccatcatcgacgaccccaacctggtggtgaagatcggcagcaagtactacaactggaccaccgccgcccccctgctgctggccatgcaggccttccagaagcccctgcccaaggccaccgtggagagcatcatgagagacaagatgcccaagaagggcggcagatggtggttcagctggagaggcagaaacaccaccatcaaggaggagagcaagcccgagcagtgcctggccggcaaggcccacagcaccggcgagcagcccccccagctgagcctggccaccagagtgaagcacgagagcagcagcagcgacgaggagagagccgccgccaagcccagcaacgccggccacctgcccctgctgcccaacgtgagctacaagaagaccctgagactgaccagcgagcagctgaagagcctgaagctgaagaacggccccaacgacgtggtgttcagcgtgaccacccagtaccagggcacctgcagatgcgagggcaccatctacctgtggaactgggacgacaaggtgatcatcagcgacatcgacggcaccatcaccagaagcgacaccctgggccacatcctgcccaccctgggcaaggactggacccaccagggcatcgccaagctgtaccacaaggtgagccagaacggctacaagttcctgtactgcagcgccagagccatcggcatggccgacatgaccagaggctacctgcactgggtgaacgagagaggcaccgtgctgccccagggccccctgctgctgagccccagcagcctgttcagcgccctgcacagagaggtgatcgagaagaagcccgagaagttcaaggtgcagtgcctgaccgacatcaagaacctgttcttccccaacaccgagcccttctacgccgccttcggcaacagacccgccgacgtgtacagctacaagcaggtgggcgtgagcctgaacagaatcttcaccgtgaaccccaagggcgagctggtgcaggagcacgccaagaccaacatcagcagctacgtgagactgtgcgaggtggtggaccacgtgttccccctgctgaagagaagccacagcagcgacttcccctgcagcgacaccttcagcaacttcaccttctggagagagcccctgccccccttcgagaaccaggacatccacagcgccagcgcctag

SEQ ID NO: 87244 - DNA, 291 bp, synthetic construct
  misc_feature 1..291: note = Description of Artificial Sequence: Synthetic coding sequence
  source 1..291: mol_type = other DNA
atgaactacgtgggccagctggccggccaggtgttcgtgaccgtgaaggagctgtacaagggcctgaaccccgccaccctgagcggctgcatcgacatcatcgtgatcagacagcccaacggcaacctgcagtgcagccccttccacgtgagattcggcaagatgggcgtgctgagaagcagagagaaggtggtggacatcgagatcaacggcgagagcgtggacctgcacatgaagctgggcgacaacggcgaggccttcttcgtgcaggagaccgacaacgaccagtag

SEQ ID NO: 87245 - DNA, 2928 bp, synthetic construct
  misc_feature 1..2928: note = Description of Artificial Sequence: Synthetic coding sequence
  source 1..2928: mol_type = other DNA
atgggcgagcaggacggcatcagaagcagcagctgggagaccagccagggcaagagcagccccgacagcgcctggagctggatccccatcatgagagaccccggctggatcagaaacgtgtggagcagcaacatcaacgtgcagaccatgaactacgtgggccagctggccggccaggtgttcgtgaccgtgaaggagctgtacaagggcctgaaccccgccaccctgagcggctgcatcgacatcatcgtgatcagacagcccaacggcaacctgcagtgcagccccttccacgtgagattcggcaagatgggcgtgctgagaagcagagagaaggtggtggacatcgagatcaacggcgagagcgtggacctgcacatgaagctgggcgacaacggcgaggccttcttcgtgcaggagaccgacaacgaccaggaggtgatccccatgcacctggccaccagccccatcctgagcgagggcgccagcagaatggagtgccagctgaagagaggcagcgtggacagaatgagaggcctggaccccagcacccccgcccaggtgatcgcccccagcgagacccccagcagcagcagcgtggtgaagaagagaagaaagagaagaagaaagagccagctggacagcctgaagagagacgacaacatgaacaccagcgaggacgaggacatgttccccatcgagatgagcagcgacgaggccatggagctgctggagagcagcagaaccctgcccaacgacatcccccccttccaggacgacatccccgaggagaacctgagcctggccgtgatctacccccagagcgccagctaccccaacagcgacagagagtggagccccacccccagcagcctggtggactgcaagagaaccgccccccacctggccgtggccgccgagggcggcctgagcagcagctgccccccccagagcagcctgttccaccccagcgagagccccagcggcagcagacccagcacccccaagagcgacagcgagctggtgagcaagagcaccgagagaaccggccagaagaaccccgagatgctgtggctgtggggcgagctgccccaggccgccaagagcagcagcccccacaagatgaaggagagcagccccctgagcagcagaaagatctgcgacaagagccacttccaggccatccacagcgagagcagcgacaccttcagcgaccagagccccaccctggtgggcggcgccctgctggaccagaacaagccccagaccgagatgcagttcgtgaacgaggaggacctggagaccctgggcgccgccgcccccctgctgcccatgatcgaggagctgaagccccccagcgccagcgtggtgcagaccgccaacaagaccgacagccccagcagaaagagagacaagagaagcagacacctgggcgccgacggcgtgtacctggacgacctgaccgacatggaccccgaggtggccgccctgtacttccccaagaacggcgaccccagcggcctggccaagcacgccagcgacaacggcgccagaagcgccaaccagagcccccagagcgtgggcagcagcggcgtggacagcggcgtggagagcaccagcgacggcctgagagacctgcccagcatcgccatcagcctgtgcggcggcctgagcgaccacagagagatcaccaaggacgccttcctggagcaggccgtgagctaccagcagttcgtggacaaccccgccatcatcgacgaccccaacctggtggtgaagatcggcagcaagtactacaactggaccaccgccgcccccctgctgctggccatgcaggccttccagaagcccctgcccaaggccaccgtggagagcatcatgagagacaagatgcccaagaagggcggcagatggtggttcagctggagaggcagaaacaccaccatcaaggaggagagcaagcccgagcagtgcctggccggcaaggcccacagcaccggcgagcagcccccccagctgagcctggccaccagagtgaagcacgagagcagcagcagcgacgaggagagagccgccgccaagcccagcaacgccggccacctgcccctgctgcccaacgtgagctacaagaagaccctgagactgaccagcgagcagctgaagagcctgaagctgaagaacggccccaacgacgtggtgttcagcgtgaccacccagtaccagggcacctgcagatgcgagggcaccatctacctgtggaactgggacgacaaggtgatcatcagcgacatcgacggcaccatcaccagaagcgacaccctgggccacatcctgcccaccctgggcaaggactggacccaccagggcatcgccaagctgtaccacaaggtgagccagaacggctacaagttcctgtactgcagcgccagagccatcggcatggccgacatgaccagaggctacctgcactgggtgaacgagagaggcaccgtgctgccccagggccccctgctgctgagccccagcagcctgttcagcgccctgcacagagaggtgatcgagaagaagcccgagaagttcaaggtgcagtgcctgaccgacatcaagaacctgttcttccccaacaccgagcccttctacgccgccttcggcaacagacccgccgacgtgtacagctacaagcaggtgggcgtgagcctgaacagaatcttcaccgtgaaccccaagggcgagctggtgcaggagcacgccaagaccaacatcagcagctacgtgagactgtgcgaggtggtggaccacgtgttccccctgctgaagagaagccacagcagcgacttcccctgcagcgacaccttcagcaacttcaccttctggagagagcccctgccccccttcgagaaccaggacatccacagcgccagcgcctag

SEQ ID NO: 87246 - DNA, 1380 bp, synthetic construct
  misc_feature 1..1380: note = Description of Artificial Sequence: Synthetic coding sequence
  source 1..1380: mol_type = other DNA
atgagcagagtgcagaccatgaactacgtgggccagctggccggccaggtgttcgtgaccgtgaaggagctgtacaagggcctgaaccccgccaccctgagcggctgcatcgacatcatcgtgatcagacagcccaacggcaacctgcagtgcagccccttccacgtgagattcggcaagatgggcgtgctgagaagcagagagaaggtggtggacatcgagatcaacggcgagagcgtggacctgcacatgaagctgggcgacaacggcgaggccttcttcgtgcaggagaccgacaacgaccaggaggtgatccccatgcacctggccaccagccccatcctgagcgagggcgccagcagaatggagtgccagctgaagagaggcagcgtggacagaatgagaggcctggaccccagcacccccgcccaggtgatcgcccccagcgagacccccagcagcagcagcgtggtgaagaagagaagaaagagaagaagaaagagccagctggacagcctgaagagagacgacaacatgaacaccagcgaggacgaggacatgttccccatcgagatgagcagcgacgaggccatggagctgctggagagcagcagaaccctgcccaacgacatcccccccttccaggacgacatccccgaggagaacctgagcctggccgtgatctacccccagagcgccagctaccccaacagcgacagagagtggagccccacccccagcagcctggtggactgcaagagaaccgccccccacctggccgtggccgccgagggcggcctgagcagcagctgccccccccagagcagcctgttccaccccagcgagagccccagcggcagcagacccagcacccccaagagcgacagcgagctggtgagcaagagcaccgagagaaccggccagaagaaccccgagatgctgtggctgtggggcgagctgccccaggccgccaagagcagcagcccccacaagatgaaggagagcagccccctgagcagcagaaagatctgcgacaagagccacttccaggccatccacagcgagagcagcgacaccttcagcgaccagagccccaccctggtgggcggcgccctgctggaccagaacaagccccagaccgagatgcagttcgtgaacgaggaggacctggagaccctgggcgccgccgcccccctgctgcccatgatcgaggagctgaagccccccagcgccagcgtggtgcagaccgccaacaagaccgacagccccagcagaaagagagacaagagaagcagacacctgggcgccgacggcgtgtacctggacgacctgaccgacatggaccccgaggtggccgccctgtacttccccaagaagtag

SEQ ID NO: 87247 - DNA, 2691 bp, synthetic construct
  misc_feature 1..2691: note = Description of Artificial Sequence: Synthetic coding sequence
  source 1..2691: mol_type = other DNA
atgaactacgtgggccagctggccggccaggtgatcgtgaccgtgaaggagctgtacaagggcatcaaccaggccaccctgagcggctgcatcgacgtgatcgtggtgcagcagcaggacggcagctaccagtgcagccccttccacgtgagattcggcaagctgggcgtgctgagaagcaaggagaaggtgatcgacatcgagatcaacggcagcgccgtggacctgcacatgaagctgggcgacaacggcgaggccttcttcgtggaggagaccgaggaggagtacgagaagctgcccgcctacctggccaccagccccatccccaccgaggaccagttcttcaaggacatcgacacccccctggtgaagagcggcggcgacgagacccccagccagagcagcgacatcagccacgtgctggagaccgagaccatcttcacccccagcagcgtgaagaagaagaagagaagaagaaagaagtacaagcaggacagcaagaaggaggagcaggccgccagcgccgccgccgaggacacctgcgacgtgggcgtgagcagcgacgacgacaagggcgcccaggccgccagaggcagcagcaacgccagcctgaaggaggaggagtgcaaggagcccctgctgttccacagcggcgaccactaccccctgagcgacggcgactggagccccctggagaccacctacccccagaccgcctgccccaagagcgacagcgagctggaggtgaagcccgccgagagcctgctgagaagcgagagccacatggagtggacctggggcggcttccccgagagcaccaaggtgagcaagagagagagaagcgaccaccaccccagaaccgccaccatcacccccagcgagaacacccacttcagagtgatccccagcgaggacaacctgatcagcgaggtggagaaggacgccagcatggaggacaccgtgtgcaccatcgtgaagcccaagcccagagccctgggcacccagatgagcgaccccaccagcgtggccgagctgctggagccccccctggagagcacccagatcagcagcatgctggacgccgaccacctgcccaacgccgccctggccgaggcccccagcgagagcaagcccgccgccaaggtggacagccccagcaagaagaagggcgtgcacaagagaagccagcaccagggccccgacgacatctacctggacgacctgaagggcctggagcccgaggtggccgccctgtacttccccaagagcgagagcgagcccggcagcagacagtggcccgagagcgacaccctgagcggcagccagagcccccagagcgtgggcagcgccgccgccgacagcggcaccgagtgcctgagcgacagcgccatggacctgcccgacgtgaccctgagcctgtgcggcggcctgagcgagaacggcgagatcagcaaggagaagttcatggagcacatcatcacctaccacgagttcgccgagaaccccggcctgatcgacaaccccaacctggtgatcagaatctacaacagatactacaactgggccctggccgcccccatgatcctgagcctgcaggtgttccagaagagcctgcccaaggccaccgtggagagctgggtgaaggacaagatgcccaagaagagcggcagatggtggttctggagaaagagagagagcatgaccaagcagctgcccgagagcaaggagggcaagagcgaggccccccccgccagcgacctgcccagcagcagcaaggagcccgccggcgccagacccgccgagaacgacagcagcagcgacgagggcagccaggagctggaggagagcatcaccgtggaccccatccccaccgagcccctgagccacggcagcaccaccagctacaagaagagcctgagactgagcagcgaccagatcgccaagctgaagctgcacgacggccccaacgacgtggtgttcagcatcaccacccagtaccagggcacctgcagatgcgccggcaccatctacctgtggaactggaacgacaagatcatcatcagcgacatcgacggcaccatcaccaagagcgacgccctgggccagatcctgccccagctgggcaaggactggacccaccagggcatcgccaagctgtaccacagcatcaacgagaacggctacaagttcctgtactgcagcgccagagccatcggcatggccgacatgaccagaggctacctgcactgggtgaacgacaagggcaccatcctgcccagaggccccctgatgctgagccccagcagcctgttcagcgccttccacagagaggtgatcgagaagaagcccgagaagttcaagatcgagtgcctgaacgacatcaagaacctgttcgcccccagcaagcagcccttctacgccgccttcggcaacagacccaacgacgtgtacgcctacacccaggtgggcgtgcccgactgcagaatcttcaccgtgaaccccaagggcgagctgatccaggagagaaccaagggcaacaagagcagctaccacagactgagcgagctggtggagcacgtgttccccctgctgagcaaggagcagaacagcgccttcccctgccccgagttcagcagcttctgctactggagagaccccatccccgaggtggacctggacgacctgagctag

SEQ ID NO: 87248 - DNA, 702 bp, synthetic construct
  misc_feature 1..702: note = Description of Artificial Sequence: Synthetic coding sequence
  source 1..702: mol_type = other DNA
atgaactacgtgggccagctggccggccaggtgatcgtgaccgtgaaggagctgtacaagggcatcaaccaggccaccctgagcggctgcatcgacgtgatcgtggtgcagcagcaggacggcagctaccagtgcagccccttccacgtgagattcggcaagctgggcgtgctgagaagcaaggagaaggtgatcgacatcgagatcaacggcagcgccgtggacctgcacatgaagctgggcgacaacggcgaggccttcttcgtggaggagaccgaggaggagtacgagaagctgcccgcctacctggccaccagccccatccccaccgaggaccagttcttcaaggacatcgacacccccctggtgaagagcggcggcgacgagacccccagccagagcagcgacatcagccacgtgctggagaccgagaccatcttcacccccagcagcgtgaagaagaagaagagaagaagaaagaagtacaagcaggacagcaagaaggaggagcaggccgccagcgccgccgccgaggacacctgcgacgtgggcgtgagcagcgacgacgacaagggcgcccaggccgccagaggcagcagcaacgccagcctgaaggaggaggagtgcaaggagcccctgctgttccacagcggcgaccactaccccctgagcgacggcgactggagccccctggagacctag

SEQ ID NO: 87249 - DNA, 2556 bp, synthetic construct
  misc_feature 1..2556: note = Description of Artificial Sequence: Synthetic coding sequence
  source 1..2556: mol_type = other DNA
atgaactacgtgggccagctggccgagaccgtgttcggcaccgtgaaggagctgtacagaggcctgaaccccgccaccctgagcggcggcatcgacgtgctggtggtgaagcaggtggacggcagcttcagatgcagccccttccacgtgagattcggcaagctgggcgtgctgagaagcagagagaaggtggtggacatcgagctgaacggcgagcccgtggacctgcacatgaagctgggcgacagcggcgaggccttcttcgtgcaggagctggagagcgacgacgagcacgtgccccccggcctgtgcaccagccccatcccctggggcggcctgagcggcttccccagcgacagccagctgggcaccgccagcgagcccgagggcctggtgatggccggcaccgccagcaccggcagaagaaagagaagaagaagaagaaagcccaagcagaaggaggacgccgtggccaccgacagcagccccgaggagctggaggccggcgccgagagcgagctgagcctgcccgagaagctgagacccgagccccccggcgtgcagctggaggagaagagcagcctgcagcccaaggacatctacccctacagcgacggcgagtggcccccccaggccagcctgagcgccggcgagctgaccagccccaagagcgacagcgagctggaggtgagaacccccgagcccagccccctgagagccgagagccacatgcagtgggcctggggcagactgcccaaggtggccagagccgagagacccgagagcagcgtggtgctggagggcagagccggcgccaccagcccccccagaggcggccccagcacccccagcaccagcgtggccggcggcgtggaccccctgggcctgcccatccagcagaccgaggccggcgccgacctgcagcccgacaccgaggaccccaccctggtgggcccccccctgcacacccccgagaccgaggagagcaagacccagagcagcggcgacatgggcctgccccccgccagcaagagctggagctgggccaccctggaggtgcccgtgcccaccggccagcccgagagagtgagcagaggcaagggcagccccaagagaagccagcacctgggccccagcgacatctacctggacgacctgcccagcctggacagcgagaacgccgccctgtacttcccccagagcgacagcggcctgggcgccagaagatggagcgagcccagcagccagaagagcctgagagaccccaaccccgagcacgagcccgagcccaccctggacaccgtggacaccatcgccctgagcctgtgcggcggcctggccgacagcagagacatcagcctggagaagttcaaccagcacagcgtgagctaccaggacctgaccaagaaccccggcctgctggacgaccccaacctggtggtgaagatcaacggcaagcactacaactgggccgtggccgcccccatgatcctgagcctgcaggccttccagaagaacctgcccaagagcaccatggacaagctggagagagagaagatgcccagaaagggcggcagatggtggttcagctggagaagaagagacttcctggccgaggagagaagcgcccagaaggagaagaccgccgccaaggagcagcagggcgagaagaccgaggtgctgagcagcgacgacgacgcccccgacagccccgtgatcctggagatccccagcctgccccccagcaccccccccagcacccccacctacaagaagagcctgagactgagcagcgaccagatcagaagactgaacctgcaggagggcgccaacgacgtggtgttcagcgtgaccacccagtaccagggcacctgcagatgcaaggccaccatctacctgtggaagtgggacgacaaggtggtgatcagcgacatcgacggcaccatcaccaagagcgacgccctgggccacatcctgccccagctgggcaaggactggacccaccagggcatcaccagcctgtaccacaagatccagctgaacggctacaagttcctgtactgcagcgccagagccatcggcatggccgacctgaccaagggctacctgcagtgggtgagcgagggcggctgcagcctgcccaagggccccatcctgctgagccccagcagcctgttcagcgccctgcacagagaggtgatcgagaagaagcccgaggtgttcaaggtggcctgcctgagcgacatccagcagctgttcctgccccacggccagcccttctacgccgccttcggcaacagacccaacgacgtgttcgcctacagacaggtgggcctgcccgagagcagaatcttcaccgtgaaccccagaggcgagctgatccaggagctgatcaagaaccacaagagcacctacgagagactgggcgaggtggtggagctgctgttcccccccgtggccagaggccccagcaccgacctggccaaccccgagtacagcaacttctgctactggagagagcccctgcccgccgtggacctggacaccctggactag

SEQ ID NO: 87250 - DNA, 1242 bp, synthetic construct
  misc_feature 1..1242: note = Description of Artificial Sequence: Synthetic coding sequence
  source 1..1242: mol_type = other DNA
atgggcctgccccccgccagcaagagctggagctgggccaccctggaggtgcccgtgcccaccggccagcccgagagagtgagcagaggcaagggcagccccaagagaagccagcacctgggccccagcgacatctacctggacgacctgcccagcctggacagcgagaacgccgccctgtacttcccccagagcgacagcggcctgggcgccagaagatggagcgagcccagcagccagaagagcctgagagaccccaaccccgagcacgagcccgagcccaccctggacaccgtggacaccatcgccctgagcctgtgcggcggcctggccgacagcagagacatcagcctggagaagttcaaccagcacagcgtgagctaccaggacctgaccaagaaccccggcctgctggacgaccccaacctggtggtgaagatcaacggcaagcactacaactgggccgtggccgcccccatgatcctgagcctgcaggccttccagaagaacctgcccaagagaagcgcccagaaggagaagaccgccgccaaggagcagcagggcgagaagaccgaggtgctgagcagcgacgacgacgcccccgacagccccgtgatcctggagatccccagcctgccccccagcaccccccccagcacccccacctacaagaagagcctgagactgagcagcgaccagatcagaagactgaacctgcaggagggcgccaacgacgtggtgttcagcgtgaccacccagtaccagggcacctgcagatgcaaggccaccatctacctgtggaagtgggacgacaaggtggtgatcagcgacatcgacggcaccatcaccaagagcgacgccctgggccacatcctgccccagctgggcaaggactggacccaccagggcatcaccagcctgtaccacaagatccagctgaacggctacaagttcctgtactgcagcgccagagccatcggcatggccgacctgaccaagggctacctgcagtgggtgagcgagggcggctgcagcctgcccaagggccccatcctgctgagccccagcagcctgttcagcgccctgcacagagaggtgatcgagaagaagcccgaggtgttcaaggtggcctgcctgagcgacatccagcagctgttcctgccccacggccagcccttctacgccgccttcggcaacagacccaacgacgtgttcgcctacagacaggtgggcctgccctag

SEQ ID NO: 87251 - DNA, 813 bp, synthetic construct
  misc_feature 1..813: note = Description of Artificial Sequence: Synthetic coding sequence
  source 1..813: mol_type = other DNA
tgagtgaagatcaacggcaagcactacaactgggccgtggccgcccccatgatcctgagcctgcaggccttccagaagaacctgcccaagagaagcgcccagaaggagaagaccgccgccaaggagcagcagggcgagaagaccgaggtgctgagcagcgacgacgacgcccccgacagccccgtgatcctggagatccccagcctgccccccagcaccccccccagcacccccacctacaagaagagcctgagactgagcagcgaccagatcagaagactgaacctgcaggagggcgccaacgacgtggtgttcagcgtgaccacccagtaccagggcacctgcagatgcaaggccaccatctacctgtggaagtgggacgacaaggtggtgatcagcgacatcgacggcaccatcaccaagagcgacgccctgggccacatcctgccccagctgggcaaggactggacccaccagggcatcaccagcctgtaccacaagatccagctgaacggctacaagttcctgtactgcagcgccagagccatcggcatggccgacctgaccaagggctacctgcagtgggtgagcgagggcggctgcagcctgcccaagggccccatcctgctgagccccagcagcctgttcagcgccctgcacagagaggtgatcgagaagaagcccgaggtgttcaaggtggcctgcctgagcgacatccagcagctgttcctgccccacggccagcccttctacgccgccttcggcaacagacccaacgacgtgttcgcctacagacaggtgggcctgccctag

SEQ ID NO: 87252 - DNA, 531 bp, synthetic construct
  misc_feature 1..531: note = Description of Artificial Sequence: Synthetic coding sequence
  source 1..531: mol_type = other DNA
atgaagcccctgctgctggccgtgagcctgggcctgatcgccgccctgcaggcccaccacctgctggccagcgacgaggagatccaggacgtgagcggcacctggtacctgaaggccatgaccgtggacagagagttccccgagatgaacctggagagcgtgacccccatgaccctgaccaccctggagggcggcaacctggaggccaaggtgaccatgctgatcagcggcagatgccaggaggtgaaggccgtgctggagaagaccgacgagcccggcaagtacaccgccgacggcggcaagcacgtggcctacatcatcagaagccacgtgaaggaccactacatcttctactgcgagggcgagctgcacggcaagcccgtgagaggcgtgaagctggtgggcagagaccccaagaacaacctggaggccctggaggacttcgagaaggccgccggcgccagaggcctgagcaccgagagcatcctgatccccagacagagcgagacctgcagccccggcagcgactag

SEQ ID NO: 87253 - DNA, 531 bp, synthetic construct; identical to SEQ ID NO: 87252
  misc_feature 1..531: note = Description of Artificial Sequence: Synthetic coding sequence
  source 1..531: mol_type = other DNA

SEQ ID NO: 87254 - DNA, 564 bp, synthetic construct
  misc_feature 1..564: note = Description of Artificial Sequence: Synthetic coding sequence
  source 1..564: mol_type = other DNA
atgagacagggcctgctggtgctggccctggtgctggtgctggtgctggtgctggccgccggcagccaggtgcaggagtggtaccccagagagagccacgccctgaactggaacaagttcagcggcttctggtacatcctggccaccgccaccgacgcccagggcttcctgcccgccagagacaagagaaagctgggcgccagcgtggtgaaggtgaacaaggtgggccagctgagagtgctgctggccttcagaagaggccagggctgcggcagagcccagcccagacaccccggcaccagcggccacctgtgggccagcctgagcgtgaagggcgtgaaggccttccacgtgctgagcaccgactacagctacggcctggtgtacctgagactgggcagagccacccagaactacaagaacctgctgctgttccacagacagaacgtgagcagcttccagagcctgaaggagttcatggacgcctgcgacatcctgggcctgagcaaggccgccgtgatcctgcccaaggacgccagcagaacccacaccatcctgccctag

SEQ ID NO: 87255 - DNA, 603 bp, synthetic construct
  misc_feature 1..603: note = Description of Artificial Sequence: Synthetic coding sequence
  source 1..603: mol_type = other DNA
atgagacagggcctgctggtgctggccctggtgctggtgctggtgctggtgctggccgccggcagccaggtgcaggagtggtaccccagagagagccacgccctgaactggaacaagttcagcggcttctggtacatcctggccaccgccaccgacgcccagggcttcctgcccgccagagacaagagaaagctgggcgccagcgtggtgaaggtgaacaaggtgggccagctgagagtgctgctggccttcagaagactgaagggctgccagagccaggaggtgatcctgagaaaggacggcaagaagcccgtgttcggcaacgcctgcgcctacgccgccggccccagagagggccaggagggcgtgaagggcgtgaaggccttccacgtgctgagcaccgactacagctacggcctggtgtacctgagactgggcagagccacccagaactacaagaacctgctgctgttccacagacagaacgtgagcagcttccagagcctgaaggagttcatggacgcctgcgacatcctgggcctgagcaaggccgccgtgatcctgcccaaggacgccagcagaacccacaccatcctgccctag

SEQ ID NO: 87256 - DNA, 273 bp, synthetic construct
  misc_feature 1..273: note = Description of Artificial Sequence: Synthetic coding sequence
  source 1..273: mol_type = other DNA
accttcgagctgagcgacgacggcagattcgaggtgtggaacgccatgaccagaggccagcactgcgacacctggagctacgtgctgatccccgccgcccagcccggccagttcaccgtggaccacggcgtggacaccagagccggctggcccagcagcggcagcgcctgctgggccggcgccggctgctgcctgcccggcagatggaccagcagcagcgcctgggccgagctgagagccagcagaatgaccaccagcagcagccagatgtag

SEQ ID NO: 87257 - DNA, 579 bp, synthetic construct
  misc_feature 1..579: note = Description of Artificial Sequence: Synthetic coding sequence
  source 1..579: mol_type = other DNA
atgagactgctgtgcggcctgtggctgtggctgagcctgctgaaggtgctgcaggcccagacccccacccccctgcccctgcccccccccatgcagagcttccagggcaaccagttccagggcgagtggttcgtgctgggcctggccggcaacagcttcagacccgagcacagagccctgctgaacgccttcaccgccaccttcgagctgagcgacgacggcagattcgaggtgtggaacgccatgaccagaggccagcactgcgacacctggagctacgtgctgatccccgccgcccagcccggccagttcaccgtggaccacggcgtggagcccggcgccgacagagaggagaccagagtggtggacagcgactacacccagttcgccctgatgctgagcagaagacacaccagcagactggccgtgctgagaatcagcctgctgggcagaagctggctgctgccccccggcaccctggaccagttcatctgcctgggcagagcccagggcctgagcgacgacaacatcgtgttccccgacgtgaccggctggagcccccaggccagcgtgtgctag

SEQ ID NO: 87258 - DNA, 597 bp, synthetic construct
  misc_feature 1..597: note = Description of Artificial Sequence: Synthetic coding sequence
  source 1..597: mol_type = other DNA
atgcccctgggcctgctgtggctgggcctggccctgctgggcgccctgcacgcccaggcccaggacagcaccagcgacctgatccccgccccccccctgagcaaggtgcccctgcagcagaacttccaggacaaccagttccagggcaagtggtacgtggtgggcctggccggcaacgccatcctgagagaggacaaggacccccagaagatgtacgccaccatctacgagctgaaggaggacaagagctacaacgtgaccagcgtgctgttcagaaagaagaagtgcgactactggatcagaaccttcgtgcccggctgccagcccggcgagttcaccctgggcaacatcaagagctaccccggcctgaccagctacctggtgagagtggtgagcaccaactacaaccagcacgccatggtgttcttcaagaaggtgagccagaacagagagtacttcaagatcaccctgtacggcagaaccaaggagctgaccagcgagctgaaggagaacttcatcagattcagcaagagcctgggcctgcccgagaaccacatcgtgttccccgtgcccatcgaccagtgcatcgacggctag

SEQ ID NO: 87259 - DNA, 603 bp, synthetic construct
  misc_feature 1..603: note = Description of Artificial Sequence: Synthetic coding sequence
  source 1..603: mol_type = other DNA
atgcccctgggcctgctgtggctgggcctggccctgctgggcgccctgcacgcccaggcccaggacagcaccagcgacctgatccccgccccccccctgagcaaggtgcccctgcagcagaacttccaggacaaccagttccagggcaagtggtacgtggtgggcctggccggcaacgccatcctgagagaggacaaggacccccagaagatgtacgccaccatctacgagctgaaggaggacaagagctacaacgtgaccagcgtgctgttcagagagaaggcccagaagtgcgactactggatcagaaccttcgtgcccggctgccagcccggcgagttcaccctgggcaacatcaagagctaccccggcctgaccagctacctggtgagagtggtgagcaccaactacaaccagcacgccatggtgttcttcaagaaggtgagccagaacagagagtacttcaagatcaccctgtacggcagaaccaaggagctgaccagcgagctgaaggagaacttcatcagattcagcaagagcctgggcctgcccgagaaccacatcgtgttccccgtgcccatcgaccagtgcatcgacggctag

SEQ ID NO: 87260 - DNA, 603 bp, synthetic construct
  misc_feature 1..603: note = Description of Artificial Sequence: Synthetic coding sequence
  source 1..603: mol_type = other DNA
atgcccctgggcctgctgtggctgggcctggccctgctgggcgccctgcacgcccaggcccaggacagcaccagcgacctgatccccgccccccccctgagcaaggtgcccctgcagcagaacttccaggacaaccagttccagggcaagtggtacgtggtgggcctggccggcaacgccatcctgagagaggacaaggacccccagaagatgtacgccaccatctacgagctgaaggaggacaagagctacaacgtgaccagcgtgctgttcagacagtggaagaagaagtgcgactactggatcagaaccttcgtgcccggctgccagcccggcgagttcaccctgggcaacatcaagagctaccccggcctgaccagctacctggtgagagtggtgagcaccaactacaaccagcacgccatggtgttcttcaagaaggtgagccagaacagagagtacttcaagatcaccctgtacggcagaaccaaggagctgaccagcgagctgaaggagaacttcatcagattcagcaagagcctgggcctgcccgagaaccacatcgtgttccccgtgcccatcgaccagtgcatcgacggctag

SEQ ID NO: 87261 - DNA, 597 bp, synthetic construct; identical to SEQ ID NO: 87258
  misc_feature 1..597: note = Description of Artificial Sequence: Synthetic coding sequence
  source 1..597: mol_type = other DNA

SEQ ID NO: 87262 - DNA, 597 bp, synthetic construct
  misc_feature 1..597: note = Description of Artificial Sequence: Synthetic coding sequence
  source 1..597: mol_type = other DNA
atgcccctgggcctgctgtggctgggcctggccctgctgggcgccctgcacgcccaggcccaggacagcaccagcgacctgatccccgccccccccctgagcaaggtgcccctgcagcagaacttccaggacaaccagttccagggcaagtggtacgtggtgggcctggccggcaacgccatcctgagagaggacaaggacccccagaagatgtacgccaccatctacgagctgaaggaggacaagagctacaacgtgaccagcgtgctgttcagaaagaagaagtgcgactactggatcagaaccttcgtgcccggctgccagcccggcgagttcaccctgggcaacatcaagagctaccccggcctgaccagctacctggtgagagtggtgagcaccaactacaaccagcacgccatggtgttcttcaagaaggtgagccagaacagagagtacttcaagatcaccctgtacggcagaaccaaggagctgaccagcgagctgaaggagaacttcatcagattcagcaagagcctgggcctgcccgagaaccacatcgtgttccccgtgcccatcggcaacggccagagcggctag

SEQ ID NO: 87263 - DNA, 492 bp, synthetic construct
  misc_feature 1..492: note = Description of Artificial Sequence: Synthetic coding sequence
  source 1..492: mol_type = other DNA
atgggcggcctgctgctggccgccttcctggccctggtgagcgtgcccagagcccaggccgtgtggctgggcagactggaccccgagcagctgctgggcccctggtacgtgctggccgtggccagcagagagaagggcttcgccatggagaaggacatgaagaacgtggtgggcgtggtggtgaccctgacccccgagaacaacctgagaaccctgagcagccagcacggcctgggcggctgcgaccagagcgtgatggacctgatcaagagaaacagcggctgggtgttcgagaaccccagcatcggcgtgctggagctgtgggtgctggccaccaacttcagagactacgccatcatcttcacccagctggagttcggcgacgagcccttcaacaccgtggagctgtacagcctgaccgagaccgccagccaggaggccatgggcctgttcaccaagtggagcagaagcctgggcttcctgagccagtag

SEQ ID NO: 87264 - DNA, 459 bp, synthetic construct
  misc_feature 1..459: note = Description of Artificial Sequence: Synthetic coding sequence
  source 1..459: mol_type = other DNA
atggaggagctggacagacagaagatcggcggcttctggagagaggtgggcgtggccagcgaccagagcctggtgctgaccgcccccaagagagtggagggcctgttcctgaccctgagcggcagcaacctgaccgtgaaggtggcctacaacagcagcggcagctgcgagatcgagaagatcgtgggcagcgagatcgacagcaccggcaagttcgccttccccggccacagagagatccacgtgctggacaccgactacgagggctacgccatcctgagagtgagcctgatgtggagaggcagaaacttcagagtgctgaagtacttcaccagaagcctggaggacaaggacagactgggcttctggaagttcagagagctgaccgccgacaccggcctgtacctggccgccagacccggcagatgcgccgagctgctgaaggaggagctgatctag

SEQ ID NO: 87265 - DNA, 531 bp, synthetic construct
  misc_feature 1..531: note = Description of Artificial Sequence: Synthetic coding sequence
  source 1..531: mol_type = other DNA
atggccctgctgctgctgagcctgggcctgagcctgatcgccgcccaggagttcgacccccacaccgtgatgcagagaaactacaacgtggccagagtgagcggcgtgtggtacagcatcttcatggccagcgacgacctgaacagaatcaaggagaacggcgacctgagagtgttcgtgagaaacatcgagcacctgaagaacggcagcctgatcttcgacttcgagtacatggtgcagggcgagtgcgtggccgtggtggtggtgtgcgagaagaccgagaagaacggcgagtacagcatcaactacgagggccagaacaccgtggccgtgagcgagaccgactacagactgttcatcaccttccacctgcagaacttcagaaacggcaccgagacccacaccctggccctgtacgagacctgcgagaagtacggcctgggcagccagaacatcatcgacctgaccaacaaggacccctgctacagcaagcactacagaagcccccccagaccccccatgagatggtag

SEQ ID NO: 87266 - DNA, 1119 bp, synthetic construct
  misc_feature 1..1119: note = Description of Artificial Sequence: Synthetic coding sequence
  source 1..1119: mol_type = other DNA
atgagcctgagatgcggcgacgccgccagaaccctgggccccagagtgttcggcagatacttctgcagccccgtgagacccctgagcagcctgcccgacaagaagaaggagctgctgcagaacggccccgacctgcaggacttcgtgagcggcgacctggccgacagaagcacctgggacgagtacaagggcaacctgaagagacagaagggcgagagactgagactgcccccctggctgaagaccgagatccccatgggcaagaactacaacaagctgaagaacaccctgagaaacctgaacctgcacaccgtgtgcgaggaggccagatgccccaacatcggcgagtgctggggcggcggcgagtacgccaccgccaccgccaccatcatgctgatgggcgacacctgcaccagaggctgcagattctgcagcgtgaagaccgccagaaaccccccccccctggacgccagcgagccctacaacaccgccaaggccatcgccgagtggggcctggactacgtggtgctgaccagcgtggacagagacgacatgcccgacggcggcgccgagcacatcgccaagaccgtgagctacctgaaggagagaaaccccaagatcctggtggagtgcctgacccccgacttcagaggcgacctgaaggccatcgagaaggtggccctgagcggcctggacgtgtacgcccacaacgtggagaccgtgcccgagctgcagagcaaggtgagagaccccagagccaacttcgaccagagcctgagagtgctgaagcacgccaagaaggtgcagcccgacgtgatcagcaagaccagcatcatgctgggcctgggcgagaacgacgagcaggtgtacgccaccatgaaggccctgagagaggccgacgtggactgcctgaccctgggccagtacatgcagcccaccagaagacacctgaaggtggaggagtacatcacccccgagaagttcaagtactgggagaaggtgggcaacgagctgggcttccactacaccgccagcggccccctggtgagaagcagctacaaggccggcgagttcttcctgaagaacctggtggccaagagaaagaccaaggacctgtag

SEQ ID NO: 87267 - DNA, 969 bp, synthetic construct
  misc_feature 1..969: note = Description of Artificial Sequence: Synthetic coding sequence
  source 1..969: mol_type = other DNA
atgagcctgagatgcggcgacgccgccagaaccctgggccccagagtgttcggcagatacttctgcagccccgtgagacccctgagcagcctgcccgacaagaagaaggagctgctgcagaacggccccgacctgcaggacttcgtgagcggcgacctggccgacagaagcacctgggacgagtacaagggcaacctgaagagacagaagggcgagagactgagactgcccccctggctgaagaccgagatccccatgggcaagaactacaacaagctgaagaacaccctgagaaacctgaacctgcacaccgtgtgcgaggaggccagatgccccaacatcggcgagtgctggggcggcggcgagtacgccaccgccaccgccaccatcatgctgatgggcgacacctgcaccagaggctgcagattctgcagcgtgaagaccgccagaaaccccccccccctggacgccagcgagccctacaacaccgccaaggccatcgccgagtggggcctggactacgtggtgctgaccagcgtggacagagacgacatgcccgacggcggcgccgagcacatcgccaagaccgtgagctacctgaaggagagaaaccccaagatcctggtggagtgcctgacccccgacttcagaggcgacctgaaggccatcgagaaggtggccctgagcggcctggacgtgtacgcccacaacgtggagaccgtgcccgagctgcagagcaaggtgagagaccccagagccaacttcgaccagagcctgagagtgctgaagcacgccaagaaggtgcagcccgacgtgatcagcaagaccagcatcatgctgggcctgggcgagaacgacgagcaggtgtacgccaccatgaaggccctgagagaggccgacgtggactgcctgaccctgggccagtacatgcagcccaccagaagacacctgaaggtgaacttcagctag

SEQ ID NO: 87268 - DNA, 603 bp, synthetic construct
  misc_feature 1..603: note = Description of Artificial Sequence: Synthetic coding sequence
  source 1..603: mol_type = other DNA
atggccagcagcctgacctgcaccggcgtgatctgggccctgctgagcttcctgtgcgccgccaccagctgcgtgggcttcttcatgccctactggctgtggggcagccagctgggcaagcccgtgagcttcggcaccttcagaagatgcagctaccccgtgcacgacgagagcagacagatgatggtgatggtggaggagtgcggcagatacgccagcttccagggcatccccagcgccgagtggagaatctgcaccatcgtgaccggcctgggctgcggcctgctgctgctggtggccctgaccgccctgatgggctgctgcgtgagcgacctgatcagcagaaccgtgggcagagtggccggcggcatccagttcctgggcggcctgctgatcggcgccggctgcgccctgtaccccctgggctgggacagcgaggaggtgagacagacctgcggctacaccagcggccagttcgacctgggcaagtgcgagatcggctgggcctactactgcaccggcgccggcgccaccgccgccatgctgctgtgcacctggctggcctgcttcagcggcaagaagcagaagcactacccctactag

SEQ ID NO: 87269 - DNA, 663 bp, synthetic construct
  misc_feature 1..663: note = Description of Artificial Sequence: Synthetic coding sequence
  source 1..663: mol_type = other DNA
atgagaagcagcctgaccatggtgggcaccctgtgggccttcctgagcctggtgaccgccgtgaccagcagcaccagctacttcctgccctactggctgttcggcagccagatgggcaagcccgtgagcttcagcaccttcagaagatgcaactaccccgtgagaggcgagggccacagcctgatcatggtggaggagtgcggcagatacgccagcttcaacgccatccccagcctggcctggcagatgtgcaccgtggtgaccggcgccggctgcgccctgctgctgctggtggccctggccgccgtgctgggctgctgcatggaggagctgatcagcagaatgatgggcagatgcatgggcgccgcccagttcgtgggcggcctgctgatcagcagcggctgcgccctgtaccccctgggctggaacagccccgagatcatgcagacctgcggcaacgtgagcaaccagttccagctgggcacctgcagactgggctgggcctactactgcgccggcggcggcgccgccgccgccatgctgatctgcacctggctgagctgcttcgccggcagaaaccccaagcccgtgatcctggtggagagcatcatgagaaacaccaacagctacgccatggagctggaccactgcctgaagccctag

SEQ ID NO: 87270 - DNA, 564 bp, synthetic construct
  misc_feature 1..564: note = Description of Artificial Sequence: Synthetic coding sequence
  source 1..564: mol_type = other DNA
atgagaagcagcctgaccatggtgggcaccctgtgggccttcctgagcctggtgaccgccgtgaccagcagcaccagctacttcctgccctactggctgttcggcagccagatgggcaagcccgtgagcttcagcaccttcagaagatgcaactaccccgtgagaggcgagggccacagcctgatcatggtggaggagtgcggcagatacgccagcttcaacgccatccccagcctggcctggcagatgtgcaccgtggtgaccggcgccggctgcgccctgctgctgctggtggccctggccgccgtgctgggctgctgcatggaggagctgatcagcagaatgatgggcagatgcatgggcgccgcccagttcgtgggcggcacctgcagactgggctgggcctactactgcgccggcggcggcgccgccgccgccatgctgatctgcacctggctgagctgcttcgccggcagaaaccccaagcccgtgatcctggtggagagcatcatgagaaacaccaacagctacgccatggagctggaccactgcctgaagccctag

SEQ ID NO: 87271 - DNA, 687 bp, synthetic construct
  misc_feature 1..687: note = Description of Artificial Sequence: Synthetic coding sequence
  source 1..687: mol_type = other DNA
atgtgccacgtgatcgtgacctgcagaagcatgctgtggaccctgctgagcatcgtggtggccttcgccgagctgatcgccttcatgagcgccgactggctgatcggcaaggccagaagcagaggcggcgtggagcccgccggccccggcggcggcagccccgagccctaccaccccaccctgggcatctacgccagatgcatcagaaaccccggcgtgcagcacttccagagagacaccctgtgcggcccctacgccgagagcttcggcgagatcgccagcggcttctggcaggccaccgccatcttcctggccgtgggcatcttcatcctgtgcatggtggccctggtgagcgtgttcaccatgtgcgtgcagagcatcatgaagaagagcatcttcaacgtgtgcggcctgctgcagggcatcgccggcctgttcctgatcctgggcctgatcctgtaccccgccggctggggctgccagaaggccatcgactactgcggccactacgccagcgcctacaagcccggcgactgcagcctgggctgggccttctacaccgccatcggcggcaccgtgctgaccttcatctgcgccgtgttcagcgcccaggccgagatcgccaccagcagcgacaaggtgcaggaggagatcgaggagggcaagaacctgatctgcctgctgtag

SEQ ID NO: 87272 - DNA, 687 bp, synthetic construct; identical to SEQ ID NO: 87271
  misc_feature 1..687: note = Description of Artificial Sequence: Synthetic coding sequence
  source 1..687: mol_type = other DNA

SEQ ID NO: 87273 - DNA, 669 bp, synthetic construct
  misc_feature 1..669: note = Description of Artificial Sequence: Synthetic coding sequence
  source 1..669: mol_type = other DNA
atgctgcccgcccaggaggccgccaagctgtaccacaccaactacgtgagaaacagcagagccatcggcgtgctgtgggccatcttcaccatctgcttcgccatcgtgaacgtggtgtgcttcatccagccctactggatcggcgacggcgtggacaccccccaggccggctacttcggcctgttccactactgcatcggcaacggcttcagcagagagctgacctgcagaggcagcttcaccgacttcagcaccctgcccagcggcgccttcaaggccgccagcttcttcatcggcctgagcatgatgctgatcatcgcctgcatcatctgcttcaccctgttcttcttctgcaacaccgccaccgtgtacaagatctgcgcctggatgcagctgaccagcgccgcctgcctggtgctgggctgcatgatcttccccgacggctgggacagcgacgaggtgaagagaatgtgcggcgagaagaccgacaagtacaccctgggcgcctgcagcgtgagatgggcctacatcctggccatcatcggcatcctggacgccctgatcctgagcttcctggccttcgtgctgggcaacagacaggacagcctgatggccgaggagctgaaggccgagaacaaggtgctgctgagccagtacagcctggagtag

SEQ ID NO: 87274 - DNA, 711 bp, synthetic construct
  misc_feature 1..711: note = Description of Artificial Sequence: Synthetic coding sequence
  source 1..711: mol_type = other DNA
atgcccggcgccgccgccgccgccgccgccgccgccgccgccatgctgcccgcccaggaggccgccaagctgtaccacaccaactacgtgagaaacagcagagccatcggcgtgctgtgggccatcttcaccatctgcttcgccatcgtgaacgtggtgtgcttcatccagccctactggatcggcgacggcgtggacaccccccaggccggctacttcggcctgttccactactgcatcggcaacggcttcagcagagagctgacctgcagaggcagcttcaccgacttcagcaccctgcccagcggcgccttcaaggccgccagcttcttcatcggcctgagcatgatgctgatcatcgcctgcatcatctgcttcaccctgttcttcttctgcaacaccgccaccgtgtacaagatctgcgcctggatgcagctgaccagcggcgactgcctggtgctgttcgacctgcacttccccgacggctgggacagcgacgaggtgaagagaatgtgcggcgagaagaccgacaagtacaccctgggcgcctgcagcgtgagatgggcctacatcctggccatcatcggcatcctggacgccctgatcctgagcttcctggccttcgtgctgggcaacagacaggacagcctgatggccgaggagctgaaggccgagaacaaggtgctgctgagccagtacagcctggagtag

SEQ ID NO: 87275 - DNA, 699 bp, synthetic construct
  misc_feature 1..699: note = Description of Artificial Sequence: Synthetic coding sequence
  source 1..699: mol_type = other DNA
atgcccggcgccgccgccgccgccgccgccgccgccgccgccatgctgcccgcccaggaggccgccaagctgtaccacaccaactacgtgagaaacagcagagccatcggcgtgctgtgggccatcttcaccatctgcttcgccatcgtgaacgtggtgtgcttcatccagccctactggatcggcgacggcgtggacaccccccaggccggctacttcggcctgttccactactgcatcggcaacggcttcagcagagagctgacctgcagaggcagcttcaccgacttcagcaccctgcccagcggcgccttcaaggccgccagcttcttcatcggcctgagcatgatgctgatcatcgcctgcatcatctgcttcaccctgttcttcttctgcaacaccgccaccgtgtacaagatctgcgcctggatgcagctgaccagcggcgactgcctggtgctgttcgacctgcacttccccgacggctgggacagcgacgaggtgaagagaatgtgcggcgagaagaccgacaagtacaccctgggcgcctgcagcgtgagatgggcctacatcctggccatcatcggcatcctggacgccctgatcctgagcttcctggccttcgtgctgggcaacagacaggacagcctgatggccgaggagctgaaggccgagaacaaggacgacggcaacgcctag

SEQ ID NO: 87276 - DNA, 660 bp, synthetic construct
  misc_feature 1..660: note = Description of Artificial Sequence: Synthetic coding sequence
  source 1..660: mol_type = other DNA
atggtgaagctgctgcccgcccaggaggccgccaagatctaccacaccaactacgtgagaaacagcagagccgtgggcgtgatgtggggcaccctgaccatctgcttcagcgtgctggtgatggccctgttcatccagccctactggatcggcgacagcgtgaacaccccccaggccggctacttcggcctgttcagctactgcgtgggcaacgtgctgagcagcgagctgatctgcaagggcggccccctggacttcagcagcatccccagcagagccttcaagaccgccatgttcttcgtggccctgggcatgttcctgatcatcggcagcatcatctgcttcagcctgttcttcatctgcaacaccgccaccgtgtacaagatctgcgcctggatgcagctggccgccgccaccggcctgatgatcggctgcctggtgtaccccgacggctgggacagcagcgaggtgagaagaatgtgcggcgagcagaccggcaagtacaccctgggccactgcaccatcagatgggccttcatgctggccatcctgagcatcggcgacgccctgatcctgagcttcctggccttcgtgctgggctacagacaggacaagctgctgcccgacgactacaaggccgacggcaccgaggaggtgtag

SEQ ID NO: 87277 - DNA, 660 bp, synthetic construct; identical to SEQ ID NO: 87276
  misc_feature 1..660: note = Description of Artificial Sequence: Synthetic coding sequence
  source 1..660: mol_type = other DNA

SEQ ID NO: 87278 - DNA, 675 bp, synthetic construct
  misc_feature 1..675: note = Description of Artificial Sequence: Synthetic coding sequence
  source 1..675: mol_type = other DNA
atgagcgtgttcggcaagctgttcggcgccggcggcggcaaggccggcaagggcggccccaccccccaggaggccatccagagactgagagacaccgaggagatgctgagcaagaagcaggagttcctggagaagaagatcgagcaggagctgaccgccgccaagaagcacggcaccaagaacaagagagccgccctgcaggccctgaagagaaagaagagatacgagaagcagctggcccagatcgacggcaccctgagcaccatcgagttccagagagaggccctggagaacgccaacaccaacaccgaggtgctgaagaacatgggctacgccgccaaggccatgaaggccgcccacgacaacatggacatcgacaaggtggacgagctgatgcaggacatcgccgaccagcaggagctggccgaggagatcagcaccgccatcagcaagcccgtgggcttcggcgaggagttcgacgaggacgagctgatggccgagctggaggagctggagcaggaggagctggacaagaacctgctggagatcagcggccccgagaccgtgcccctgcccaacgtgcccagcatcgccctgcccagcaagcccgccaagaagaaggaggaggaggacgacgacatgaaggagctggagaactgggccggcagcatgtag

SEQ ID NO: 87279 - DNA, 1434 bp, synthetic construct
  misc_feature 1..1434: note = Description of Artificial Sequence: Synthetic coding sequence
  source 1..1434: mol_type = other DNA
atgggcgccctggccagagccctgcccagcatcctgctggccctgctgctgaccagcacccccgaggccctgggcgccaaccccggcctggtggccagaatcaccgacaagggcctgcagtacgccgcccaggagggcctgctggccctgcagagcgagctgctgagaatcaccctgcccgacttcaccggcgacctgagaatcccccacgtgggcagaggcagatacgagttccacagcctgaacatccacagctgcgagctgctgcacagcgccctgagacccgtgcccggccagggcctgagcctgagcatcagcgacagcagcatcagagtgcagggcagatggaaggtgagaaagagcttcttcaagctgcagggcagcttcgacgtgagcgtgaagggcatcagcatcagcgtgaacctgctgctgggcagcgagagcagcggcagacccaccgtgaccgccagcagctgcagcagcgacatcgccgacgtggaggtggacatgagcggcgacctgggctggctgctgaacctgttccacaaccagatcgagagcaagttccagaaggtgctggagagcagaatctgcgagatgatccagaagagcgtgagcagcgacctgcagccctacctgcagaccctgcccgtgaccaccgagatcgacagcttcgccgacatcgactacagcctggtggaggcccccagagccaccgcccagatgctggaggtgatgttcaagggcgagatcttccacagaaaccacagaagccccgtgaccctgctggccgccgtgatgagcctgcccgaggagcacaacaagatggtgtacttcgccatcagcgactacgtgttcaacaccgccagcctggtgtaccacgaggagggctacctgaacttcagcatcaccgacgacatgatcccccccgacagcaacatcagactgaccaccaagagcttcagacccttcgtgcccagactggccagactgtaccccaacatgaacctggagctgcagggcagcgtgcccagcgcccccctgctgaacttcagccccggcaacctgagcgtggacccctacatggagatcgacgccttcgtgctgctgcccagcagcagcaaggagcccgtgttcagactgagcgtggccaccaacgtgagcgccaccctgaccttcaacaccagcaagatcaccggcttcctgaagcccggcaaggtgaaggtggagctgaaggagagcaaggtgggcctgttcaacgccgagctgctggaggccctgctgaactactacatcctgaacaccttctaccccaagttcaacgacaagctggccgagggcttccccctgcccctgctgaagagagtgcagctgtacgacctgggcctgcagatccacaaggacttccccagcagaagagaccaccccccctag

SEQ ID NO: 87280 - DNA, 486 bp, synthetic construct
  misc_feature 1..486: note = Description of Artificial Sequence: Synthetic coding sequence
  source 1..486: mol_type = other DNA
atgagcgtgcccggcccctaccaggccgccaccggccccagcagcgcccccagcgccccccccagctacgaggagaccgtggccgtgaacagctactaccccaccccccccgcccccatgcccggccccaccaccggcctggtgaccggccccgacggcaagggcatgaacccccccagctactacacccagcccgcccccatccccaacaacaaccccatcaccgtgcagaccgtgtacgtgcagcaccccatcaccttcctggacagacccatccagatgtgctgccccagctgcaacaagatgatcgtgagccagctgagctacaacgccggcgccctgacctggctgagctgcggcagcctgtgcctgctgggctgcatcgccggctgctgcttcatccccttctgcgtggacgccctgcaggacgtggaccactactgccccaactgcagagccctgctgggcacctacaagagactgtag

SEQ ID NO: 87281 - DNA, 687 bp, synthetic construct
  misc_feature 1..687: note = Description of Artificial Sequence: Synthetic coding sequence
  source 1..687: mol_type = other DNA
atgagcgtgcccggcccctaccaggccgccaccggccccagcagcgcccccagcgccccccccagctacgaggagaccgtggccgtgaacagctactaccccaccccccccgcccccatgcccggccccaccaccggcctggtgaccggccccgacggcaagggcatgaacccccccagctactacacccagcccgcccccatccccaacaacaaccccatcaccgtgcagaccgtgtacgtgcagcaccccatcaccttcctggacagacccatccagatgtgctgccccagctgcaacaagatgatcgtgagccagctgagctacaacgccggcgccctgacctggctgagctgcggcagcctgtgcctgctgggcgtgcacagcggcctgctgctgcaccccctgctgagaggctgccccgccggcagaggccccctgctgagccagctgcagagcagccccggccacctgcaggccttcgtgggcctgagccagacctggagagagcccggcgccgccggcagccccttccacctgagcagcagcttcacccccggcggcggcagcgccctggtggtgagccccctgcagggcgcccacctgcacgtgttcttctggggcgagtacgtggccaagctgaccaacctgcagacccccgagatcgccgcctggagcagagcctag

SEQ ID NO: 87282 - DNA, 459 bp, synthetic construct
  misc_feature 1..459: note = Description of Artificial Sequence: Synthetic coding sequence
  source 1..459: mol_type = other DNA
atgagcgtgcccggcccctaccaggccgccaccggccccagcagcgcccccagcgccccccccagctacgaggagaccgtggccgtgaacagctactaccccaccccccccgcccccatgcccggccccaccaccggcctggtgaccggccccgacggcaagggcatgaacccccccagctactacacccagcccgcccccatccccaacaacaaccccatcaccgtgcagaccgtgtacgtgcagcaccccatcaccttcctggacagacccatccagatgtgctgccccagctgcaacaagatgatcgtgagccagctgagctacaacgccggcgccctgacctggctgagctgcggcagcctgtgcctgctgggccaggagtgcagcggcaccatcgtggccctgagaagcttcgacctgctgggcagctgcaacccccccagcagcgccagctag

SEQ ID NO: 87283 - DNA, 486 bp, synthetic construct; identical to SEQ ID NO: 87280
  misc_feature 1..486: note = Description of Artificial Sequence: Synthetic coding sequence
  source 1..486: mol_type = other DNA

SEQ ID NO: 87284 - DNA, 6123 bp, synthetic construct
  misc_feature 1..6123: note = Description of Artificial Sequence: Synthetic coding sequence
  source 1..6123: mol_type = other DNA
atggagcacaaggaggtggtgctgctgctgctgctgttcctgaagagcgccgcccccgagcagagccacgtggtgcaggactgctaccacggcgacggccagagctacagaggcacctacagcaccaccgtgaccggcagaacctgccaggcctggagcagcatgaccccccaccagcacaacagaaccaccgagaactaccccaacgccggcctgatcatgaactactgcagaaaccccgacgccgtggccgccccctactgctacaccagagaccccggcgtgagatgggagtactgcaacctgacccagtgcagcgacgccgagggcaccgccgtggccccccccaccgtgacccccgtgcccagcctggaggcccccagcgagcaggcccccaccgagcagagacccggcgtgcaggagtgctaccacggcaacggccagagctacagaggcacctacagcaccaccgtgaccggcagaacctgccaggcctggagcagcatgaccccccacagccacagcagaacccccgagtactaccccaacgccggcctgatcatgaactactgcagaaaccccgacgccgtggccgccccctactgctacaccagagaccccggcgtgagatgggagtactgcaacctgacccagtgcagcgacgccgagggcaccgccgtggccccccccaccgtgacccccgtgcccagcctggaggcccccagcgagcaggcccccaccgagcagagacccggcgtgcaggagtgctaccacggcaacggccagagctacagaggcacctacagcaccaccgtgaccggcagaacctgccaggcctggagcagcatgaccccccacagccacagcagaacccccgagtactaccccaacgccggcctgatcatgaactactgcagaaaccccgacgccgtggccgccccctactgctacaccagagaccccggcgtgagatgggagtactgcaacctgacccagtgcagcgacgccgagggcaccgccgtggccccccccaccgtgacccccgtgcccagcctggaggcccccagcgagcaggcccccaccgagcagagacccggcgtgcaggagtgctaccacggcaacggccagagctacagaggcacctacagcaccaccgtgaccggcagaacctgccaggcctggagcagcatgaccccccacagccacagcagaacccccgagtactaccccaacgccggcctgatcatgaactactgcagaaaccccgacgccgtggccgccccctactgctacaccagagaccccggcgtgagatgggagtactgcaacctgacccagtgcagcgacgccgagggcaccgccgtggccccccccaccgtgacccccgtgcccagcctggaggcccccagcgagcaggcccccaccgagcagagacccggcgtgcaggagtgctaccacggcaacggccagagctacagaggcacctacagcaccaccgtgaccggcagaacctgccaggcctggagcagcatgaccccccacagccacagcagaacccccgagtactaccccaacgccggcctgatcatgaactactgcagaaaccccgacgccgtggccgccccctactgctacaccagagaccccggcgtgagatgggagtactgcaacctgacccagtgcagcgacgccgagggcaccgccgtggccccccccaccgtgacccccgtgcccagcctggaggcccccagcgagcaggcccccaccgagcagagacccggcgtgcaggagtgctaccacggcaacggccagagctacagaggcacctacagcaccaccgtgaccggcagaacctgccaggcctggagcagcatgaccccccacagccacagcagaacccccgagtactaccccaacgccggcctgatcatgaactactgcagaaaccccgacgccgtggccgccccctactgctacaccagagaccccggcgtgagatgggagtactgcaacctgacccagtgcagcgacgccgagggcaccgccgtggccccccccaccgtgacccccgtgcccagcctggaggcccccagcgagcaggcccccaccgagcagagacccggcgtgcaggagtgctaccacggcaacggccagagctacagaggcacctacagcaccaccgtgaccggcagaacctgccaggcctggagcagcatgaccccccacagccacagcagaacccccgagtactaccccaacgccggcctgatcatgaactactgcagaaaccccgacgccgtggccgccccctactgctacaccagagaccccggcgtgagatgggagtactgcaacctgacccagtgcagcgacgccgagggcaccgccgtggccccccccaccgtgacccccgtgcccagcctggaggcccccagcgagcaggcccccaccgagcagagacccggcgtgcaggagtgctaccacggcaacggccagagctacagaggcacctacagcaccaccgtgaccggcagaacctgccaggcctggagcagcatgaccccccacagccacagcagaacccccgagtactaccccaacgccggcctgatcatgaactactgcagaaaccccgaccccgtggccgccccctactgctacaccagagaccccagcgtgagatgggagtactgcaacctgacccagtgcagcgacgccgagggcaccgccgtggccccccccaccatcacccccatccccagcctggaggcccccagcgagcaggcccccaccgagcagagacccggcgtgcaggagtgctaccacggcaacggccagagctaccagggcacctacttcatcaccgtgaccggcagaacctgccaggcctggagcagcatgaccccccacagccacagcagaacccccgcctactaccccaacgccggcctgatcaagaactactgcagaaaccccgaccccgtggccgccccctggtgctacaccaccgaccccagcgtgagatgggagtactgcaacctgaccagatgcagcgacgccgagtggaccgccttcgtgccccccaacgtgatcctggcccccagcctggaggccttcttcgagcaggccctgaccgaggagacccccggcgtgcaggactgctactaccactacggccagagctacagaggcacctacagcaccaccgtgaccggcagaacctgccaggcctggagcagcatgaccccccaccagcacagcagaacccccgagaactaccccaacgccggcctgaccagaaactactgcagaaaccccgacgccgagatcagaccctggtgctacaccatggaccccagcgtgagatgggagtactgcaacctgacccagtgcctggtgaccgagagcagcgtgctggccaccctgaccgtggtgcccgaccccagcaccgaggccagcagcgaggaggcccccaccgagcagagccccggcgtgcaggactgctaccacggcgacggccagagctacagaggcagcttcagcaccaccgtgaccggcagaacctgccagagctggagcagcatgaccccccactggcaccagagaaccaccgagtactaccccaacggcggcctgaccagaaactactgcagaaaccccgacgccgagatcagcccctggtgctacaccatggaccccaacgtgagatgggagtactgcaacctgacccagtgccccgtgaccgagagcagcgtgctggccaccagcaccgccgtgagcgagcaggcccccaccgagcagagccccaccgtgcaggactgctaccacggcgacggccagagctacagaggcagcttcagcaccaccgtgaccggcagaacctgccagagctggagcagcatgaccccccactggcaccagagaaccaccgagtactaccccaacggcggcctgaccagaaactactgcagaaaccccgacgccgagatcagaccctggtgctacaccatggaccccagcgtgagatgggagtactgcaacctgacccagtgccccgtgatggagagcaccctgctgaccacccccaccgtggtgcccgtgcccagcaccgagctgcccagcgaggaggcccccaccgagaacagcaccggcgtgcaggactgctacagaggcgacggccagagctacagaggcaccctgagcaccaccatcaccggcagaacctgccagagctggagcagcatgaccccccactggcacagaagaatccccctgtactaccccaacgccggcctgaccagaaactactgcagaaaccccgacgccgagatcagaccctggtgctacaccatggaccccagcgtgagatgggagtactgcaacctgaccagatgccccgtgaccgagagcagcgtgctgaccacccccaccgtggcccccgtgcccagcaccgaggcccccagcgagcaggccccccccgagaagagccccgtggtgcaggactgctaccacggcgacggcagaagctacagaggcatcagcagcaccaccgtgaccggcagaacctgccagagctggagcagcatgatcccccactggcaccagagaacccccgagaactaccccaacgccggcctgaccgagaactactgcagaaaccccgacagcggcaagcagccctggtgctacaccaccgacccctgcgtgagatgggagtactgcaacctgacccagtgcagcgagaccgagagcggcgtgctggagacccccaccgtggtgcccgtgcccagcatggaggcccacagcgaggccgcccccaccgagcagacccccgtggtgagacagtgctaccacggcaacggccagagctacagaggcaccttcagcaccaccgtgaccggcagaacctgccagagctggagcagcatgaccccccacagacaccagagaacccccgagaactaccccaacgacggcctgaccatgaactactgcagaaaccccgacgccgacaccggcccctggtgcttcaccatggaccccagcatcagatgggagtactgcaacctgaccagatgcagcgacaccgagggcaccgtggtggccccccccaccgtgatccaggtgcccagcctgggcccccccagcgagcaggactgcatgttcggcaacggcaagggctacagaggcaagaaggccaccaccgtgaccggcaccccctgccaggagtgggccgcccaggagccccacagacacagcaccttcatccccggcaccaacaagtgggccggcctggagaagaactactgcagaaaccccgacggcgacatcaacggcccctggtgctacaccatgaaccccagaaagctgttcgactactgcgacatccccctgtgcgccagcagcagcttcgactgcggcaagccccaggtggagcccaagaagtgccccggcagcatcgtgggcggctgcgtggcccacccccacagctggccctggcaggtgagcctgagaaccagattcggcaagcacttctgcggcggcaccctgatcagccccgagtgggtgctgaccgccgcccactgcctgaagaagagcagcagacccagcagctacaaggtgatcctgggcgcccaccaggaggtgaacctggagagccacgtgcaggagatcgaggtgagcagactgttcctggagcccacccaggccgacatcgccctgctgaagctgagcagacccgccgtgatcaccgacaaggtgatgcccgcctgcctgcccagccccgactacatggtgaccgccagaaccgagtgctacatcaccggctggggcgagacccagggcaccttcggcaccggcctgctgaaggaggcccagctgctggtgatcgagaacgaggtgtgcaaccactacaagtacatctgcgccgagcacctggccagaggcaccgacagctgccagggcgacagcggcggccccctggtgtgcttcgagaaggacaagtacatcctgcagggcgtgaccagctggggcctgggctgcgccagacccaacaagcccggcgtgtacgccagagtgagcagattcgtgacctggatcgagggcatgatgagaaacaactag

SEQ ID NO: 87285 - DNA, 6123 bp, synthetic construct; identical to SEQ ID NO: 87284
  misc_feature 1..6123: note = Description of Artificial Sequence: Synthetic coding sequence
  source 1..6123: mol_type = other DNA

SEQ ID NO: 87286 - DNA, 4602 bp, synthetic construct
  misc_feature 1..4602: note = Description of Artificial Sequence: Synthetic coding sequence
  source 1..4602: mol_type = other DNA
atgatgcagctgaccctgaacaccctgttccccgtggtgagcacccccgccatcacctacatcgtgaccgtgttcaccggcgacgtgagaggcgccggcaccaagagcaagatctacctggtgatgtacggcgccagaggcaacaagaacagcggcaagatcttcctggagggcggcgtgttcgacagaggcagaaccgacatcttccacatcgagctggccgtgctgctgagccccctgagcagagtgagcgtgggccacggcaacgtgggcgtgaacagaggctggttctgcgagaaggtggtgatcctgtgccccttcaccggcatccagcagaccttcccctgcagcaactggctggacgagaagaaggccgacggcctgatcgagagacagctgtacgagatggtgagcctgagaaagaagagactgaagaagttcccctggagcctgtgggtgtggaccaccgacctgaagaaggccggcaccaacagccccatcttcatccagatctacggccagaagggcagaaccgacgagatcctgctgaaccccaacaacaagtggttcaagcccggcatcatcgagaagttcagaatcgagctgcccgacctgggcagattctacaagatcagagtgtggcacgacaagagaagcagcggcagcggctggcacctggagagaatgaccctgatgaacaccctgaacaaggacaagtacaacttcaactgcaacagatggctggacgccaacgaggacgacaacgagatcgtgagagagatgaccgccgagggccccaccgtgagaagaatcatgggcatggccagataccacgtgaccgtgtgcaccggcgagctggagggcgccggcaccgacgccaacgtgtacctgtgcctgttcggcgacgtgggcgacaccggcgagagactgctgtacaactgcagaaacaacaccgacctgttcgagaagggcaacgccgacgagttcaccatcgagagcgtgaccatgagaaacgtgagaagagtgagaatcagacacgacggcaagggcagcggcagcggctggtacctggacagagtgctggtgagagaggagggccagcccgagagcgacaacgtggagttcccctgcctgagatggctggacaaggacaaggacgacggccagctggtgagagagctgctgcccagcgacagcagcgccaccctgaagaacttcagataccacatcagcctgaagaccggcgacgtgagcggcgccagcaccgacagcagagtgtacatcaagctgtacggcgacaagagcgacaccatcaagcaggtgctgctggtgagcgacaacaacctgaaggactacttcgagagaggcagagtggacgagttcaccctggagaccctgaacatcggcaacatcaacagactggtgatcggccacgacagcaccggcatgcacgccagctggttcctgggcagcgtgcagatcagagtgcccagacagggcaagcagtacaccttccccgccaacagatggctggacaagaaccaggccgacggcagactggaggtggagctgtaccccagcgaggtggtggagatccagaagctggtgcactacgaggtggagatctggaccggcgacgtgggcggcgccggcaccagcgccagagtgtacatgcagatctacggcgagaagggcaagaccgaggtgctgttcctgagcagcagaagcaaggtgttcgagagagccagcaaggacaccttccagctggaggccgccgacgtgggcgaggtgtacaagctgagactgggccacaccggcgagggcttcggccccagctggttcgtggacaccgtgtggctgagacacctggtggtgagagaggtggacctgacccccgaggaggaggccagaaagaagaaggagaaggacaagctgagacagctgctgaagaaggagagactgaaggccaagctgcagagaaagaagaagaagagaaagggcagcgacgaggaggacgagggcgaggaggaggagagcagcagcagcgaggagagcagcagcgaggaggaggagatggaggaggaggaggaggaggaggagttcggccccggcatgcaggaggtgatcgagcagcacaagttcgaggcccacagatggctggccagaggcaaggaggacaacgagctggtggtggagctggtgcccgccggcaagcccggccccgagagaaacacctacgaggtgcaggtggtgaccggcaacgtgcccaaggccggcaccgacgccaacgtgtacctgaccatctacggcgaggagtacggcgacaccggcgagagacccctgaagaagagcgacaagagcaacaagttcgagcagggccagaccgacaccttcaccatctacgccatcgacctgggcgccctgaccaagatcagaatcagacacgacaacaccggcaacagagccggctggttcctggacagaatcgacatcaccgacatgaacaacgagatcacctactacttcccctgccagagatggctggccgtggaggaggacgacggccagctgagcagagagctgctgcccgtggacgagagctacgtgctgccccagagcgaggagggcagaggcggcggcgacaacaaccccctggacaacctggccctggagcagaaggacaagagcaccaccttcagcgtgaccatcaagaccggcgtgaagaagaacgccggcaccgacgccaacgtgttcatcaccctgttcggcacccaggacgacaccggcatgaccctgctgaagagcagcaagaccaacagcgacaagttcgagagagacagcatcgagatcttcaccgtggagaccctggacctgggcgacctgtggaaggtgagactgggccacgacaacaccggcaaggcccccggctggttcgtggactgggtggaggtggacgcccccagcctgggcaagtgcatgaccttcccctgcggcagatggctggccaagaacgaggacgacggcagcatcatcagagacctgttccacgccgagctgcagaccagactgtacacccccttcgtgccctacgagatcaccctgtacaccagcgacgtgttcgccgccggcaccgacgccaacatcttcatcatcatctacggctgcgacgccgtgtgcacccagcagaagtacctgtgcaccaacaagagagagcagaagcagttcttcgagagaaagagcgccagcagattcatcgtggagctggaggacgtgggcgagatcatcgagaagatcagaatcggccacaacaacaccggcatgaaccccggctggcactgcagccacgtggacatcagaagactgctgcccgacaaggacggcgccgagaccctgaccttcccctgcgacagatggctggccaccagcgaggacgacaagaagaccatcagagagctggtgccctacgacatcttcaccgagaagtacatgaaggacggcagcctgagacaggtgtacaaggaggtggaggagcccctggacatcgtgctgtacagcgtgcagatcttcaccggcaacatccccggcgccggcaccgacgccaaggtgtacatcaccatctacggcgacctgggcgacaccggcgagagatacctgggcaagagcgagaacagaaccaacaagttcgagagaggcaccgccgacaccttcatcatcgaggccgccgacctgggcgtgatctacaagatcaagctgagacacgacaacagcaagtggtgcgccgactggtacgtggagaaggtggagatctggaacgacaccaacgaggacgagttcctgttcctgtgcggcagatggctgagcctgaagaaggaggacggcagactggagagactgttctacgagaaggagtacaccggcgacagaagcagcaactgcagcagccccgccgacttctgggagatcgccctgagcagcaagatggccgacgtggacatcagcaccgtgaccggccccatggccgactacgtgcaggagggccccatcatcccctactacgtgagcgtgaccaccggcaagcacaaggacgccgccaccgacagcagagccttcatcttcctgatcggcgaggacgacgagagaagcaagagaatctggctggactaccccagaggcaagagaggcttcagcagaggcagcgtggaggagttctacgtggccggcctggacgtgggcatcatcaagaagatcgaggtgctgtacgagatgaccgtgtggaccggcgacgtggtgggcggcggcaccgacagcaacatcttcatgaccctgtacggcatcaacggcagcaccgaggagatgcagctggacaagaagaaggccagattcgagagagagcagaacgacaccttcatcatggagatcctggacatcgcccccttcaccaagatgagaatcagaatcgacggcctgggcagcagacccgagtggttcctggagagagtgaagtgcctggacccccacagcagcttccagcccccccccacccccagccccggcagcagcggcctgagcatggacctggtgaaggcccagatgagcctgtag

SEQ ID NO: 87287 - DNA, 5844 bp, synthetic construct
  misc_feature 1..5844: note = Description of Artificial Sequence: Synthetic coding sequence
  source 1..5844: mol_type = other DNA
atgatgcagctgaccctgaacaccctgttccccgtggtgagcacccccgccatcacctacatcgtgaccgtgttcaccggcgacgtgagaggcgccggcaccaagagcaagatctacctggtgatgtacggcgccagaggcaacaagaacagcggcaagatcttcctggagggcggcgtgttcgacagaggcagaaccgacatcttccacatcgagctggccgtgctgctgagccccctgagcagagtgagcgtgggccacggcaacgtgggcgtgaacagaggctggttctgcgagaaggtggtgatcctgtgccccttcaccggcatccagcagaccttcccctgcagcaactggctggacgagaagaaggccgacggcctgatcgagagacagctgtacgagatggtgagcctgagaaagaagagactgaagaagttcccctggagcctgtgggtgtggaccaccgacctgaagaaggccggcaccaacagccccatcttcatccagatctacggccagaagggcagaaccgacgagatcctgctgaaccccaacaacaagtggttcaagcccggcatcatcgagaagttcagaatcgagctgcccgacctgggcagattctacaagatcagagtgtggcacgacaagagaagcagcggcagcggctggcacctggagagaatgaccctgatgaacaccctgaacaaggacaagtacaacttcaactgcaacagatggctggacgccaacgaggacgacaacgagatcgtgagagagatgaccgccgagggccccaccgtgagaagaatcatgggcatggccagataccacgtgaccgtgtgcaccggcgagctggagggcgccggcaccgacgccaacgtgtacctgtgcctgttcggcgacgtgggcgacaccggcgagagactgctgtacaactgcagaaacaacaccgacctgttcgagaagggcaacgccgacgagttcaccatcgagagcgtgaccatgagaaacgtgagaagagtgagaatcagacacgacggcaagggcagcggcagcggctggtacctggacagagtgctggtgagagaggagggccagcccgagagcgacaacgtggagttcccctgcctgagatggctggacaaggacaaggacgacggccagctggtgagagagctgctgcccagcgacagcagcgccaccctgaagaacttcagataccacatcagcctgaagaccggcgacgtgagcggcgccagcaccgacagcagagtgtacatcaagctgtacggcgacaagagcgacaccatcaagcaggtgctgctggtgagcgacaacaacctgaaggactacttcgagagaggcagagtggacgagttcaccctggagaccctgaacatcggcaacatcaacagactggtgatcggccacgacagcaccggcatgcacgccagctggttcctgggcagcgtgcagatcagagtgcccagacagggcaagcagtacaccttccccgccaacagatggctggacaagaaccaggccgacggcagactggaggtggagctgtaccccagcgaggtggtggagatccagaagctggtgcactacgaggtggagatctggaccggcgacgtgggcggcgccggcaccagcgccagagtgtacatgcagatctacggcgagaagggcaagaccgaggtgctgttcctgagcagcagaagcaaggtgttcgagagagccagcaaggacaccttccagctggaggccgccgacgtgggcgaggtgtacaagctgagactgggccacaccggcgagggcttcggccccagctggttcgtggacaccgtgtggctgagacacctggtggtgagagaggtggacctgacccccgaggaggaggccagaaagaagaaggagaaggacaagctgagacagctgctgaagaaggagagactgaaggccaagctgcagagaaagaagaagaagagaaagggcagcgacgaggaggacgagggcgaggaggaggagagcagcagcagcgaggagagcagcagcgaggaggaggagatggaggaggaggaggaggaggaggagttcggccccggcatgcaggaggtgatcgagcagcacaagttcgaggcccacagatggctggccagaggcaaggaggacaacgagctggtggtggagctggtgcccgccggcaagcccggccccgagagaaacacctacgaggtgcaggtggtgaccggcaacgtgcccaaggccggcaccgacgccaacgtgtacctgaccatctacggcgaggagtacggcgacaccggcgagagacccctgaagaagagcgacaagagcaacaagttcgagcagggccagaccgacaccttcaccatctacgccatcgacctgggcgccctgaccaagatcagaatcagacacgacaacaccggcaacagagccggctggttcctggacagaatcgacatcaccgacatgaacaacgagatcacctactacttcccctgccagagatggctggccgtggaggaggacgacggccagctgagcagagagctgctgcccgtggacgagagctacgtgctgccccagagcgaggagggcagaggcggcggcgacaacaaccccctggacaacctggccctggagcagaaggacaagagcaccaccttcagcgtgaccatcaagaccggcgtgaagaagaacgccggcaccgacgccaacgtgttcatcaccctgttcggcacccaggacgacaccggcatgaccctgctgaagagcagcaagaccaacagcgacaagttcgagagagacagcatcgagatcttcaccgtggagaccctggacctgggcgacctgtggaaggtgagactgggccacgacaacaccggcaaggcccccggctggttcgtggactgggtggaggtggacgcccccagcctgggcaagtgcatgaccttcccctgcggcagatggctggccaagaacgaggacgacggcagcatcatcagagacctgttccacgccgagctgcagaccagactgtacacccccttcgtgccctacgagatcaccctgtacaccagcgacgtgttcgccgccggcaccgacgccaacatcttcatcatcatctacggctgcgacgccgtgtgcacccagcagaagtacctgtgcaccaacaagagagagcagaagcagttcttcgagagaaagagcgccagcagattcatcgtggagctggaggacgtgggcgagatcatcgagaagatcagaatcggccacaacaacaccggcatgaaccccggctggcactgcagccacgtggacatcagaagactgctgcccgacaaggacggcgccgagaccctgaccttcccctgcgacagatggctggccaccagcgaggacgacaagaagaccatcagagagctggtgccctacgacatcttcaccgagaagtacatgaaggacggcagcctgagacaggtgtacaaggaggtggaggagcccctggacatcgtgctgtacagcgtgcagatcttcaccggcaacatccccggcgccggcaccgacgccaaggtgtacatcaccatctacggcgacctgggcgacaccggcgagagatacctgggcaagagcgagaacagaaccaacaagttcgagagaggcaccgccgacaccttcatcatcgaggccgccgacctgggcgtgatctacaagatcaagctgagacacgacaacagcaagtggtgcgccgactggtacgtggagaaggtggagatctggaacgacaccaacgaggacgagttcctgttcctgtgcggcagatggctgagcctgaagaaggaggacggcagactggagagactgttctacgagaaggagtacaccggcgacagaagcagcaactgcagcagccccgccgacttctgggagatcgccctgagcagcaagatggccgacgtggacatcagcaccgtgaccggccccatggccgactacgtgcaggagggccccatcatcccctactacgtgagcgtgaccaccggcaagcacaaggacgccgccaccgacagcagagccttcatcttcctgatcggcgaggacgacgagagaagcaagagaatctggctggactaccccagaggcaagagaggcttcagcagaggcagcgtggaggagttctacgtggccggcctggacgtgggcatcatcaagaagatcgagctgggccacgacggcgccagccccgagagctgctggctggtggaggagctgtgcctggccgtgcccacccagggcaccaagtacatgctgaactgcaactgctggctggccaaggacagaggcgacggcatcaccagcagagtgttcgacctgctggacgccatggtggtgaacatcggcgtgaaggtgctgtacgagatgaccgtgtggaccggcgacgtggtgggcggcggcaccgacagcaacatcttcatgaccctgtacggcatcaacggcagcaccgaggagatgcagctggacaagaagaaggccagattcgagagagagcagaacgacaccttcatcatggagatcctggacatcgcccccttcaccaagatgagaatcagaatcgacggcctgggcagcagacccgagtggttcctggagagaatcctgctgaagaacatgaacaccggcgacctgaccatgttctactacggcgactggctgagccagagaaagggcaagaagaccctggtgtgcgagatgtgcgccgtgatcgacgaggaggagatgatggagtggaccagctacaccgtggccgtgaagaccagcgacatcctgggcgccggcaccgacgccaacgtgttcatcatcatcttcggcgagaacggcgacagcggcaccctggccctgaagcagagcgccaactggaacaagttcgagagaaacaacaccgacaccttcaacttccccgacatgctgagcctgggccacctgtgcaagctgagagtgtggcacgacaacaagggcatcttccccggctggcacctgagctacgtggacgtgaaggacaacagcagagacgagaccttccacttccagtgcgactgctggctgagcaagagcgagggcgacggccagaccgtgagagacttcgcctgcgccaacaacaagatctgcgacgagctggaggagaccacctacgagatcgtgatcgagaccggcaacggcggcgagaccagagagaacgtgtggctgatcctggagggcagaaagaacagaagcaaggagttcctgatggagaacagcagcagacagagagccttcagaaagggcaccaccgacaccttcgagttcgacagcatctacctgggcgacatcgccagcctgtgcgtgggccacctggccagagaggacagattcatccccaagagagagctggcctggcacgtgaagaccatcaccatcaccgagatggagtacggcaacgtgtacttcttcaactgcgactgcctgatccccctgaagagaaagagaaagtacttcaaggtgttcgaggtgaccaagaccaccgagagcttcgccagcaaggtgcagagcctggtgcccgtgaagtacgaggtgatcgtgaccaccggctacgagcccggcgccggcaccgacgccaacgtgttcgtgaccatcttcggcgccaacggcgacaccggcaagagagagctgaagcagaagatgagaaacctgttcgagagaggcagcaccgacagattcttcctggagaccctggagctggtggtgaccagactgggcctggccgccgagtgcggctag

SEQ ID NO: 87288 - DNA, 3435 bp, synthetic construct
  misc_feature 1..3435: note = Description of Artificial Sequence: Synthetic coding sequence
  source 1..3435: mol_type = other DNA
atgctgagacacctgaccgacaccttcaccatctacgccatcgacctgggcgccctgaccaagatcagaatcagacacgacaacaccggcaacagagccggctggttcctggacagaatcgacatcaccgacatgaacaacgagatcacctactacttcccctgccagagatggctggccgtggaggaggacgacggccagctgagcagagagctgctgcccgtggacgagagctacgtgctgccccagagcgaggagggcagaggcggcggcgacaacaaccccctggacaacctggccctggagcagaaggacaagagcaccaccttcagcgtgaccatcaagaccggcgtgaagaagaacgccggcaccgacgccaacgtgttcatcaccctgttcggcacccaggacgacaccggcatgaccctgctgaagagcagcaagaccaacagcgacaagttcgagagagacagcatcgagatcttcaccgtggagaccctggacctgggcgacctgtggaaggtgagactgggccacgacaacaccggcaaggcccccggctggttcgtggactgggtggaggtggacgcccccagcctgggcaagtgcatgaccttcccctgcggcagatggctggccaagaacgaggacgacggcagcatcatcagagacctgttccacgccgagctgcagaccagactgtacacccccttcgtgccctacgagatcaccctgtacaccagcgacgtgttcgccgccggcaccgacgccaacatcttcatcatcatctacggctgcgacgccgtgtgcacccagcagaagtacctgtgcaccaacaagagagagcagaagcagttcttcgagagaaagagcgccagcagattcatcgtggagctggaggacgtgggcgagatcatcgagaagatcagaatcggccacaacaacaccggcatgaaccccggctggcactgcagccacgtggacatcagaagactgctgcccgacaaggacggcgccgagaccctgaccttcccctgcgacagatggctggccaccagcgaggacgacaagaagaccatcagagagctggtgccctacgacatcttcaccgagaagtacatgaaggacggcagcctgagacaggtgtacaaggaggtggaggagcccctggacatcgtgctgtacagcgtgcagatcttcaccggcaacatccccggcgccggcaccgacgccaaggtgtacatcaccatctacggcgacctgggcgacaccggcgagagatacctgggcaagagcgagaacagaaccaacaagttcgagagaggcaccgccgacaccttcatcatcgaggccgccgacctgggcgtgatctacaagatcaagctgagacacgacaacagcaagtggtgcgccgactggtacgtggagaaggtggagatctggaacgacaccaacgaggacgagttcctgttcctgtgcggcagatggctgagcctgaagaaggaggacggcagactggagagactgttctacgagaaggagtacaccggcgacagaagcagcaactgcagcagccccgccgacttctgggagatcgccctgagcagcaagatggccgacgtggacatcagcaccgtgaccggccccatggccgactacgtgcaggagggccccatcatcccctactacgtgagcgtgaccaccggcaagcacaaggacgccgccaccgacagcagagccttcatcttcctgatcggcgaggacgacgagagaagcaagagaatctggctggactaccccagaggcaagagaggcttcagcagaggcagcgtggaggagttctacgtggccggcctggacgtgggcatcatcaagaagatcgaggtgctgtacgagatgaccgtgtggaccggcgacgtggtgggcggcggcaccgacagcaacatcttcatgaccctgtacggcatcaacggcagcaccgaggagatgcagctggacaagaagaaggccagattcgagagagagcagaacgacaccttcatcatggagatcctggacatcgcccccttcaccaagatgagaatcagaatcgacggcctgggcagcagacccgagtggttcctggagagaatcctgctgaagaacatgaacaccggcgacctgaccatgttctactacggcgactggctgagccagagaaagggcaagaagaccctggtgtgcgagatgtgcgccgtgatcgacgaggaggagatgatggagtggaccagctacaccgtggccgtgaagaccagcgacatcctgggcgccggcaccgacgccaacgtgttcatcatcatcttcggcgagaacggcgacagcggcaccctggccctgaagcagagcgccaactggaacaagttcgagagaaacaacaccgacaccttcaacttccccgacatgctgagcctgggccacctgtgcaagctgagagtgtggcacgacaacaagggcatcttccccggctggcacctgagctacgtggacgtgaaggacaacagcagagacgagaccttccacttccagtgcgactgctggctgagcaagagcgagggcgacggccagaccgtgagagacttcgcctgcgccaacaacaagatctgcgacgagctggaggagaccacctacgagatcgtgatcgagaccggcaacggcggcgagaccagagagaacgtgtggctgatcctggagggcagaaagaacagaagcaaggagttcctgatggagaacagcagcagacagagagccttcagaaagggcaccaccgacaccttcgagttcgacagcatctacctgggcgacatcgccagcctgtgcgtgggccacctggccagagaggacagattcatccccaagagagagctggcctggcacgtgaagaccatcaccatcaccgagatggagtacggcaacgtgtacttcttcaactgcgactgcctgatccccctgaagagaaagagaaagtacttcaaggtgttcgaggtgaccaagaccaccgagagcttcgccagcaaggtgcagagcctggtgcccgtgaagtacgaggtgatcgtgaccaccggctacgagcccggcgccggcaccgacgccaacgtgttcgtgaccatcttcggcgccaacggcgacaccggcaagagagagctgaagcagaagatgagaaacctgttcgagagaggcagcaccgacagattcttcctggagaccctggagctgggcgagctgagaaaggtgagactggagcacgacagcagcggctactgcagcggctggctggtggagaaggtggaggtgaccaacaccagcaccggcgtggccaccatcttcaactgcggcagatggctggacaagaagagaggcgacggcctgacctggagagacctgttccccagcgtgtag

SEQ ID NO: 87289 - DNA, 921 bp, synthetic construct
  misc_feature 1..921: note = Description of Artificial Sequence: Synthetic coding sequence
  source 1..921: mol_type = other DNA
atgagactgggcaccaactgcgagcacccccagctgcccctggccgcccccagcggctactacttcccctgccagagatggctggccgtggaggaggacgacggccagctgagcagagagctgctgcccgtggacgagagctacgtgctgccccagagcgaggagggcagaggcggcggcgacaacaaccccctggacaacctggccctggagcagaaggacaagagcaccaccttcagcgtgaccatcaagaccggcgtgaagaagaacgccggcaccgacgccaacgtgttcatcaccctgttcggcacccaggacgacaccggcatgaccctgctgaagagcagcaagaccaacagcgacaagttcgagagagacagcatcgagatcttcaccgtggagaccctggacctgggcgacctgtggaaggtgagactgggccacgacaacaccggcaaggcccccggctggttcgtggactgggtggaggtggacgcccccagcctgggcaagtgcatgaccttcccctgcggcagatggctggccaagaacgaggacgacggcagcatcatcagagacctgttccacgccgagctgcagaccagactgtacacccccttcgtgccctacgagatcaccctgtacaccagcgacgtgttcgccgccggcaccgacgccaacatcttcatcatcatctacggctgcgacgccgtgtgcacccagcagaagtacctgtgcaccaacaagagagagcagaagcagttcttcgagagaaagagcgccagcagattcatcgtggagctggaggacgtgggcgagatcatcgagaagatcagaatcggccacaacaacaccggcatgaaccccggctggcactgcagccacgtggacatcagaagactgctgcccgacaaggactag

SEQ ID NO: 87290 - DNA, 6636 bp, synthetic construct
  misc_feature 1..6636: note = Description of Artificial Sequence: Synthetic coding sequence
  source 1..6636: mol_type = other DNA
atgatgccccagaagaagagaagaagaaagaaggacatcgacttcctggccctgtacgaggccgagctgctgaactacgccagcgaggacgacgagggcgagctggagcacgagtactacaaggccagagtgtacgaggtggtgaccgccaccggcgacgtgagaggcgccggcaccgacgccaacgtgttcatcaccctgttcggcgagaacggcctgagccccaagctgcagctgaccagcaagagcaagagcgccttcgagaagggcaacgtggacgtgttcagagtgagaaccaacaacgtgggcctgatctacaaggtgagaatcgagcacgacaacaccggcctgaacgccagctggtacctggaccacgtgatcgtgaccgacatgaagagaccccacctgagatactacttcaactgcaacaactggctgagcaaggtggagggcgacagacagtggtgcagagacctgctggccagcttcaaccccatggacatgcccagaggcaacaagtacgaggtgaaggtgtacaccggcgacgtgatcggcgccggcaccgacgccgacgtgttcatcaacatcttcggcgagtacggcgacaccggcgagagaagactggagaacgagaaggacaacttcgagaagggcgccgaggacagattcatcctggacgcccccgacctgggccagctgatgaagatcaacgtgggccacaacaacaagggcggcagcgccggctggttcctgagccagatcgtgatcgaggacatcggcaacaagagaaagtacgacttccccctgaacagatggctggccctggacgaggacgacggcaagatccagagagacatcctggtgggcggcgccgagaccaccgccatcacctacatcgtgaccgtgttcaccggcgacgtgagaggcgccggcaccaagagcaagatctacctggtgatgtacggcgccagaggcaacaagaacagcggcaagatcttcctggagggcggcgtgttcgacagaggcagaaccgacatcttccacatcgagctggccgtgctgctgagccccctgagcagagtgagcgtgggccacggcaacgtgggcgtgaacagaggctggttctgcgagaaggtggtgatcctgtgccccttcaccggcatccagcagaccttcccctgcagcaactggctggacgagaagaaggccgacggcctgatcgagagacagctgtacgagatggtgagcctgagaaagaagagactgaagaagttcccctggagcctgtgggtgtggaccaccgacctgaagaaggccggcaccaacagccccatcttcatccagatctacggccagaagggcagaaccgacgagatcctgctgaaccccaacaacaagtggttcaagcccggcatcatcgagaagttcagaatcgagctgcccgacctgggcagattctacaagatcagagtgtggcacgacaagagaagcagcggcagcggctggcacctggagagaatgaccctgatgaacaccctgaacaaggacaagtacaacttcaactgcaacagatggctggacgccaacgaggacgacaacgagatcgtgagagagatgaccgccgagggccccaccgtgagaagaatcatgggcatggccagataccacgtgaccgtgtgcaccggcgagctggagggcgccggcaccgacgccaacgtgtacctgtgcctgttcggcgacgtgggcgacaccggcgagagactgctgtacaactgcagaaacaacaccgacctgttcgagaagggcaacgccgacgagttcaccatcgagagcgtgaccatgagaaacgtgagaagagtgagaatcagacacgacggcaagggcagcggcagcggctggtacctggacagagtgctggtgagagaggagggccagcccgagagcgacaacgtggagttcccctgcctgagatggctggacaaggacaaggacgacggccagctggtgagagagctgctgcccagcgacagcagcgccaccctgaagaacttcagataccacatcagcctgaagaccggcgacgtgagcggcgccagcaccgacagcagagtgtacatcaagctgtacggcgacaagagcgacaccatcaagcaggtgctgctggtgagcgacaacaacctgaaggactacttcgagagaggcagagtggacgagttcaccctggagaccctgaacatcggcaacatcaacagactggtgatcggccacgacagcaccggcatgcacgccagctggttcctgggcagcgtgcagatcagagtgcccagacagggcaagcagtacaccttccccgccaacagatggctggacaagaaccaggccgacggcagactggaggtggagctgtaccccagcgaggtggtggagatccagaagctggtgcactacgaggtggagatctggaccggcgacgtgggcggcgccggcaccagcgccagagtgtacatgcagatctacggcgagaagggcaagaccgaggtgctgttcctgagcagcagaagcaaggtgttcgagagagccagcaaggacaccttccagctggaggccgccgacgtgggcgaggtgtacaagctgagactgggccacaccggcgagggcttcggccccagctggttcgtggacaccgtgtggctgagacacctggtggtgagagaggtggacctgacccccgaggaggaggccagaaagaagaaggagaaggacaagctgagacagctgctgaagaaggagagactgaaggccaagctgcagagaaagaagaagaagagaaagggcagcgacgaggaggacgagggcgaggaggaggagagcagcagcagcgaggagagcagcagcgaggaggaggagatggaggaggaggaggaggaggaggagttcggccccggcatgcaggaggtgatcgagcagcacaagttcgaggcccacagatggctggccagaggcaaggaggacaacgagctggtggtggagctggtgcccgccggcaagcccggccccgagagaaacacctacgaggtgcaggtggtgaccggcaacgtgcccaaggccggcaccgacgccaacgtgtacctgaccatctacggcgaggagtacggcgacaccggcgagagacccctgaagaagagcgacaagagcaacaagttcgagcagggccagaccgacaccttcaccatctacgccatcgacctgggcgccctgaccaagatcagaatcagacacgacaacaccggcaacagagccggctggttcctggacagaatcgacatcaccgacatgaacaacgagatcacctactacttcccctgccagagatggctggccgtggaggaggacgacggccagctgagcagagagctgctgcccgtggacgagagctacgtgctgccccagagcgaggagggcagaggcggcggcgacaacaaccccctggacaacctggccctggagcagaaggacaagagcaccaccttcagcgtgaccatcaagaccggcgtgaagaagaacgccggcaccgacgccaacgtgttcatcaccctgttcggcacccaggacgacaccggcatgaccctgctgaagagcagcaagaccaacagcgacaagttcgagagagacagcatcgagatcttcaccgtggagaccctggacctgggcgacctgtggaaggtgagactgggccacgacaacaccggcaaggcccccggctggttcgtggactgggtggaggtggacgcccccagcctgggcaagtgcatgaccttcccctgcggcagatggctggccaagaacgaggacgacggcagcatcatcagagacctgttccacgccgagctgcagaccagactgtacacccccttcgtgccctacgagatcaccctgtacaccagcgacgtgttcgccgccggcaccgacgccaacatcttcatcatcatctacggctgcgacgccgtgtgcacccagcagaagtacctgtgcaccaacaagagagagcagaagcagttcttcgagagaaagagcgccagcagattcatcgtggagctggaggacgtgggcgagatcatcgagaagatcagaatcggccacaacaacaccggcatgaaccccggctggcactgcagccacgtggacatcagaagactgctgcccgacaaggacggcgccgagaccctgaccttcccctgcgacagatggctggccaccagcgaggacgacaagaagaccatcagagagctggtgccctacgacatcttcaccgagaagtacatgaaggacggcagcctgagacaggtgtacaaggaggtggaggagcccctggacatcgtgctgtacagcgtgcagatcttcaccggcaacatccccggcgccggcaccgacgccaaggtgtacatcaccatctacggcgacctgggcgacaccggcgagagatacctgggcaagagcgagaacagaaccaacaagttcgagagaggcaccgccgacaccttcatcatcgaggccgccgacctgggcgtgatctacaagatcaagctgagacacgacaacagcaagtggtgcgccgactggtacgtggagaaggtggagatctggaacgacaccaacgaggacgagttcctgttcctgtgcggcagatggctgagcctgaagaaggaggacggcagactggagagactgttctacgagaaggagtacaccggcgacagaagcagcaactgcagcagccccgccgacttctgggagatcgccctgagcagcaagatggccgacgtggacatcagcaccgtgaccggccccatggccgactacgtgcaggagggccccatcatcccctactacgtgagcgtgaccaccggcaagcacaaggacgccgccaccgacagcagagccttcatcttcctgatcggcgaggacgacgagagaagcaagagaatctggctggactaccccagaggcaagagaggcttcagcagaggcagcgtggaggagttctacgtggccggcctggacgtgggcatcatcaagaagatcgaggtgctgtacgagatgaccgtgtggaccggcgacgtggtgggcggcggcaccgacagcaacatcttcatgaccctgtacggcatcaacggcagcaccgaggagatgcagctggacaagaagaaggccagattcgagagagagcagaacgacaccttcatcatggagatcctggacatcgcccccttcaccaagatgagaatcagaatcgacggcctgggcagcagacccgagtggttcctggagagaatcctgctgaagaacatgaacaccggcgacctgaccatgttctactacggcgactggctgagccagagaaagggcaagaagaccctggtgtgcgagatgtgcgccgtgatcgacgaggaggagatgatggagtggaccagctacaccgtggccgtgaagaccagcgacatcctgggcgccggcaccgacgccaacgtgttcatcatcatcttcggcgagaacggcgacagcggcaccctggccctgaagcagagcgccaactggaacaagttcgagagaaacaacaccgacaccttcaacttccccgacatgctgagcctgggccacctgtgcaagctgagagtgtggcacgacaacaagggcatcttccccggctggcacctgagctacgtggacgtgaaggacaacagcagagacgagaccttccacttccagtgcgactgctggctgagcaagagcgagggcgacggccagaccgtgagagacttcgcctgcgccaacaacaagatctgcgacgagctggaggagaccacctacgagatcgtgatcgagaccggcaacggcggcgagaccagagagaacgtgtggctgatcctggagggcagaaagaacagaagcaaggagttcctgatggagaacagcagcagacagagagccttcagaaagggcaccaccgacaccttcgagttcgacagcatctacctgggcgacatcgccagcctgtgcgtgggccacctggccagagaggacagattcatccccaagagagagctggcctggcacgtgaagaccatcaccatcaccgagatggagtacggcaacgtgtacttcttcaactgcgactgcctgatccccctgaagagaaagagaaagtacttcaaggtgttcgaggtgaccaagaccaccgagagcttcgccagcaaggtgcagagcctggtgcccgtgaagtacgaggtgatcgtgaccaccggctacgagcccggcgccggcaccgacgccaacgtgttcgtgaccatcttcggcgccaacggcgacaccggcaagagagagctgaagcagaagatgagaaacctgttcgagagaggcagcaccgacagattcttcctggagaccctggagctgggcgagctgagaaaggtgagactggagcacgacagcagcggctactgcagcggctggctggtggagaaggtggaggtgaccaacaccagcaccggcgtggccaccatcttcaactgcggcagatggctggacaagaagagaggcgacggcctgacctggagagacctgttccccagcgtgtag

SEQ ID NO: 87291 - DNA, 3345 bp, synthetic construct
  misc_feature 1..3345: note = Description of Artificial Sequence: Synthetic coding sequence
  source 1..3345: mol_type = other DNA
atgaacaacgagatcacctactacttcccctgccagagatggctggccgtggaggaggacgacggccagctgagcagagagctgctgcccgtggacgagagctacgtgctgccccagagcgaggagggcagaggcggcggcgacaacaaccccctggacaacctggccctggagcagaaggacaagagcaccaccttcagcgtgaccatcaagaccggcgtgaagaagaacgccggcaccgacgccaacgtgttcatcaccctgttcggcacccaggacgacaccggcatgaccctgctgaagagcagcaagaccaacagcgacaagttcgagagagacagcatcgagatcttcaccgtggagaccctggacctgggcgacctgtggaaggtgagactgggccacgacaacaccggcaaggcccccggctggttcgtggactgggtggaggtggacgcccccagcctgggcaagtgcatgaccttcccctgcggcagatggctggccaagaacgaggacgacggcagcatcatcagagacctgttccacgccgagctgcagaccagactgtacacccccttcgtgccctacgagatcaccctgtacaccagcgacgtgttcgccgccggcaccgacgccaacatcttcatcatcatctacggctgcgacgccgtgtgcacccagcagaagtacctgtgcaccaacaagagagagcagaagcagttcttcgagagaaagagcgccagcagattcatcgtggagctggaggacgtgggcgagatcatcgagaagatcagaatcggccacaacaacaccggcatgaaccccggctggcactgcagccacgtggacatcagaagactgctgcccgacaaggacggcgccgagaccctgaccttcccctgcgacagatggctggccaccagcgaggacgacaagaagaccatcagagagctggtgccctacgacatcttcaccgagaagtacatgaaggacggcagcctgagacaggtgtacaaggaggtggaggagcccctggacatcgtgctgtacagcgtgcagatcttcaccggcaacatccccggcgccggcaccgacgccaaggtgtacatcaccatctacggcgacctgggcgacaccggcgagagatacctgggcaagagcgagaacagaaccaacaagttcgagagaggcaccgccgacaccttcatcatcgaggccgccgacctgggcgtgatctacaagatcaagctgagacacgacaacagcaagtggtgcgccgactggtacgtggagaaggtggagatctggaacgacaccaacgaggacgagttcctgttcctgtgcggcagatggctgagcctgaagaaggaggacggcagactggagagactgttctacgagaaggagtacaccggcgacagaagcagcaactgcagcagccccgccgacttctgggagatcgccctgagcagcaagatggccgacgtggacatcagcaccgtgaccggccccatggccgactacgtgcaggagggccccatcatcccctactacgtgagcgtgaccaccggcaagcacaaggacgccgccaccgacagcagagccttcatcttcctgatcggcgaggacgacgagagaagcaagagaatctggctggactaccccagaggcaagagaggcttcagcagaggcagcgtggaggagttctacgtggccggcctggacgtgggcatcatcaagaagatcgagctgggccacgacggcgccagccccgagagctgctggctggtggaggagctgtgcctggccgtgcccacccagggcaccaagtacatgctgaactgcaactgctggctggccaaggacagaggcgacggcatcaccagcagagtgttcgacctgctggacgccatggtggtgaacatcggcgtgaaggtgctgtacgagatgaccgtgtggaccggcgacgtggtgggcggcggcaccgacagcaacatcttcatgaccctgtacggcatcaacggcagcaccgaggagatgcagctggacaagaagaaggccagattcgagagagagcagaacgacaccttcatcatggagatcctggacatcgcccccttcaccaagatgagaatcagaatcgacggcctgggcagcagacccgagtggttcctggagagaatcctgctgaagaacatgaacaccggcgacctgaccatgttctactacggcgactggctgagccagagaaagggcaagaagaccctggtgtgcgagatgtgcgccgtgatcgacgaggaggagatgatggagtggaccagctacaccgtggccgtgaagaccagcgacatcctgggcgccggcaccgacgccaacgtgttcatcatcatcttcggcgagaacggcgacagcggcaccctggccctgaagcagagcgccaactggaacaagttcgagagaaacaacaccgacaccttcaacttccccgacatgctgagcctgggccacctgtgcaagctgagagtgtggcacgacaacaagggcatcttccccggctggcacctgagctacgtggacgtgaaggacaacagcagagacgagaccttccacttccagtgcgactgctggctgagcaagagcgagggcgacggccagaccgtgagagacttcgcctgcgccaacaacaagatctgcgacgagctggaggagaccacctacgagatcgtgatcgagaccggcaacggcggcgagaccagagagaacgtgtggctgatcctggagggcagaaagaacagaagcaaggagttcctgatggagaacagcagcagacagagagccttcagaaagggcaccaccgacaccttcgagttcgacagcatctacctgggcgacatcgccagcctgtgcgtgggccacctggccagagaggacagattcatccccaagagagagctggcctggcacgtgaagaccatcaccatcaccgagatggagtacggcaacgtgtacttcttcaactgcgactgcctgatccccctgaagagaaagagaaagtacttcaaggtgttcgaggtgaccaagaccaccgagagcttcgccagcaaggtgcagagcctggtgcccgtgaagtacgaggtgatcgtgaccaccggctacgagcccggcgccggcaccgacgccaacgtgttcgtgaccatcttcggcgccaacggcgacaccggcaagagagagctgaagcagaagatgagaaacctgttcgagagaggcagcaccgacagattcttcctggagaccctggagctggtggtgaccagactgggcctggccgccgagtgcggctag

SEQ ID NO: 87292 - DNA, 1539 bp, synthetic construct
  misc_feature 1..1539: note = Description of Artificial Sequence: Synthetic coding sequence
  source 1..1539: mol_type = other DNA
atgaccgtgtggaccggcgacgtggtgggcggcggcaccgacagcaacatcttcatgaccctgtacggcatcaacggcagcaccgaggagatgcagctggacaagaagaaggccagattcgagagagagcagaacgacaccttcatcatggagatcctggacatcgcccccttcaccaagatgagaatcagaatcgacggcctgggcagcagacccgagtggttcctggagagaatcctgctgaagaacatgaacaccggcgacctgaccatgttctactacggcgactggctgagccagagaaagggcaagaagaccctggtgtgcgagatgtgcgccgtgatcgacgaggaggagatgatggagtggaccagctacaccgtggccgtgaagaccagcgacatcctgggcgccggcaccgacgccaacgtgttcatcatcatcttcggcgagaacggcgacagcggcaccctggccctgaagcagagcgccaactggaacaagttcgagagaaacaacaccgacaccttcaacttccccgacatgctgagcctgggccacctgtgcaagctgagagtgtggcacgacaacaagggcatcttccccggctggcacctgagctacgtggacgtgaaggacaacagcagagacgagaccttccacttccagtgcgactgctggctgagcaagagcgagggcgacggccagaccgtgagagacttcgcctgcgccaacaacaagatctgcgacgagctggaggagaccacctacgagatcgtgatcgagaccggcaacggcggcgagaccagagagaacgtgtggctgatcctggagggcagaaagaacagaagcaaggagttcctgatggagaacagcagcagacagagagccttcagaaagggcaccaccgacaccttcgagttcgacagcatctacctgggcgacatcgccagcctgtgcgtgggccacctggccagagaggacagattcatccccaagagagagctggcctggcacgtgaagaccatcaccatcaccgagatggagtacggcaacgtgtacttcttcaactgcgactgcctgatccccctgaagagaaagagaaagtacttcaaggtgttcgaggtgaccaagaccaccgagagcttcgccagcaaggtgcagagcctggtgcccgtgaagtacgaggtgatcgtgaccaccggctacgagcccggcgccggcaccgacgccaacgtgttcgtgaccatcttcggcgccaacggcgacaccggcaagagagagctgaagcagaagatgagaaacctgttcgagagaggcagcaccgacagattcttcctggagaccctggagctgggcgagctgagaaaggtgagactggagcacgacagcagcggctactgcagcggctggctggtggagaaggtggaggtgaccaacaccagcaccggcgtggccaccatcttcaactgcggcagatggctggacaagaagagaggcgacggcctgacctggagagacctgttccccagcgtgtag

SEQ ID NO: 87293 - DNA, 1374 bp, synthetic construct
  misc_feature 1..1374: note = Description of Artificial Sequence: Synthetic coding sequence
  source 1..1374: mol_type = other DNA
atgaccgtgtggaccggcgacgtggtgggcggcggcaccgacagcaacatcttcatgaccctgtacggcatcaacggcagcaccgaggagatgcagctggacaagaagaaggccagattcgagagagagcagaacgacaccttcatcatggagatcctggacatcgcccccttcaccaagatgagaatcagaatcgacggcctgggcagcagacccgagtggttcctggagagaatcctgctgaagaacatgaacaccggcgacctgaccatgttctactacggcgactggctgagccagagaaagggcaagaagaccctggtgtgcgagatgtgcgccgtgatcgacgaggaggagatgatggagtggaccagctacaccgtggccgtgaagaccagcgacatcctgggcgccggcaccgacgccaacgtgttcatcatcatcttcggcgagaacggcgacagcggcaccctggccctgaagcagagcgccaactggaacaagttcgagagaaacaacaccgacaccttcaacttccccgacatgctgagcctgggccacctgtgcaagctgagagtgtggcacgacaacaagggcatcttccccggctggcacctgagctacgtggacgtgaaggacaacagcagagacgagaccttccacttccagtgcgactgctggctgagcaagagcgagggcgacggccagaccgtgagagacttcgcctgcgccaacaacaagatctgcgacgagctggaggagaccacctacgagatcgtgatcgagaccggcaacggcggcgagaccagagagaacgtgtggctgatcctggagggcagaaagaacagaagcaaggagttcctgatggagaacagcagcagacagagagccttcagaaagggcaccaccgacaccttcgagttcgacagcatctacctgggcgacatcgccagcctgtgcgtgggccacctggccagagaggacagattcatccccaagagagagctggcctggcacgtgaagaccatcaccatcaccgagatggagtacggcaacgtgtacttcttcaactgcgactgcctgatccccctgaagagaaagagaaagtacttcaaggtgttcgaggtgaccaagaccaccgagagcttcgccagcaaggtgcagagcctggtgcccgtgaagtacgaggtgatcgtgaccaccggctacgagcccggcgccggcaccgacgccaacgtgttcgtgaccatcttcggcgccaacggcgacaccggcaagagagagctgaagcagaagatgagaaacctgttcgagagaggcagcaccgacagattcttcctggagaccctggagctgggcgagctgagaaagtag

SEQ ID NO: 87294 - DNA, 1122 bp, synthetic construct
  misc_feature 1..1122: note = Description of Artificial Sequence: Synthetic coding sequence
  source 1..1122: mol_type = other DNA
atgctgatccccttcagcatgaagaactgcttccagctgctgtgcaactgccaggtgcccgccgccggcttcaagaagaccgtgaagaacggcctgatcctgcagagcatcagcaacgacgtgtaccagaacctggccgtggaggactggatccacgaccacatgaacctggagggcaagcccatcctgttcttctggcagaacagccccagcgtggtgatcggcagacaccagaacccctggcaggagtgcaacctgaacctgatgagagaggagggcatcaagctggccagaagaagaagcggcggcggcaccgtgtaccacgacatgggcaacatcaacctgaccttcttcaccaccaagaagaagtacgacagaatggagaacctgaagctgatcgtgagagccctgaacgccgtgcagccccagctggacgtgcaggccaccaagagattcgacctgctgctggacggccagttcaagatcagcggcaccgccagcaagatcggcagaaccaccgcctaccaccactgcaccctgctgtgcagcaccgacggcaccttcctgagcagcctgctgaagagcccctaccagggcatcagaagcaacgccaccgccagcatccccagcctggtgaagaacctgctggagaaggaccccaccctgacctgcgaggtgctgatgaacgccgtggccaccgagtacgccgcctaccaccagatcgacaaccacatccacctgatcaaccccaccgacgagaccctgttccccggcatcaacagcaaggccaaggagctgcagacctgggagtggatctacggcaagacccccaagttcagcatcaacaccagcttccacgtgctgtacgagcagagccacctggagatcaaggtgttcatcgacatcaagaacggcagaatcgagatctgcaacatcgaggcccccgaccactggctgcccctggagatcagagacaagctgaacagcagcctgatcggcagcaagttctgccccaccgagaccaccatgctgaccaacatcctgctgagaacctgcccccaggaccacaagctgaacagcaagtggaacatcctgtgcgagaagatcaagggcatcatgtag

SEQ ID NO: 87295 - DNA, 1122 bp, synthetic construct; identical to SEQ ID NO: 87294
  misc_feature 1..1122: note = Description of Artificial Sequence: Synthetic coding sequence
  source 1..1122: mol_type = other DNA

SEQ ID NO: 87296 - DNA, 1122 bp, synthetic construct; identical to SEQ ID NO: 87294
  misc_feature 1..1122: note = Description of Artificial Sequence: Synthetic coding sequence
  source 1..1122: mol_type = other DNA

SEQ ID NO: 87297 - DNA, 1122 bp, synthetic construct; identical to SEQ ID NO: 87294
  misc_feature 1..1122: note = Description of Artificial Sequence: Synthetic coding sequence
  source 1..1122: mol_type = other DNA

SEQ ID NO: 87298 - DNA, 1122 bp, synthetic construct; identical to SEQ ID NO: 87294
  misc_feature 1..1122: note = Description of Artificial Sequence: Synthetic coding sequence
  source 1..1122: mol_type = other DNA

SEQ ID NO: 87299 - DNA, 321 bp, synthetic construct
  misc_feature 1..321: note = Description of Artificial Sequence: Synthetic coding sequence
  source 1..321: mol_type = other DNA
atgctgatccccttcagcatgaagaactgcttccagctgctgtgcaactgccaggtgcccgccgccggcttcaagaagaccgtgaagaacggcctgatcctgcagagcatcagcaacgacgtgtaccagaacctggccgtggaggactggatccacgaccacatgaacctggagggcaagcccatcctgttcttctggcagaacagccccagcgtggtgatcggcagacaccagaacccctggcaggagtgcaacctgaacctgatgagagaggagggcatcaagctggccagaagaagaagcggcggcggcaccgtgtag

SEQ ID NO: 87300 - DNA, 756 bp, synthetic construct
  misc_feature 1..756: note = Description of Artificial Sequence: Synthetic coding sequence
  source 1..756: mol_type = other DNA
atgctgatccccttcagcatgaagaactgcttccagctgctgtgcaactgccaggtgcccgccgccggcttcaagaagaccgtgaagaacggcctgatcctgcagagcatcagcaacgacgtgtaccagaacctggccgtggaggactggatccacgaccacatgaacctggagggcaagcccatcctgttcttctggcagaacagccccagcgtggtgatcggcagacaccagaacccctggcaggagtgcaacctgaacctgatgagagaggagggcatcaagctggccagaagaagaagcggcggcggcaccgtgtaccacgacatgggcaacatcaacctgaccttcttcaccaccaagaagaagtacgacagaatggagaacctgaagctgatcgtgagagccctgaacgccgtgcagccccagctggacgtgcaggccaccaagagattcgacctgctgctggacggccagttcaagatcagcggcaccgccagcaagatcggcagaaccaccgcctaccaccactgcaccctgctgtgcagcaccgacggcaccttcctgagcagcctgctgaagagcccctaccagggcatcagaagcaacgccaccgccagcatccccagcctggtgaagaacctgctggagaaggaccccaccctgacctgcgaggtgctgatgaacgccgtggccaccgagtacgccgcctaccaccagatcgacaaccacatccacctgatcaaccccacctag

SEQ ID NO: 87301 - DNA, 120 bp, synthetic construct
  misc_feature 1..120: note = Description of Artificial Sequence: Synthetic coding sequence
  source 1..120: mol_type = other DNA
atgctgatccccttcagcatgaagaactgcttccagctgctgtgcaactgccaggtgcccgccgccggcttcaagaagaccgtgaagaacggcctgatcctgcagagcatcagcaactag

SEQ ID NO: 87302 - DNA, 408 bp, synthetic construct
  misc_feature 1..408: note = Description of Artificial Sequence: Synthetic coding sequence
  source 1..408: mol_type = other DNA
atgctgatccccttcagcatgaagaactgcttccagctgctgtgcaactgccaggtgcccgccgccggcttcaagaagaccgtgaagaacggcctgatcctgcagagcatcagcaacgacgtgtaccagaacctggccgtggaggactggatccacgaccacatgaacctggagggcaagcccatcctgttcttctggcagaacagccccagcgtggtgatcggcagacaccagaacccctggcaggagtgcaacctgaacctgatgagagaggagggcatcaagctggccagaagaagaagcggcggcggcaccgtgtaccacgacatgggcaacatcaacctgaccttcttcaccaccaagaagaagtacgacagaatggagaacctgaagctgatcgtgagatag

SEQ ID NO: 87303 - DNA, 5301 bp, synthetic construct
  misc_feature 1..5301: note = Description of Artificial Sequence: Synthetic coding sequence
  source 1..5301: mol_type = other DNA
atgggcggcaagaacaagcagagaaccaagggcaacctgagacccagcaacagcggcagagccgccgagctgctggccaaggagcagggcaccgtgcccggcttcatcggcttcggcaccagccagagcgacctgggctacgtgcccgccatccagggcgccgaggagatcgacagcctggtggacagcgacttcagaatggtgctgagaaagctgagcaagaaggacgtgaccaccaagctgaaggccatgcaggagttcggcaccatgtgcaccgagagagacaccgagaccgtgaagggcgtgctgccctactggcccagaatcttctgcaagatcagcctggaccacgacagaagagtgagagaggccacccagcaggccttcgagaagctgatcctgaaggtgaagaagcagctggccccctacctgaagagcctgatgggctactggctgatggcccagtgcgacacctacacccccgccgccttcgccgccaaggacgccttcgaggccgccttcccccccagcaagcagcccgaggccatcgccttctgcaaggacgagatcaccagcgtgctgcaggaccacctgatcaaggagacccccgacaccctgagcgacccccagaccgtgcccgaggaggagagagaggccaagttctacagagtggtgacctgcagcctgctggccctgaagagactgctgtgcctgctgcccgacaacgagctggacagcctggaggagaagttcaagagcctgctgagccagaacaagttctggaagtacggcaagcacagcgtgccccagatcagaagcgcctacttcgagctggtgagcgccctgtgccagagaatcccccagctgatgaaggaggaggccagcaaggtgagccccagcgtgctgctgagcatcgacgacagcgaccccatcgtgtgccccgccctgtgggaggccgtgctgtacaccctgaccaccatcgaggactgctggctgcacgtgaacgccaagaagagcgtgttccccaagctgagcaccgtgatcagagagggcggcagaggcctggccaccgtgatctacccctacctgctgcccttcatcagcaagctgccccagagcatcaccaaccccaagctggacttcttcaagaacttcctgaccagcctggtggccggcctgagcaccgagagaaccaagaccagcagcctggagagcagcgccgtgatcagcgccttcttcgagtgcctgagattcatcatgcagcagaacctgggcgaggaggagatcgagcagatgctggtgaacgaccagctgatccccttcatcgacgccgtgctgaaggaccccggcctgcagcacggccagctgttcaaccacctggccgagaccctgagcagctgggaggccaaggccgacaccgagaaggacgagaagaccgcccacaacctggagaacgtgctgatccacttctgggagagactgagcgagatctgcgtggccaagatcagcgagcccgaggccgacgtggagagcgtgctgggcgtgagcaacctgctgcaggtgctgcagaagcccaagagcagcctgaagagcagcaagaagaagaacggcaaggtgagattcgccgacgagatcctggagagcaacaaggagaacgagaagtgcgtgagcagcgagggcgagaagatcgagggctgggagctgaccaccgagcccagcctgacccacaacagcagcggcctgctgagccccctgagaaagaagcccctggaggacctggtgtgcaagctggccgacatcagcatcaactacgtgaacgagagaaagagcgagcagcacctgagattcctgagcaccctgctggacagcttcagcagcagcagagtgttcaagatgctgctgggcgacgagaagcagagcatcgtgcaggccaagcccctggagatcgccaagctggtgcagaagaaccccgccgtgcagttcctgtaccagaagctgatcggctggctgaacgaggaccagagaaaggacttcggcttcctggtggacatcctgtacagcgccctgagatgctgcgacaacgacatggagagaaagaaggtgctggacgacctgaccaaggtggacctgaagtggaacagcctgctgaagatcatcgagaaggcctgccccagcagcgacaagcacgccctggtgaccccctggctgaagggcgacatcctgggcgagaagctggtgaacctggccgactgcctgtgcaacgaggacctggagagcagagtgagcagcgagagccacttcagcgagagatggaccctgctgagcctggtgctgagccagcacgtgaagaacgactacctgatcggcgacgtgtacgtggagagaatcatcgtgagactgcacgagaccctgttcaagaccaagaagctgagcgaggccgagagcagcgacagcagcgtgagcttcatctgcgacgtggcctacaactacttcagcagcgccaagggctgcctgctgatgcccagcagcgaggacctgctgctgaccctgttccagctgtgcgcccagagcaaggagaagacccacctgcccgacttcctgatctgcaagctgaagaacacctggctgagcggcgtgaacctgctggtgcaccagaccgacagcagctacaaggagagcaccttcctgcacctgagcgccctgtggctgaagaaccaggtgcaggccagcagcctggacatcaacagcctgcaggtgctgctgagcgccgtggacgacctgctgaacaccctgctggagagcgaggacagctacctgatgggcgtgtacatcggcagcgtgatgcccaacgacagcgagtgggagaagatgagacagagcctgcccatgcagtggctgcacagacccctgctggagggcagactgagcctgaactacgagtgcttcaagaccgacttcaaggagcaggacatcaagaccctgcccagccacctgtgcaccagcgccctgctgagcaagatggtgctgatcgccctgagaaaggagaccgtgctggagaacaacgagctggagaagatcatcgccgagctgctgtacagcctgcagtggtgcgaggagctggacaacccccccatcttcctgatcggcttctgcgagatcctgcagaagatgaacatcacctacgacaacctgagagtgctgggcaacaccagcggcctgctgcagctgctgttcaacagaagcagagagcacggcaccctgtggagcctgatcatcgccaagctgatcctgagcagaagcatcagcagcgacgaggtgaagccccactacaagagaaaggagagcttcttccccctgaccgagggcaacctgcacaccatccagagcctgtgccccttcctgagcaaggaggagaagaaggagttcagcgcccagtgcatccccgccctgctgggctggaccaagaaggacctgtgcagcaccaacggcggcttcggccacctggccatcttcaacagctgcctgcagaccaagagcatcgacgacggcgagctgctgcacggcatcctgaagatcatcatcagctggaagaaggagcacgaggacatcttcctgttcagctgcaacctgagcgaggccagccccgaggtgctgggcgtgaacatcgagatcatcagattcctgagcctgttcctgaagtactgcagcagccccctggccgagagcgagtgggacttcatcatgtgcagcatgctggcctggctggagaccaccagcgagaaccaggccctgtacagcatccccctggtgcagctgttcgcctgcgtgagctgcgacctggcctgcgacctgagcgccttcttcgacagcaccaccctggacaccatcggcaacctgcccgtgaacctgatcagcgagtggaaggagttcttcagccagggcatccacagcctgctgctgcccatcctggtgaccgtgaccggcgagaacaaggacgtgagcgagaccagcttccagaacgccatgctgaagcccatgtgcgagaccctgacctacatcagcaaggagcagctgctgagccacaagctgcccgccagactggtggccgaccagaagaccaacctgcccgagtacctgcagaccctgctgaacaccctggcccccctgctgctgttcagagccagacccgtgcagatcgccgtgtaccacatgctgtacaagctgatgcccgagctgccccagtacgaccaggacaacctgaagagctacggcgacgaggaggaggagcccgccctgagcccccccgccgccctgatgagcctgctgagcatccaggaggacctgctggagaacgtgctgggctgcatccccgtgggccagatcgtgaccatcaagcccctgagcgaggacttctgctacgtgctgggctacctgctgacctggaagctgatcctgaccttcttcaaggccgccagcagccagctgagagccctgtacagcatgtacctgagaaagaccaagagcctgaacaagctgctgtaccacctgttcagactgatgcccgagaaccccacctacgccgagaccgccgtggaggtgcccaacaaggaccccaagaccttcttcaccgaggagctgcagctgagcatcagagagaccaccatgctgccctaccacatcccccacctggcctgcagcgtgtaccacatgaccctgaaggacctgcccgccatggtgagactgtggtggaacagcagcgagaagagagtgttcaacatcgtggacagattcaccagcaagtacgtgagcagcgtgctgagcttccaggagatcagcagcgtgcagaccagcacccagctgttcaacggcatgaccgtgaaggccagagccaccaccagagaggtgatggccacctacaccatcgaggacatcgtgatcgagctgatcatccagctgcccagcaactaccccctgggcagcatcatcgtggagagcggcaagagagtgggcgtggccgtgcagcagtggagaaactggatgctgcagctgagcacctacctgacccaccagaacggcagcatcatggagggcctggccctgtggaagaacaacgtggacaagagattcgagggcgtggaggactgcatgatctgcttcagcgtgatccacggcttcaactacagcctgcccaagaaggcctgcagaacctgcaagaagaagttccacagcgcctgcctgtacaagtggttcaccagcagcaacaagagcacctgccccctgtgcagagagaccttcttctag

SEQ ID NO: 87304 - DNA, 1443 bp, synthetic construct
  misc_feature 1..1443: note = Description of Artificial Sequence: Synthetic coding sequence
  source 1..1443: mol_type = other DNA
atgggcggcaagaacaagcagagaaccaagggcaacctgagacccagcaacagcggcagagccgccgagctgctggccaaggagcagggcaccgtgcccggcttcatcggcttcggcaccagccagagcgacctgggctacgtgcccgccatccagggcgccgaggagatcgacagcctggtggacagcgacttcagaatggtgctgagaaagctgagcaagaaggacgtgaccaccaagctgaaggccaacgccatgcaggagttcggcaccatgtgcaccgagagagacaccgagaccgtgaagggcgtgctgccctactggcccagaatcttctgcaagatcagcctggaccacgacagaagagtgagagaggccacccagcaggccttcgagaagctgatcctgaaggtgaagaagcagctggccccctacctgaagagcctgatgggctactggctgatggcccagtgcgacacctacacccccgccgccttcgccgccaaggacgccttcgaggccgccttcccccccagcaagcagcccgaggccatcgccttctgcaaggacgagatcaccagcgtgctgcaggaccacctgatcaaggagacccccgacaccctgagcgacccccagaccgtgcccgaggaggagagagaggccaagttctacagagtggtgacctgcagcctgctggccctgaagagactgctgtgcctgctgcccgacaacgagctggacagcctggaggagaagttcaagagcctgctgagccagaacaagttctggaagtacggcaagcacagcgtgccccagatcagaagcgcctacttcgagctggtgagcgccctgtgccagagaatcccccagctgatgaaggaggaggccagcaaggtgagccccagcgtgctgctgagcatcgacgacagcgaccccatcgtgtgccccgccctgtgggaggccgtgctgtacaccctgaccaccatcgaggactgctggctgcacgtgaacgccaagaagagcgtgttccccaagctgagcaccgtgatcagagagggcggcagaggcctggccaccgtgatctacccctacctgctgcccttcatcagcaagctgccccagagcatcaccaaccccaagctggacttcttcaagaacttcctgaccagcctggtggccggcctgagcaccgagagaaccaagaccagcagcctggagagcagcgccgtgatcagcgccttcttcgagtgcctgagattcatcatgcagcagaacctgggcgaggaggagatcgagcagatgctggtgaacgaccagctgatccccttcatcgacgccgtgctgaaggaccccggcctgcagcacggccagctgttcaaccacctggccgagaccctgagcagctgggaggccaaggccgacaccgagaaggacgagaagtag

SEQ ID NO: 87305 - DNA, 5439 bp, synthetic construct
  misc_feature 1..5439: note = Description of Artificial Sequence: Synthetic coding sequence
  source 1..5439: mol_type = other DNA
atggacagagtgggcggcggcaagggccccggcggcagctactacagagtgagcagcagcgccgccagaagcagaaagctgtgccccggcagagtgaacagaggcctgagcgcccagagcaccgccgccaccgccaccatgggcggcaagaacaagcagagaaccaagggcaacctgagacccagcaacagcggcagagccgccgagctgctggccaaggagcagggcaccgtgcccggcttcatcggcttcggcaccagccagagcgacctgggctacgtgcccgccatccagggcgccgaggagatcgacagcctggtggacagcgacttcagaatggtgctgagaaagctgagcaagaaggacgtgaccaccaagctgaaggccatgcaggagttcggcaccatgtgcaccgagagagacaccgagaccgtgaagggcgtgctgccctactggcccagaatcttctgcaagatcagcctggaccacgacagaagagtgagagaggccacccagcaggccttcgagaagctgatcctgaaggtgaagaagcagctggccccctacctgaagagcctgatgggctactggctgatggcccagtgcgacacctacacccccgccgccttcgccgccaaggacgccttcgaggccgccttcccccccagcaagcagcccgaggccatcgccttctgcaaggacgagatcaccagcgtgctgcaggaccacctgatcaaggagacccccgacaccctgagcgacccccagaccgtgcccgaggaggagagagaggccaagttctacagagtggtgacctgcagcctgctggccctgaagagactgctgtgcctgctgcccgacaacgagctggacagcctggaggagaagttcaagagcctgctgagccagaacaagttctggaagtacggcaagcacagcgtgccccagatcagaagcgcctacttcgagctggtgagcgccctgtgccagagaatcccccagctgatgaaggaggaggccagcaaggtgagccccagcgtgctgctgagcatcgacgacagcgaccccatcgtgtgccccgccctgtgggaggccgtgctgtacaccctgaccaccatcgaggactgctggctgcacgtgaacgccaagaagagcgtgttccccaagctgagcaccgtgatcagagagggcggcagaggcctggccaccgtgatctacccctacctgctgcccttcatcagcaagctgccccagagcatcaccaaccccaagctggacttcttcaagaacttcctgaccagcctggtggccggcctgagcaccgagagaaccaagaccagcagcctggagagcagcgccgtgatcagcgccttcttcgagtgcctgagattcatcatgcagcagaacctgggcgaggaggagatcgagcagatgctggtgaacgaccagctgatccccttcatcgacgccgtgctgaaggaccccggcctgcagcacggccagctgttcaaccacctggccgagaccctgagcagctgggaggccaaggccgacaccgagaaggacgagaagaccgcccacaacctggagaacgtgctgatccacttctgggagagactgagcgagatctgcgtggccaagatcagcgagcccgaggccgacgtggagagcgtgctgggcgtgagcaacctgctgcaggtgctgcagaagcccaagagcagcctgaagagcagcaagaagaagaacggcaaggtgagattcgccgacgagatcctggagagcaacaaggagaacgagaagtgcgtgagcagcgagggcgagaagatcgagggctgggagctgaccaccgagcccagcctgacccacaacagcagcggcctgctgagccccctgagaaagaagcccctggaggacctggtgtgcaagctggccgacatcagcatcaactacgtgaacgagagaaagagcgagcagcacctgagattcctgagcaccctgctggacagcttcagcagcagcagagtgttcaagatgctgctgggcgacgagaagcagagcatcgtgcaggccaagcccctggagatcgccaagctggtgcagaagaaccccgccgtgcagttcctgtaccagaagctgatcggctggctgaacgaggaccagagaaaggacttcggcttcctggtggacatcctgtacagcgccctgagatgctgcgacaacgacatggagagaaagaaggtgctggacgacctgaccaaggtggacctgaagtggaacagcctgctgaagatcatcgagaaggcctgccccagcagcgacaagcacgccctggtgaccccctggctgaagggcgacatcctgggcgagaagctggtgaacctggccgactgcctgtgcaacgaggacctggagagcagagtgagcagcgagagccacttcagcgagagatggaccctgctgagcctggtgctgagccagcacgtgaagaacgactacctgatcggcgacgtgtacgtggagagaatcatcgtgagactgcacgagaccctgttcaagaccaagaagctgagcgaggccgagagcagcgacagcagcgtgagcttcatctgcgacgtggcctacaactacttcagcagcgccaagggctgcctgctgatgcccagcagcgaggacctgctgctgaccctgttccagctgtgcgcccagagcaaggagaagacccacctgcccgacttcctgatctgcaagctgaagaacacctggctgagcggcgtgaacctgctggtgcaccagaccgacagcagctacaaggagagcaccttcctgcacctgagcgccctgtggctgaagaaccaggtgcaggccagcagcctggacatcaacagcctgcaggtgctgctgagcgccgtggacgacctgctgaacaccctgctggagagcgaggacagctacctgatgggcgtgtacatcggcagcgtgatgcccaacgacagcgagtgggagaagatgagacagagcctgcccatgcagtggctgcacagacccctgctggagggcagactgagcctgaactacgagtgcttcaagaccgacttcaaggagcaggacatcaagaccctgcccagccacctgtgcaccagcgccctgctgagcaagatggtgctgatcgccctgagaaaggagaccgtgctggagaacaacgagctggagaagatcatcgccgagctgctgtacagcctgcagtggtgcgaggagctggacaacccccccatcttcctgatcggcttctgcgagatcctgcagaagatgaacatcacctacgacaacctgagagtgctgggcaacaccagcggcctgctgcagctgctgttcaacagaagcagagagcacggcaccctgtggagcctgatcatcgccaagctgatcctgagcagaagcatcagcagcgacgaggtgaagccccactacaagagaaaggagagcttcttccccctgaccgagggcaacctgcacaccatccagagcctgtgccccttcctgagcaaggaggagaagaaggagttcagcgcccagtgcatccccgccctgctgggctggaccaagaaggacctgtgcagcaccaacggcggcttcggccacctggccatcttcaacagctgcctgcagaccaagagcatcgacgacggcgagctgctgcacggcatcctgaagatcatcatcagctggaagaaggagcacgaggacatcttcctgttcagctgcaacctgagcgaggccagccccgaggtgctgggcgtgaacatcgagatcatcagattcctgagcctgttcctgaagtactgcagcagccccctggccgagagcgagtgggacttcatcatgtgcagcatgctggcctggctggagaccaccagcgagaaccaggccctgtacagcatccccctggtgcagctgttcgcctgcgtgagctgcgacctggcctgcgacctgagcgccttcttcgacagcaccaccctggacaccatcggcaacctgcccgtgaacctgatcagcgagtggaaggagttcttcagccagggcatccacagcctgctgctgcccatcctggtgaccgtgaccggcgagaacaaggacgtgagcgagaccagcttccagaacgccatgctgaagcccatgtgcgagaccctgacctacatcagcaaggagcagctgctgagccacaagctgcccgccagactggtggccgaccagaagaccaacctgcccgagtacctgcagaccctgctgaacaccctggcccccctgctgctgttcagagccagacccgtgcagatcgccgtgtaccacatgctgtacaagctgatgcccgagctgccccagtacgaccaggacaacctgaagagctacggcgacgaggaggaggagcccgccctgagcccccccgccgccctgatgagcctgctgagcatccaggaggacctgctggagaacgtgctgggctgcatccccgtgggccagatcgtgaccatcaagcccctgagcgaggacttctgctacgtgctgggctacctgctgacctggaagctgatcctgaccttcttcaaggccgccagcagccagctgagagccctgtacagcatgtacctgagaaagaccaagagcctgaacaagctgctgtaccacctgttcagactgatgcccgagaaccccacctacgccgagaccgccgtggaggtgcccaacaaggaccccaagaccttcttcaccgaggagctgcagctgagcatcagagagaccaccatgctgccctaccacatcccccacctggcctgcagcgtgtaccacatgaccctgaaggacctgcccgccatggtgagactgtggtggaacagcagcgagaagagagtgttcaacatcgtggacagattcaccagcaagtacgtgagcagcgtgctgagcttccaggagatcagcagcgtgcagaccagcacccagctgttcaacggcatgaccgtgaaggccagagccaccaccagagaggtgatggccacctacaccatcgaggacatcgtgatcgagctgatcatccagctgcccagcaactaccccctgggcagcatcatcgtggagagcggcaagagagtgggcgtggccgtgcagcagtggagaaactggatgctgcagctgagcacctacctgacccaccagaacggcagcatcatggagggcctggccctgtggaagaacaacgtggacaagagattcgagggcgtggaggactgcatgatctgcttcagcgtgatccacggcttcaactacagcctgcccaagaaggcctgcagaacctgcaagaagaagttccacagcgcctgcctgtacaagtggttcaccagcagcaacaagagcacctgccccctgtgcagagagaccttcttctag

SEQ ID NO: 87306 - DNA, 1404 bp, synthetic construct
  misc_feature 1..1404: note = Description of Artificial Sequence: Synthetic coding sequence
  source 1..1404: mol_type = other DNA
atgaagaaccagaacggcaccttcaaggactgggccaacgccaacgtgagcagacagatcgaggacaccgtgctgtacggctactacaccctgtacagcgtgatcctgttctgcgtgttcttctggatccccttcgtgtacttctactacgaggagaaggacgacgacgacaccagcaagtgcacccagatcaagaccgccctgaagtacaccctgggcttcgtggtgatctgcgccctgctgctgctggtgggcgccttcgtgcccctgaacgtgcccaacaacaagaacagcaccgagtgggagaaggtgaagagcctgttcgaggagctgggcagcagccacggcctggccgccctgagcttcagcatcagcagcctgaccctgatcggcatgctggccgccatcacctacaccgcctacggcatgagcgccctgcccctgaacctgatcaagggcaccagaagcgccgcctacgagagactggagaacaccgaggacatcgaggaggtggagcagcacatccagaccatcaagagcaagagcaaggacggcagacccctgcccgccagagacaagagagccctgaagcagttcgaggagagactgagaaccctgaagaagagagagagacacctggagttcatcgagaacagctggtggaccaagttctgcggcgccctgagacccctgaagatcgtgtggggcatcttcttcatcctggtggccctgctgttcgtgatcagcctgttcctgagcaacctggacaaggccctgcacagcgccggcatcgacagcggcttcatcatcttcggcgccaacctgagcaaccccctgaacatgctgctgcccctgctgcagaccgtgttccccctggactacatcctgatcaccatcatcatcatgtacttcatcttcaccagcatggccggcatcagaaacatcggcatctggttcttctggatcagactgtacaagatcagaagaggcagaaccagaccccaggccctgctgttcctgtgcatgatcctgctgctgatcgtgctgcacaccagctacatgatctacagcctggccccccagtacgtgatgtacggcagccagaactacctgatcgagaccaacatcaccagcgacaaccacaagggcaacagcaccctgagcgtgcccaagagatgcgacgccgacgcccccgaggaccagtgcaccgtgaccagaacctacctgttcctgcacaagttctggttcttcagcgccgcctactacttcggcaactgggccttcctgggcgtgttcctgatcggcctgatcgtgagctgctgcaagggcaagaagagcgtgatcgagggcgtggacgaggacagcgacatcagcgacgacgagcccagcgtgtacagcgcctag

SEQ ID NO: 87307 - DNA, 1623 bp, synthetic construct
  misc_feature 1..1623: note = Description of Artificial Sequence: Synthetic coding sequence
  source 1..1623: mol_type = other DNA
atggccaccagcggcgccgccagcgccgagctggtgatcggctggtgcatcttcggcctgctgctgctggccatcctggccttctgctggatctacgtgagaaagtaccagagcagaagagagagcgaggtggtgagcaccatcaccgccatcttcagcctggccatcgccctgatcaccagcgccctgctgcccgtggacatcttcctggtgagctacatgaagaaccagaacggcaccttcaaggactgggccaacgccaacgtgagcagacagatcgaggacaccgtgctgtacggctactacaccctgtacagcgtgatcctgttctgcgtgttcttctggatccccttcgtgtacttctactacgaggagaaggacgacgacgacaccagcaagtgcacccagatcaagaccgccctgaagtacaccctgggcttcgtggtgatctgcgccctgctgctgctggtgggcgccttcgtgcccctgaacgtgcccaacaacaagaacagcaccgagtgggagaaggtgaagagcctgttcgaggagctgggcagcagccacggcctggccgccctgagcttcagcatcagcagcctgaccctgatcggcatgctggccgccatcacctacaccgcctacggcatgagcgccctgcccctgaacctgatcaagggcaccagaagcgccgcctacgagagactggagaacaccgaggacatcgaggaggtggagcagcacatccagaccatcaagagcaagagcaaggacggcagacccctgcccgccagagacaagagagccctgaagcagttcgaggagagactgagaaccctgaagaagagagagagacacctggagttcatcgagaacagctggtggaccaagttctgcggcgccctgagacccctgaagatcgtgtggggcatcttcttcatcctggtggccctgctgttcgtgatcagcctgttcctgagcaacctggacaaggccctgcacagcgccggcatcgacagcggcttcatcatcttcggcgccaacctgagcaaccccctgaacatgctgctgcccctgctgcagaccgtgttccccctggactacatcctgatcaccatcatcatcatgtacttcatcttcaccagcatggccggcatcagaaacatcggcatctggttcttctggatcagactgtacaagatcagaagaggcagaaccagaccccaggccctgctgttcctgtgcatgatcctgctgctgatcgtgctgcacaccagctacatgatctacagcctggccccccagtacgtgatgtacggcagccagaactacctgatcgagaccaacatcaccagcgacaaccacaagggcaacagcaccctgagcgtgcccaagagatgcgacgccgacgcccccgaggaccagtgcaccgtgaccagaacctacctgttcctgcacaagttctggttcttcagcgccgcctactacttcggcaactgggccttcctgggcgtgttcctgatcggcctgatcgtgagctgctgcaagggcaagaagagcgtgatcgagggcgtggacgaggacagcgacatcagcgacgacgagcccagcgtgtacagcgcctag

SEQ ID NO: 87308 - DNA, 939 bp, synthetic construct
  misc_feature 1..939: note = Description of Artificial Sequence: Synthetic coding sequence
  source 1..939: mol_type = other DNA
atgagctaccagaagaagcagcccaccccccagccccccgtggactgcgtgaagaccagcggcggcggcggcggcggcggcggcagcggcggcggcggctgcggcttcttcggcggcggcggcagcggcggcggcagcagcggcagcggctgcggctacagcggcggcggcggctacagcggcggcggctgcggcggcggcagcagcggcggcggcggcggcggcggcatcggcggctgcggcggcggcagcggcggcagcgtgaagtacagcggcggcggcggcagcagcggcggcggcagcggctgcttcagcagcggcggcggcggcagcggctgcttcagcagcggcggcggcggcagcagcggcggcggcagcggctgcttcagcagcggcggcggcggcagcagcggcggcggcagcggctgcttcagcagcggcggcggcggcttcagcggccaggccgtgcagtgccagagctacggcggcgtgagcagcggcggcagcagcggcggcggcagcggctgcttcagcagcggcggcggcggcggcagcgtgtgcggctacagcggcggcggcagcggctgcggcggcggcagcagcggcggcagcggcagcggctacgtgagcagccagcaggtgacccagaccagctgcgccccccagcccagctacggcggcggcagcagcggcggcggcggcagcggcggcagcggctgcttcagcagcggcggcggcggcggcagcagcggctgcggcggcggcagcagcggcatcggcagcggctgcatcatcagcggcggcggcagcgtgtgcggcggcggcagcagcggcggcggcggcggcggcagcagcgtgggcggcagcggcagcggcaagggcgtgcccatctgccaccagacccagcagaagcaggcccccacctggcccagcaagtag

SEQ ID NO: 87309 - DNA, 1002 bp, synthetic construct
  misc_feature 1..1002: note = Description of Artificial Sequence: Synthetic coding sequence
  source 1..1002: mol_type = other DNA
atgagctaccagaagaagcagcccaccccccagccccccgtggactgcgtgaagaccagcggcggcggcggcggcggcggcggcagcggcggcggcggctgcggcttcttcggcggcggcggcagcggcggcggcagcagcggcagcggctgcggctacagcggcggcggcggctacagcggcggcggctgcggcggcggcagcagcggcggcggcggcggcggcggcatcggcggctgcggcggcggcagcggcggcagcgtgaagtacagcggcggcggcggcagcagcggcggcggcagcggctgcttcagcagcggcggcggcggcagcggctgcttcagcagcggcggcggcggcagcagcggcggcggcagcggctgcttcagcagcggcggcggcggcagcagcggcggcggcagcggctgcttcagcagcggcggcggcggcttcagcggccaggccgtgcagtgccagagctacggcggcgtgagcagcggcggcagcagcggcggcggcagcggctgcttcagcagcggcggcggcggcggcagcgtgtgcggctacagcggcggcggcagcggctgcggcggcggcagcagcggcggcagcggcagcggctacgtgagcagccagcaggtgacccagaccagctgcgccccccagcccagctacggcggcggcgtgagaagaagaagacagagaagaaagagactgctgctgcagagaagaggcagaagagagctgagactgagaagaagactgctgagagactggcagagactgcaccaccagtggagaggcctgagactgagaagatggttcctgtggagaagaagaagaagactgctgagaggctggctgagagagtggcagggcagacccgacctgccccccgaccccgccgaggccggcgcctacctggccgtgcagatcgacccccccggctaccacggcggcgagggcgtgggcggcgtgttccagggccacagatgggcctag

SEQ ID NO: 87310 - DNA, 927 bp, synthetic construct
  misc_feature 1..927: note = Description of Artificial Sequence: Synthetic coding sequence
  source 1..927: mol_type = other DNA
atggacgccctgaagagcgccggcagagccctgatcagaagccccagcctggccaagcagagctggggcggcggcggcagacacagaaagctgcccgagaactggaccgacaccagagagaccctgctggagggcatgctgttcagcctgaagtacctgggcatgaccctggtggagcagcccaagggcgaggagctgagcgccgccgccatcaagagaatcgtggccaccgccaaggccagcggcaagaagctgcagaaggtgaccctgaaggtgagccccagaggcatcatcctgaccgacaacctgaccaaccagctgatcgagaacgtgagcatctacagaatcagctactgcaccgccgacaagatgcacgacaaggtgttcgcctacatcgcccagagccagcacaaccagagcctggagtgccacgccttcctgtgcaccaagagaaagatggcccaggccgtgaccctgaccgtggcccaggccttcaaggtggccttcgagttctggcaggtgagcaaggaggagaaggagaagagagacaaggccagccaggagggcggcgacgtgctgggcgccagacaggactgcacccccagcctgaagagcctggtggccaccggcaacctgctggacctggaggagaccgccaaggcccccctgagcaccgtgagcgccaacaccaccaacatggacgaggtgcccagaccccaggccctgagcggcagcagcgtggtgtgggagctggacgacggcctggacgaggccttcagcagactggcccagagcagaaccaacccccaggtgctggacaccggcctgaccgcccaggacatgcactacgcccagtgcctgagccccgtggactgggacaagcccgacagcagcggcaccgagcaggacgacctgttcagcttctag

SEQ ID NO: 87311 - DNA, 810 bp, synthetic construct; identical to SEQ ID NO: 76834
  misc_feature 1..810: note = Description of Artificial Sequence: Synthetic coding sequence
  source 1..810: mol_type = other DNA

SEQ ID NO: 87312 - DNA, 13635 bp, synthetic construct
  misc_feature 1..13635: note = Description of Artificial Sequence: Synthetic coding sequence
  source 1..13635: mol_type = other DNA
atgctgaccccccccctgctgctgctgctgcccctgctgagcgccctggtggccgccgccatcgacgcccccaagacctgcagccccaagcagttcgcctgcagagaccagatcacctgcatcagcaagggctggagatgcgacggcgagagagactgccccgacggcagcgacgaggcccccgagatctgcccccagagcaaggcccagagatgccagcccaacgagcacaactgcctgggcaccgagctgtgcgtgcccatgagcagactgtgcaacggcgtgcaggactgcatggacggcagcgacgagggcccccactgcagagagctgcagggcaactgcagcagactgggctgccagcaccactgcgtgcccaccctggacggccccacctgctactgcaacagcagcttccagctgcaggccgacggcaagacctgcaaggacttcgacgagtgcagcgtgtacggcacctgcagccagctgtgcaccaacaccgacggcagcttcatctgcggctgcgtggagggctacctgctgcagcccgacaacagaagctgcaaggccaagaacgagcccgtggacagaccccccgtgctgctgatcgccaacagccagaacatcctggccacctacctgagcggcgcccaggtgagcaccatcacccccaccagcaccagacagaccaccgccatggacttcagctacgccaacgagaccgtgtgctgggtgcacgtgggcgacagcgccgcccagacccagctgaagtgcgccagaatgcccggcctgaagggcttcgtggacgagcacaccatcaacatcagcctgagcctgcaccacgtggagcagatggccatcgactggctgaccggcaacttctacttcgtggacgacatcgacgacagaatcttcgtgtgcaacagaaacggcgacacctgcgtgaccctgctggacctggagctgtacaaccccaagggcatcgccctggaccccgccatgggcaaggtgttcttcaccgactacggccagatccccaaggtggagagatgcgacatggacggccagaacagaaccaagctggtggacagcaagatcgtgttcccccacggcatcaccctggacctggtgagcagactggtgtactgggccgacgcctacctggactacatcgaggtggtggactacgagggcaagggcagacagaccatcatccagggcatcctgatcgagcacctgtacggcctgaccgtgttcgagaactacctgtacgccaccaacagcgacaacgccaacgcccagcagaagaccagcgtgatcagagtgaacagattcaacagcaccgagtaccaggtggtgaccagagtggacaagggcggcgccctgcacatctaccaccagagaagacagcccagagtgagaagccacgcctgcgagaacgaccagtacggcaagcccggcggctgcagcgacatctgcctgctggccaacagccacaaggccagaacctgcagatgcagaagcggcttcagcctgggcagcgacggcaagagctgcaagaagcccgagcacgagctgttcctggtgtacggcaagggcagacccggcatcatcagaggcatggacatgggcgccaaggtgcccgacgagcacatgatccccatcgagaacctgatgaaccccagagccctggacttccacgccgagaccggcttcatctacttcgccgacaccaccagctacctgatcggcagacagaagatcgacggcaccgagagagagaccatcctgaaggacggcatccacaacgtggagggcgtggccgtggactggatgggcgacaacctgtactggaccgacgacggccccaagaagaccatcagcgtggccagactggagaaggccgcccagaccagaaagaccctgatcgagggcaagatgacccaccccagagccatcgtggtggaccccctgaacggctggatgtactggaccgactgggaggaggaccccaaggacagcagaagaggcagactggagagagcctggatggacggcagccacagagacatcttcgtgaccagcaagaccgtgctgtggcccaacggcctgagcctggacatccccgccggcagactgtactgggtggacgccttctacgacagaatcgagaccatcctgctgaacggcaccgacagaaagatcgtgtacgagggccccgagctgaaccacgccttcggcctgtgccaccacggcaactacctgttctggaccgagtacagaagcggcagcgtgtacagactggagagaggcgtgggcggcgccccccccaccgtgaccctgctgagaagcgagagaccccccatcttcgagatcagaatgtacgacgcccagcagcagcaggtgggcaccaacaagtgcagagtgaacaacggcggctgcagcagcctgtgcctggccacccccggcagcagacagtgcgcctgcgccgaggaccaggtgctggacgccgacggcgtgacctgcctggccaaccccagctacgtgccccccccccagtgccagcccggcgagttcgcctgcgccaacagcagatgcatccaggagagatggaagtgcgacggcgacaacgactgcctggacaacagcgacgaggcccccgccctgtgccaccagcacacctgccccagcgacagattcaagtgcgagaacaacagatgcatccccaacagatggctgtgcgacggcgacaacgactgcggcaacagcgaggacgagagcaacgccacctgcagcgccagaacctgcccccccaaccagttcagctgcgccagcggcagatgcatccccatcagctggacctgcgacctggacgacgactgcggcgacagaagcgacgagagcgccagctgcgcctaccccacctgcttccccctgacccagttcacctgcaacaacggcagatgcatcaacatcaactggagatgcgacaacgacaacgactgcggcgacaacagcgacgaggccggctgcagccacagctgcagcagcacccagttcaagtgcaacagcggcagatgcatccccgagcactggacctgcgacggcgacaacgactgcggcgactacagcgacgagacccacgccaactgcaccaaccaggccaccagaccccccggcggctgccacaccgacgagttccagtgcagactggacggcctgtgcatccccctgagatggagatgcgacggcgacaccgactgcatggacagcagcgacgagaagagctgcgagggcgtgacccacgtgtgcgaccccagcgtgaagttcggctgcaaggacagcgccagatgcatcagcaaggcctgggtgtgcgacggcgacaacgactgcgaggacaacagcgacgaggagaactgcgagagcctggcctgcagaccccccagccacccctgcgccaacaacaccagcgtgtgcctgccccccgacaagctgtgcgacggcaacgacgactgcggcgacggcagcgacgagggcgagctgtgcgaccagtgcagcctgaacaacggcggctgcagccacaactgcagcgtggcccccggcgagggcatcgtgtgcagctgccccctgggcatggagctgggccccgacaaccacacctgccagatccagagctactgcgccaagcacctgaagtgcagccagaagtgcgaccagaacaagttcagcgtgaagtgcagctgctacgagggctgggtgctggagcccgacggcgagagctgcagaagcctggaccccttcaagcccttcatcatcttcagcaacagacacgagatcagaagaatcgacctgcacaagggcgactacagcgtgctggtgcccggcctgagaaacaccatcgccctggacttccacctgagccagagcgccctgtactggaccgacgtggtggaggacaagatctacagaggcaagctgctggacaacggcgccctgaccagcttcgaggtggtgatccagtacggcctggccacccccgagggcctggccgtggactggatcgccggcaacatctactgggtggagagcaacctggaccagatcgaggtggccaagctggacggcaccctgagaaccaccctgctggccggcgacatcgagcaccccagagccatcgccctggaccccagagacggcatcctgttctggaccgactgggacgccagcctgcccagaatcgaggccgccagcatgagcggcgccggcagaagaaccgtgcacagagagaccggcagcggcggctggcccaacggcctgaccgtggactacctggagaagagaatcctgtggatcgacgccagaagcgacgccatctacagcgccagatacgacggcagcggccacatggaggtgctgagaggccacgagttcctgagccaccccttcgccgtgaccctgtacggcggcgaggtgtactggaccgactggagaaccaacaccctggccaaggccaacaagtggaccggccacaacgtgaccgtggtgcagagaaccaacacccagcccttcgacctgcaggtgtaccaccccagcagacagcccatggcccccaacccctgcgaggccaacggcggccagggcccctgcagccacctgtgcctgatcaactacaacagaaccgtgagctgcgcctgcccccacctgatgaagctgcacaaggacaacaccacctgctacgagttcaagaagttcctgctgtacgccagacagatggagatcagaggcgtggacctggacgccccctactacaactacatcatcagcttcaccgtgcccgacatcgacaacgtgaccgtgctggactacgacgccagagagcagagagtgtactggagcgacgtgagaacccaggccatcaagagagccttcatcaacggcaccggcgtggagaccgtggtgagcgccgacctgcccaacgcccacggcctggccgtggactgggtgagcagaaacctgttctggaccagctacgacaccaacaagaagcagatcaacgtggccagactggacggcagcttcaagaacgccgtggtgcagggcctggagcagccccacggcctggtggtgcaccccctgagaggcaagctgtactggaccgacggcgacaacatcagcatggccaacatggacggcagcaacagaaccctgctgttcagcggccagaagggccccgtgggcctggccatcgacttccccgagagcaagctgtactggatcagcagcggcaaccacaccatcaacagatgcaacctggacggcagcggcctggaggtgatcgacgccatgagaagccagctgggcaaggccaccgccctggccatcatgggcgacaagctgtggtgggccgaccaggtgagcgagaagatgggcacctgcagcaaggccgacggcagcggcagcgtggtgctgagaaacagcaccaccctggtgatgcacatgaaggtgtacgacgagagcatccagctggaccacaagggcaccaacccctgcagcgtgaacaacggcgactgcagccagctgtgcctgcccaccagcgagaccaccagaagctgcatgtgcaccgccggctacagcctgagaagcggccagcaggcctgcgagggcgtgggcagcttcctgctgtacagcgtgcacgagggcatcagaggcatccccctggaccccaacgacaagagcgacgccctggtgcccgtgagcggcaccagcctggccgtgggcatcgacttccacgccgagaacgacaccatctactgggtggacatgggcctgagcaccatcagcagagccaagagagaccagacctggagagaggacgtggtgaccaacggcatcggcagagtggagggcatcgccgtggactggatcgccggcaacatctactggaccgaccagggcttcgacgtgatcgaggtggccagactgaacggcagcttcagatacgtggtgatcagccagggcctggacaagcccagagccatcaccgtgcaccccgagaagggctacctgttctggaccgagtggggccagtaccccagaatcgagagaagcagactggacggcaccgagagagtggtgctggtgaacgtgagcatcagctggcccaacggcatcagcgtggactaccaggacggcaagctgtactggtgcgacgccagaaccgacaagatcgagagaatcgacctggagaccggcgagaacagagaggtggtgctgagcagcaacaacatggacatgttcagcgtgagcgtgttcgaggacttcatctactggagcgacagaacccacgccaacggcagcatcaagagaggcagcaaggacaacgccaccgacagcgtgcccctgagaaccggcatcggcgtgcagctgaaggacatcaaggtgttcaacagagacagacagaagggcaccaacgtgtgcgccgtggccaacggcggctgccagcagctgtgcctgtacagaggcagaggccagagagcctgcgcctgcgcccacggcatgctggccgaggacggcgccagctgcagagagtacgccggctacctgctgtacagcgagagaaccatcctgaagagcatccacctgagcgacgagagaaacctgaacgcccccgtgcagcccttcgaggaccccgagcacatgaagaacgtgatcgccctggccttcgactacagagccggcaccagccccggcacccccaacagaatcttcttcagcgacatccacttcggcaacatccagcagatcaacgacgacggcagcagaagaatcaccatcgtggagaacgtgggcagcgtggagggcctggcctaccacagaggctgggacaccctgtactggaccagctacaccaccagcaccatcaccagacacaccgtggaccagaccagacccggcgccttcgagagagagaccgtgatcaccatgagcggcgacgaccaccccagagccttcgtgctggacgagtgccagaacctgatgttctggaccaactggaacgagcagcaccccagcatcatgagagccgccctgagcggcgccaacgtgctgaccctgatcgagaaggacatcagaacccccaacggcctggccatcgaccacagagccgagaagctgtacttcagcgacgccaccctggacaagatcgagagatgcgagtacgacggcagccacagatacgtgatcctgaagagcgagcccgtgcaccccttcggcctggccgtgtacggcgagcacatcttctggaccgactgggtgagaagagccgtgcagagagccaacaagcacgtgggcagcaacatgaagctgctgagagtggacatcccccagcagcccatgggcatcatcgccgtggccaacgacaccaacagctgcgagctgagcccctgcagaatcaacaacggcggctgccaggacctgtgcctgctgacccaccagggccacgtgaactgcagctgcagaggcggcagaatcctgcaggacgacctgacctgcagagccgtgaacagcagctgcagagcccaggacgagttcgagtgcgccaacggcgagtgcatcaacttcagcctgacctgcgacggcgtgccccactgcaaggacaagagcgacgagaagcccagctactgcaacagcagaagatgcaagaagaccttcagacagtgcagcaacggcagatgcgtgagcaacatgctgtggtgcaacggcgccgacgactgcggcgacggcagcgacgagatcccctgcaacaagaccgcctgcggcgtgggcgagttcagatgcagagacggcacctgcatcggcaacagcagcagatgcaaccagttcgtggactgcgaggacgccagcgacgagatgaactgcagcgccaccgactgcagcagctacttcagactgggcgtgaagggcgtgctgttccagccctgcgagagaaccagcctgtgctacgcccccagctgggtgtgcgacggcgccaacgactgcggcgactacagcgacgagagagactgccccggcgtgaagagacccagatgccccctgaactacttcgcctgccccagcggcagatgcatccccatgagctggacctgcgacaaggaggacgactgcgagcacggcgaggacgagacccactgcaacaagttctgcagcgaggcccagttcgagtgccagaaccacagatgcatcagcaagcagtggctgtgcgacggcagcgacgactgcggcgacggcagcgacgaggccgcccactgcgagggcaagacctgcggccccagcagcttcagctgccccggcacccacgtgtgcgtgcccgagagatggctgtgcgacggcgacaaggactgcgccgacggcgccgacgagagcatcgccgccggctgcctgtacaacagcacctgcgacgacagagagttcatgtgccagaacagacagtgcatccccaagcacttcgtgtgcgaccacgacagagactgcgccgacggcagcgacgagagccccgagtgcgagtaccccacctgcggccccagcgagttcagatgcgccaacggcagatgcctgagcagcagacagtgggagtgcgacggcgagaacgactgccacgaccagagcgacgaggcccccaagaacccccactgcaccagccaggagcacaagtgcaacgccagcagccagttcctgtgcagcagcggcagatgcgtggccgaggccctgctgtgcaacggccaggacgactgcggcgacagcagcgacgagagaggctgccacatcaacgagtgcctgagcagaaagctgagcggctgcagccaggactgcgaggacctgaagatcggcttcaagtgcagatgcagacccggcttcagactgaaggacgacggcagaacctgcgccgacgtggacgagtgcagcaccaccttcccctgcagccagagatgcatcaacacccacggcagctacaagtgcctgtgcgtggagggctacgcccccagaggcggcgacccccacagctgcaaggccgtgaccgacgaggagcccttcctgatcttcgccaacagatactacctgagaaagctgaacctggacggcagcaactacaccctgctgaagcagggcctgaacaacgccgtggccctggacttcgactacagagagcagatgatctactggaccgacgtgaccacccagggcagcatgatcagaagaatgcacctgaacggcagcaacgtgcaggtgctgcacagaaccggcctgagcaaccccgacggcctggccgtggactgggtgggcggcaacctgtactggtgcgacaagggcagagacaccatcgaggtgagcaagctgaacggcgcctacagaaccgtgctggtgagcagcggcctgagagagcccagagccctggtggtggacgtgcagaacggctacctgtactggaccgactggggcgaccacagcctgatcggcagaatcggcatggacggcagcagcagaagcgtgatcgtggacaccaagatcacctggcccaacggcctgaccctggactacgtgaccgagagaatctactgggccgacgccagagaggactacatcgagttcgccagcctggacggcagcaacagacacgtggtgctgagccaggacatcccccacatcttcgccctgaccctgttcgaggactacgtgtactggaccgactgggagaccaagagcatcaacagagcccacaagaccaccggcaccaacaagaccctgctgatcagcaccctgcacagacccatggacctgcacgtgttccacgccctgagacagcccgacgtgcccaaccacccctgcaaggtgaacaacggcggctgcagcaacctgtgcctgctgagccccggcggcggccacaagtgcgcctgccccaccaacttctacctgggcagcgacggcagaacctgcgtgagcaactgcaccgccagccagttcgtgtgcaagaacgacaagtgcatccccttctggtggaagtgcgacaccgaggacgactgcggcgaccacagcgacgagccccccgactgccccgagttcaagtgcagacccggccagttccagtgcagcaccggcatctgcaccaaccccgccttcatctgcgacggcgacaacgactgccaggacaacagcgacgaggccaactgcgacatccacgtgtgcctgcccagccagttcaagtgcaccaacaccaacagatgcatccccggcatcttcagatgcaacggccaggacaactgcggcgacggcgaggacgagagagactgccccgaggtgacctgcgcccccaaccagttccagtgcagcatcaccaagagatgcatccccagagtgtgggtgtgcgacagagacaacgactgcgtggacggcagcgacgagcccgccaactgcacccagatgacctgcggcgtggacgagttcagatgcaaggacagcggcagatgcatccccgccagatggaagtgcgacggcgaggacgactgcggcgacggcagcgacgagcccaaggaggagtgcgacgagagaacctgcgagccctaccagttcagatgcaagaacaacagatgcgtgcccggcagatggcagtgcgactacgacaacgactgcggcgacaacagcgacgaggagagctgcacccccagaccctgcagcgagagcgagttcagctgcgccaacggcagatgcatcgccggcagatggaagtgcgacggcgaccacgactgcgccgacggcagcgacgagaaggactgcacccccagatgcgacatggaccagttccagtgcaagagcggccactgcatccccctgagatggagatgcgacgccgacgccgactgcatggacggcagcgacgaggaggcctgcggcaccggcgtgagaacctgccccctggacgagttccagtgcaacaacaccctgtgcaagcccctggcctggaagtgcgacggcgaggacgactgcggcgacaacagcgacgagaaccccgaggagtgcgccagattcgtgtgcccccccaacagacccttcagatgcaagaacgacagagtgtgcctgtggatcggcagacagtgcgacggcaccgacaactgcggcgacggcaccgacgaggaggactgcgagccccccaccgcccacaccacccactgcaaggacaagaaggagttcctgtgcagaaaccagagatgcctgagcagcagcctgagatgcaacatgttcgacgactgcggcgacggcagcgacgaggaggactgcagcatcgaccccaagctgaccagctgcgccaccaacgccagcatctgcggcgacgaggccagatgcgtgagaaccgagaaggccgcctactgcgcctgcagaagcggcttccacaccgtgcccggccagcccggctgccaggacatcaacgagtgcctgagattcggcacctgcagccagctgtgcaacaacaccaagggcggccacctgtgcagctgcgccagaaacttcatgaagacccacaacacctgcaaggccgagggcagcgagtaccaggtgctgtacatcgccgacgacaacgagatcagaagcctgttccccggccacccccacagcgcctacgagcaggccttccagggcgacgagagcgtgagaatcgacgccatggacgtgcacgtgaaggccggcagagtgtactggaccaactggcacaccggcaccatcagctacagaagcctgccccccgccgccccccccaccaccagcaacagacacagaagacagatcgacagaggcgtgacccacctgaacatcagcggcctgaagatgcccagaggcatcgccatcgactgggtggccggcaacgtgtactggaccgacagcggcagagacgtgatcgaggtggcccagatgaagggcgagaacagaaagaccctgatcagcggcatgatcgacgagccccacgccatcgtggtggaccccctgagaggcaccatgtactggagcgactggggcaaccaccccaagatcgagaccgccgccatggacggcaccctgagagagaccctggtgcaggacaacatccagtggcccaccggcctggccgtggactaccacaacgagagactgtactgggccgacgccaagctgagcgtgatcggcagcatcagactgaacggcaccgaccccatcgtggccgccgacagcaagagaggcctgagccaccccttcagcatcgacgtgttcgaggactacatctacggcgtgacctacatcaacaacagagtgttcaagatccacaagttcggccacagccccctggtgaacctgaccggcggcctgagccacgccagcgacgtggtgctgtaccaccagcacaagcagcccgaggtgaccaacccctgcgacagaaagaagtgcgagtggctgtgcctgctgagccccagcggccccgtgtgcacctgccccaacggcaagagactggacaacggcacctgcgtgcccgtgcccagccccacccccccccccgacgcccccagacccggcacctgcaacctgcagtgcttcaacggcggcagctgcttcctgaacgccagaagacagcccaagtgcagatgccagcccagatacaccggcgacaagtgcgagctggaccagtgctgggagcactgcagaaacggcggcacctgcgccgccagccccagcggcatgcccacctgcagatgccccaccggcttcaccggccccaagtgcacccagcaggtgtgcgccggctactgcgccaacaacagcacctgcaccgtgaaccagggcaaccagccccagtgcagatgcctgcccggcttcctgggcgacagatgccagtacagacagtgcagcggctactgcgagaacttcggcacctgccagatggccgccgacggcagcagacagtgcagatgcaccgcctacttcgagggcagcagatgcgaggtgaacaagtgcagcagatgcctggagggcgcctgcgtggtgaacaagcagagcggcgacgtgacctgcaactgcaccgacggcagagtggcccccagctgcctgacctgcgtgggccactgcagcaacggcggcagctgcaccatgaacagcaagatgatgcccgagtgccagtgccccccccacatgaccggccccagatgcgaggagcacgtgttcagccagcagcagcccggccacatcgccagcatcctgatccccctgctgctgctgctgctgctggtgctggtggccggcgtggtgttctggtacaagagaagagtgcagggcgccaagggcttccagcaccagagaatgaccaacggcgccatgaacgtggagatcggcaaccccacctacaagatgtacgagggcggcgagcccgacgacgtgggcggcctgctggacgccgacttcgccctggaccccgacaagcccaccaacttcaccaaccccgtgtacgccaccctgtacatgggcggccacggcagcagacacagcctggccagcaccgacgagaagagagagctgctgggcagaggccccgaggacgagatcggcgaccccctggcctag

SEQ ID NO: 87313 - DNA, 2142 bp, synthetic construct
  misc_feature 1..2142: note = Description of Artificial Sequence: Synthetic coding sequence
  source 1..2142: mol_type = other DNA
atgctgctggccaccctgctgctgctgctgctgggcggcgccctggcccaccccgacagaatcatcttccccaaccacgcctgcgaggacccccccgccgtgctgctggaggtgcagggcaccctgcagagacccctggtgagagacagcagaaccagccccgccaactgcacctggctgatcctgggcagcaaggagcagaccgtgaccatcagattccagaagctgcacctggcctgcggcagcgagagactgaccctgagaagccccctgcagcccctgatcagcctgtgcgaggccccccccagccccctgcagctgcccggcggcaacgtgaccatcacctacagctacgccggcgccagagcccccatgggccagggcttcctgctgagctacagccaggactggctgatgtgcctgcaggaggagttccagtgcctgaaccacagatgcgtgagcgccgtgcagagatgcgacggcgtggacgcctgcggcgacggcagcgacgaggccggctgcagcagcgaccccttccccggcctgacccccagacccgtgcccagcctgccctgcaacgtgaccctggaggacttctacggcgtgttcagcagccccggctacacccacctggccagcgtgagccacccccagagctgccactggctgctggacccccacgacggcagaagactggccgtgagattcaccgccctggacctgggcttcggcgacgccgtgcacgtgtacgacggccccggcccccccgagagcagcagactgctgagaagcctgacccacttcagcaacggcaaggccgtgaccgtggagaccctgagcggccaggccgtggtgagctaccacaccgtggcctggagcaacggcagaggcttcaacgccacctaccacgtgagaggctactgcctgccctgggacagaccctgcggcctgggcagcggcctgggcgccggcgagggcctgggcgagagatgctacagcgaggcccagagatgcgacggcagctgggactgcgccgacggcaccgacgaggaggactgccccggctgcccccccggccacttcccctgcggcgccgccggcaccagcggcgccaccgcctgctacctgcccgccgacagatgcaactaccagaccttctgcgccgacggcgccgacgagagaagatgcagacactgccagcccggcaacttcagatgcagagacgagaagtgcgtgtacgagacctgggtgtgcgacggccagcccgactgcgccgacggcagcgacgagtgggactgcagctacgtgctgcccagaaaggtgatcaccgccgccgtgatcggcagcctggtgtgcggcctgctgctggtgatcgccctgggctgcacctgcaagctgtacgccatcagaacccaggagtacagcatcttcgcccccctgagcagaatggaggccgagatcgtgcagcagcaggccccccccagctacggccagctgatcgcccagggcgccatcccccccgtggaggacttccccaccgagaaccccaacgacaacagcgtgctgggcaacctgagaagcctgctgcagatcctgagacaggacatgacccccggcggcggccccggcgccagaagaagacagagaggcagactgatgagaagactggtgagaagactgagaagatggggcctgctgcccagaaccaacacccccgccagagccagcgaggccagaagccaggtgacccccagcgccgcccccctggaggccctggacggcggcaccggccccgccagagagggcggcgccgtgggcggccaggacggcgagcaggccccccccctgcccatcaaggcccccctgcccagcgccagcaccagccccgcccccaccaccgtgcccgaggcccccggccccctgcccagcctgcccctggagcccagcctgctgagcggcgtggtgcaggccctgagaggcagactgctgcccagcctgggcccccccggccccaccagaagcccccccggcccccacaccgccgtgctggccctggaggacgaggacgacgtgctgctggtgcccctggccgagcccggcgtgtgggtggccgaggccgaggacgagcccctgctgacctag

SEQ ID NO: 87314 - DNA, 1671 bp, synthetic construct
  misc_feature 1..1671: note = Description of Artificial Sequence: Synthetic coding sequence
  source 1..1671: mol_type = other DNA
atgctgctggccaccctgctgctgctgctgctgggcggcgccctggcccaccccgacagaatcatcttccccaaccacgcctgcgaggacccccccgccgtgctgctggaggtgcagggcaccctgcagagacccctggtgagagacagcagaaccagccccgccaactgcacctggctgatcctgggcagcaaggagcagaccgtgaccatcagattccagaagctgcacctggcctgcggcagcgagagactgaccctgagaagccccctgcagcccctgatcagcctgtgcgaggccccccccagccccctgcagctgcccggcggcaacgtgaccatcacctacagctacgccggcgccagagcccccatgggccagggcttcctgctgagctacagccaggactggctgatgtgcctgcaggaggagttccagtgcctgaaccacagatgcgtgagcgccgtgcagagatgcgacggcgtggacgcctgcggcgacggcagcgacgaggccggctgcagcagcgaccccttccccggcctgacccccagacccgtgcccagcctgccctgcaacgtgaccctggaggacttctacggcgtgttcagcagccccggctacacccacctggccagcgtgagccacccccagagctgccactggctgctggacccccacgacggcagaagactggccgtgagattcaccgccctggacctgggcttcggcgacgccgtgcacgtgtacgacggccccggcccccccgagagcagcagactgctgagaagcctgacccacttcagcaacggcaaggccgtgaccgtggagaccctgagcggccaggccgtggtgagctaccacaccgtggcctggagcaacggcagaggcttcaacgccacctaccacgtgagaggctactgcctgccctgggacagaccctgcggcctgggcagcggcctgggcgccggcgagggcctgggcgagagatgctacagcgaggcccagagatgcgacggcagctgggactgcgccgacggcaccgacgaggaggactgccccggctgcccccccggccacttcccctgcggcgccgccggcaccagcggcgccaccgcctgctacctgcccgccgacagatgcaactaccagaccttctgcgccgacggcgccgacgagagaagatgcagacactgccagcccggcaacttcagatgcagagacgagaagtgcgtgtacgagacctgggtgtgcgacggccagcccgactgcgccgacggcagcgacgagtgggactgcagctacgtgctgcccagaaaggtgatcaccgccgccgtgatcggcagcctggtgtgcggcctgctgctggtgatcgccctgggctgcacctgcaagctgtacgccatcagaacccaggagtacagcatcttcgcccccctgagcagaatggaggccgagatcgtgcagcagcaggccccccccagctacggccagctgatcgcccagggcgccatcccccccgtggaggacttccccaccgagaaccccaacgacaacagcgtgctgggcaacctgagaagcctgctgcagatcctgagacaggacatgacccccggcggcggccccggcgccagaagaagacagagaggcagactgatgagaagactgtag

SEQ ID NO: 87315 - DNA, 13968 bp, synthetic construct
  misc_feature 1..13968: note = Description of Artificial Sequence: Synthetic coding sequence
  source 1..13968: mol_type = other DNA
atggacagaggccccgccgccgtggcctgcaccctgctgctggccctggtggcctgcctggcccccgccagcggccaggagtgcgacagcgcccacttcagatgcggcagcggccactgcatccccgccgactggagatgcgacggcaccaaggactgcagcgacgacgccgacgagatcggctgcgccgtggtgacctgccagcagggctacttcaagtgccagagcgagggccagtgcatccccaacagctgggtgtgcgaccaggaccaggactgcgacgacggcagcgacgagagacaggactgcagccagagcacctgcagcagccaccagatcacctgcagcaacggccagtgcatccccagcgagtacagatgcgaccacgtgagagactgccccgacggcgccgacgagaacgactgccagtaccccacctgcgagcagctgacctgcgacaacggcgcctgctacaacaccagccagaagtgcgactggaaggtggactgcagagacagcagcgacgagatcaactgcaccgagatctgcctgcacaacgagttcagctgcggcaacggcgagtgcatccccagagcctacgtgtgcgaccacgacaacgactgccaggacggcagcgacgagcacgcctgcaactaccccacctgcggcggctaccagttcacctgccccagcggcagatgcatctaccagaactgggtgtgcgacggcgaggacgactgcaaggacaacggcgacgaggacggctgcgagagcggcccccacgacgtgcacaagtgcagccccagagagtggagctgccccgagagcggcagatgcatcagcatctacaaggtgtgcgacggcatcctggactgccccggcagagaggacgagaacaacaccagcaccggcaagtactgcagcatgaccctgtgcagcgccctgaactgccagtaccagtgccacgagaccccctacggcggcgcctgcttctgcccccccggctacatcatcaaccacaacgacagcagaacctgcgtggagttcgacgactgccagatctggggcatctgcgaccagaagtgcgagagcagacccggcagacacctgtgccactgcgaggagggctacatcctggagagaggccagtactgcaaggccaacgacagcttcggcgaggccagcatcatcttcagcaacggcagagacctgctgatcggcgacatccacggcagaagcttcagaatcctggtggagagccagaacagaggcgtggccgtgggcgtggccttccactaccacctgcagagagtgttctggaccgacaccgtgcagaacaaggtgttcagcgtggacatcaacggcctgaacatccaggaggtgctgaacgtgagcgtggagacccccgagaacctggccgtggactgggtgaacaacaagatctacctggtggagaccaaggtgaacagaatcgacatggtgaacctggacggcagctacagagtgaccctgatcaccgagaacctgggccaccccagaggcatcgccgtggaccccaccgtgggctacctgttcttcagcgactgggagagcctgagcggcgagcccaagctggagagagccttcatggacggcagcaacagaaaggacctggtgaagaccaagctgggctggcccgccggcgtgaccctggacatgatcagcaagagagtgtactgggtggacagcagattcgactacatcgagaccgtgacctacgacggcatccagagaaagaccgtggtgcacggcggcagcctgatcccccaccccttcggcgtgagcctgttcgagggccaggtgttcttcaccgactggaccaagatggccgtgctgaaggccaacaagttcaccgagaccaacccccaggtgtactaccaggccagcctgagaccctacggcgtgaccgtgtaccacagcctgagacagccctacgccaccaacccctgcaaggacaacaacggcggctgcgagcaggtgtgcgtgctgagccacagaaccgacaacgacggcctgggcttcagatgcaagtgcaccttcggcttccagctggacaccgacgagagacactgcatcgccgtgcagaacttcctgatcttcagcagccaggtggccatcagaggcatccccttcaccctgagcacccaggaggacgtgatggtgcccgtgagcggcaaccccagcttcttcgtgggcatcgacttcgacgcccaggacagcaccatcttcttcagcgacatgagcaagcacatgatcttcaagcagaagatcgacggcaccggcagagagatcctggccgccaacagagtggagaacgtggagagcctggccttcgactggatcagcaagaacctgtactggaccgacagccactacaagagcatcagcgtgatgagactggccgacaagaccagaagaaccgtggtgcagtacctgaacaaccccagaagcgtggtggtgcaccccttcgccggctacctgttcttcaccgactggttcagacccgccaagatcatgagagcctggagcgacggcagccacctgctgcccgtgatcaacaccaccctgggctggcccaacggcctggccatcgactgggccgccagcagactgtactgggtggacgcctacttcgacaagatcgagcacagcaccttcgacggcctggacagaagaagactgggccacatcgagcagatgacccaccccttcggcctggccatcttcggcgagcacctgttcttcaccgactggagactgggcgccatcatcagagtgagaaaggccgacggcggcgagatgaccgtgatcagaagcggcatcgcctacatcctgcacctgaagagctacgacgtgaacatccagaccggcagcaacgcctgcaaccagcccacccaccccaacggcgactgcagccacttctgcttccccgtgcccaacttccagagagtgtgcggctgcccctacggcatgagactggccagcaaccacctgacctgcgagggcgaccccaccaacgagccccccaccgagcagtgcggcctgttcagcttcccctgcaagaacggcagatgcgtgcccaactactacctgtgcgacggcgtggacgactgccacgacaacagcgacgagcagctgtgcggcaccctgaacaacacctgcagcagcagcgccttcacctgcggccacggcgagtgcatccccgcccactggagatgcgacaagagaaacgactgcgtggacggcagcgacgagcacaactgccccacccacgcccccgccagctgcctggacacccagtacacctgcgacaaccaccagtgcatcagcaagaactgggtgtgcgacaccgacaacgactgcggcgacggcagcgacgagaagaactgcaacagcaccgagacctgccagcccagccagttcaactgccccaaccacagatgcatcgacctgagcttcgtgtgcgacggcgacaaggactgcgtggacggcagcgacgaggtgggctgcgtgctgaactgcaccgccagccagttcaagtgcgccagcggcgacaagtgcatcggcgtgaccaacagatgcgacggcgtgttcgactgcagcgacaacagcgacgaggccggctgccccaccagaccccccggcatgtgccacagcgacgagttccagtgccaggaggacggcatctgcatccccaacttctgggagtgcgacggccaccccgactgcctgtacggcagcgacgagcacaacgcctgcgtgcccaagacctgccccagcagctacttccactgcgacaacggcaactgcatccacagagcctggctgtgcgacagagacaacgactgcggcgacatgagcgacgagaaggactgccccacccagcccttcagatgccccagctggcagtggcagtgcctgggccacaacatctgcgtgaacctgagcgtggtgtgcgacggcatcttcgactgccccaacggcaccgacgagagccccctgtgcaacggcaacagctgcagcgacttcaacggcggctgcacccacgagtgcgtgcaggagcccttcggcgccaagtgcctgtgccccctgggcttcctgctggccaacgacagcaagacctgcgaggacatcgacgagtgcgacatcctgggcagctgcagccagcactgctacaacatgagaggcagcttcagatgcagctgcgacaccggctacatgctggagagcgacggcagaacctgcaaggtgaccgccagcgagagcctgctgctgctggtggccagccagaacaagatcatcgccgacagcgtgaccagccaggtgcacaacatctacagcctggtggagaacggcagctacatcgtggccgtggacttcgacagcatcagcggcagaatcttctggagcgacgccacccagggcaagacctggagcgccttccagaacggcaccgacagaagagtggtgttcgacagcagcatcatcctgaccgagaccatcgccatcgactgggtgggcagaaacctgtactggaccgactacgccctggagaccatcgaggtgagcaagatcgacggcagccacagaaccgtgctgatcagcaagaacctgaccaaccccagaggcctggccctggaccccagaatgaacgagcacctgctgttctggagcgactggggccaccaccccagaatcgagagagccagcatggacggcagcatgagaaccgtgatcgtgcaggacaagatcttctggccctgcggcctgaccatcgactaccccaacagactgctgtacttcatggacagctacctggactacatggacttctgcgactacaacggccaccacagaagacaggtgatcgccagcgacctgatcatcagacacccctacgccctgaccctgttcgaggacagcgtgtactggaccgacagagccaccagaagagtgatgagagccaacaagtggcacggcggcaaccagagcgtggtgatgtacaacatccagtggcccctgggcatcgtggccgtgcaccccagcaagcagcccaacagcgtgaacccctgcgccttcagcagatgcagccacctgtgcctgctgagcagccagggcccccacttctacagctgcgtgtgccccagcggctggagcctgagccccgacctgctgaactgcctgagagacgaccagcccttcctgatcaccgtgagacagcacatcatcttcggcatcagcctgaaccccgaggtgaagagcaacgacgccatggtgcccatcgccggcatccagaacggcctggacgtggagttcgacgacgccgagcagtacatctactgggtggagaaccccggcgagatccacagagtgaagaccgacggcaccaacagaaccgtgttcgccagcatcagcatggtgggccccagcatgaacctggccctggactggatcagcagaaacctgtacagcaccaaccccagaacccagagcatcgaggtgctgaccctgcacggcgacatcagatacagaaagaccctgatcgccaacgacggcaccgccctgggcgtgggcttccccatcggcatcaccgtggaccccgccagaggcaagctgtactggagcgaccagggcaccgacagcggcgtgcccgccaagatcgccagcgccaacatggacggcaccagcgtgaagaccctgttcaccggcaacctggagcacctggagtgcgtgaccctggacatcgaggagcagaagctgtactgggccgtgaccggcagaggcgtgatcgagagaggcaacgtggacggcaccgacagaatgatcctggtgcaccagctgagccacccctggggcatcgccgtgcacgacagcttcctgtactacaccgacgagcagtacgaggtgatcgagagagtggacaaggccaccggcgccaacaagatcgtgctgagagacaacgtgcccaacctgagaggcctgcaggtgtaccacagaagaaacgccgccgagagcagcaacggctgcagcaacaacatgaacgcctgccagcagatctgcctgcccgtgcccggcggcctgttcagctgcgcctgcgccaccggcttcaagctgaaccccgacaacagaagctgcagcccctacaacagcttcatcgtggtgagcatgctgagcgccatcagaggcttcagcctggagctgagcgaccacagcgagaccatggtgcccgtggccggccagggcagaaacgccctgcacgtggacgtggacgtgagcagcggcttcatctactggtgcgacttcagcagcagcgtggccagcgacaacgccatcagaagaatcaagcccgacggcagcagcctgatgaacatcgtgacccacggcatcggcgagaacggcgtgagaggcatcgccgtggactgggtggccggcaacctgtacttcaccaacgccttcgtgagcgagaccctgatcgaggtgctgagaatcaacaccacctacagaagagtgctgctgaaggtgaccgtggacatgcccagacacatcgtggtggaccccaagaacagatacctgttctgggccgactacggccagagacccaagatcgagagaagcttcctggactgcaccaacagaaccgtgctggtgagcgagggcatcgtgacccccagaggcctggccgtggacagaagcgacggctacgtgtactgggtggacgacagcctggacatcatcgccagaatcagaatcaacggcgagaacagcgaggtgatcagatacggcagcagataccccaccccctacggcatcaccgtgttcgagaacagcatcatctgggtggacagaaacctgaagaagatcttccaggccagcaaggagcccgagaacaccgagccccccaccgtgatcagagacaacatcaactggctgagagacgtgaccatcttcgacaagcaggtgcagcccagaagccccgccgaggtgaacaacaacccctgcctggagaacaacggcggctgcagccacctgtgcttcgccctgcccggcctgcacacccccaagtgcgactgcgccttcggcaccctgcagagcgacggcaagaactgcgccatcagcaccgagaacttcctgatcttcgccctgagcaacagcctgagaagcctgcacctggaccccgagaaccacagcccccccttccagaccatcaacgtggagagaaccgtgatgagcctggactacgacagcgtgagcgacagaatctacttcacccagaacctggccagcggcgtgggccagatcagctacgccaccctgagcagcggcatccacacccccaccgtgatcgccagcggcatcggcaccgccgacggcatcgccttcgactggatcaccagaagaatctactacagcgactacctgaaccagatgatcaacagcatggccgaggacggcagcaacagaaccgtgatcgccagagtgcccaagcccagagccatcgtgctggacccctgccagggctacctgtactgggccgactgggacacccacgccaagatcgagagagccaccctgggcggcaacttcagagtgcccatcgtgaacagcagcctggtgatgcccagcggcctgaccctggactacgaggaggacctgctgtactgggtggacgccagcctgcagagaatcgagagaagcaccctgaccggcgtggacagagaggtgatcgtgaacgccgccgtgcacgccttcggcctgaccctgtacggccagtacatctactggaccgacctgtacacccagagaatctacagagccaacaagtacgacggcagcggccagatcgccatgaccaccaacctgctgagccagcccagaggcatcaacaccgtggtgaagaaccagaagcagcagtgcaacaacccctgcgagcagttcaacggcggctgcagccacatctgcgcccccggccccaacggcgccgagtgccagtgcccccacgagggcaactggtacctggccaacaacagaaagcactgcatcgtggacaacggcgagagatgcggcgccagcagcttcacctgcagcaacggcagatgcatcagcgaggagtggaagtgcgacaacgacaacgactgcggcgacggcagcgacgagatggagagcgtgtgcgccctgcacacctgcagccccaccgccttcacctgcgccaacggcagatgcgtgcagtacagctacagatgcgactactacaacgactgcggcgacggcagcgacgaggccggctgcctgttcagagactgcaacgccaccaccgagttcatgtgcaacaacagaagatgcatccccagagagttcatctgcaacggcgtggacaactgccacgacaacaacaccagcgacgagaagaactgccccgacagaacctgccagagcggctacaccaagtgccacaacagcaacatctgcatccccagagtgtacctgtgcgacggcgacaacgactgcggcgacaacagcgacgagaaccccacctactgcaccacccacacctgcagcagcagcgagttccagtgcgccagcggcagatgcatcccccagcactggtactgcgaccaggagaccgactgcttcgacgccagcgacgagcccgccagctgcggccacagcgagagaacctgcctggccgacgagttcaagtgcgacggcggcagatgcatccccagcgagtggatctgcgacggcgacaacgactgcggcgacatgagcgacgaggacaagagacaccagtgccagaaccagaactgcagcgacagcgagttcctgtgcgtgaacgacagaccccccgacagaagatgcatcccccagagctgggtgtgcgacggcgacgtggactgcaccgacggctacgacgagaaccagaactgcaccagaagaacctgcagcgagaacgagttcacctgcggctacggcctgtgcatccccaagatcttcagatgcgacagacacaacgactgcggcgactacagcgacgagagaggctgcctgtaccagacctgccagcagaaccagttcacctgccagaacggcagatgcatcagcaagaccttcgtgtgcgacgaggacaacgactgcggcgacggcagcgacgagctgatgcacctgtgccacacccccgagcccacctgccccccccacgagttcaagtgcgacaacggcagatgcatcgagatgatgaagctgtgcaaccacctggacgactgcctggacaacagcgacgagaagggctgcggcatcaacgagtgccacgaccccagcatcagcggctgcgaccacaactgcaccgacaccctgaccagcttctactgcagctgcagacccggctacaagctgatgagcgacaagagaacctgcgtggacatcgacgagtgcaccgagatgcccttcgtgtgcagccagaagtgcgagaacgtgatcggcagctacatctgcaagtgcgcccccggctacctgagagagcccgacggcaagacctgcagacagaacagcaacatcgagccctacctgatcttcagcaacagatactacctgagaaacctgaccatcgacggctacttctacagcctgatcctggagggcctggacaacgtggtggccctggacttcgacagagtggagaagagactgtactggatcgacacccagagacaggtgatcgagagaatgttcctgaacaagaccaacaaggagaccatcatcaaccacagactgcccgccgccgagagcctggccgtggactgggtgagcagaaagctgtactggctggacgccagactggacggcctgttcgtgagcgacctgaacggcggccacagaagaatgctggcccagcactgcgtggacgccaacaacaccttctgcttcgacaaccccagaggcctggccctgcacccccagtacggctacctgtactgggccgactggggccacagagcctacatcggcagagtgggcatggacggcaccaacaagagcgtgatcatcagcaccaagctggagtggcccaacggcatcaccatcgactacaccaacgacctgctgtactgggccgacgcccacctgggctacatcgagtacagcgacctggagggccaccacagacacaccgtgtacgacggcgccctgccccaccccttcgccatcaccatcttcgaggacaccatctactggaccgactggaacaccagaaccgtggagaagggcaacaagtacgacggcagcaacagacagaccctggtgaacaccacccacagacccttcgacatccacgtgtaccacccctacagacagcccatcgtgagcaacccctgcggcaccaacaacggcggctgcagccacctgtgcctgatcaagcccggcggcaagggcttcacctgcgagtgccccgacgacttcagaaccctgcagctgagcggcagcacctactgcatgcccatgtgcagcagcacccagttcctgtgcgccaacaacgagaagtgcatccccatctggtggaagtgcgacggccagaaggactgcagcgacggcagcgacgagctggccctgtgcccccagagattctgcagactgggccagttccagtgcagcgacggcaactgcaccagcccccagaccctgtgcaacgcccaccagaactgccccgacggcagcgacgaggacagactgctgtgcgagaaccaccactgcgacagcaacgagtggcagtgcgccaacaagagatgcatccccgagagctggcagtgcgacaccttcaacgactgcgaggacaacagcgacgaggacagcagccactgcgccagcagaacctgcagacccggccagttcagatgcgccaacggcagatgcatcccccaggcctggaagtgcgacgtggacaacgactgcggcgaccacagcgacgagcccatcgaggagtgcatgagcagcgcccacctgtgcgacaacttcaccgagttcagctgcaagaccaactacagatgcatccccaagtgggccgtgtgcaacggcgtggacgactgcagagacaacagcgacgagcagggctgcgaggagagaacctgccaccccgtgggcgacttcagatgcaagaaccaccactgcatccccctgagatggcagtgcgacggccagaacgactgcggcgacaacagcgacgaggagaactgcgcccccagagagtgcaccgagagcgagttcagatgcgtgaaccagcagtgcatccccagcagatggatctgcgaccactacaacgactgcggcgacaacagcgacgagagagactgcgagatgagaacctgccaccccgagtacttccagtgcaccagcggccactgcgtgcacagcgagctgaagtgcgacggcagcgccgactgcctggacgccagcgacgaggccgactgccccaccagattccccgacggcgcctactgccaggccaccatgttcgagtgcaagaaccacgtgtgcatccccccctactggaagtgcgacggcgacgacgactgcggcgacggcagcgacgaggagctgcacctgtgcctggacgtgccctgcaacagccccaacagattcagatgcgacaacaacagatgcatctacagccacgaggtgtgcaacggcgtggacgactgcggcgacggcaccgacgagaccgaggagcactgcagaaagcccacccccaagccctgcaccgagtacgagtacaagtgcggcaacggccactgcatcccccacgacaacgtgtgcgacgacgccgacgactgcggcgactggagcgacgagctgggctgcaacaagggcaaggagagaacctgcgccgagaacatctgcgagcagaactgcacccagctgaacgagggcggcttcatctgcagctgcaccgccggcttcgagaccaacgtgttcgacagaaccagctgcctggacatcaacgagtgcgagcagttcggcacctgcccccagcactgcagaaacaccaagggcagctacgagtgcgtgtgcgccgacggcttcaccagcatgagcgacagacccggcaagagatgcgccgccgagggcagcagccccctgctgctgctgcccgacaacgtgagaatcagaaagtacaacctgagcagcgagagattcagcgagtacctgcaggacgaggagtacatccaggccgtggactacgactgggaccccaaggacatcggcctgagcgtggtgtactacaccgtgagaggcgagggcagcagattcggcgccatcaagagagcctacatccccaacttcgagagcggcagaaacaacctggtgcaggaggtggacctgaagctgaagtacgtgatgcagcccgacggcatcgccgtggactgggtgggcagacacatctactggagcgacgtgaagaacaagagaatcgaggtggccaagctggacggcagatacagaaagtggctgatcagcaccgacctggaccagcccgccgccatcgccgtgaaccccaagctgggcctgatgttctggaccgactggggcaaggagcccaagatcgagagcgcctggatgaacggcgaggacagaaacatcctggtgttcgaggacctgggctggcccaccggcctgagcatcgactacctgaacaacgacagaatctactggagcgacttcaaggaggacgtgatcgagaccatcaagtacgacggcaccgacagaagagtgatcgccaaggaggccatgaacccctacagcctggacatcttcgaggaccagctgtactggatcagcaaggagaagggcgaggtgtggaagcagaacaagttcggccagggcaagaaggagaagaccctggtggtgaacccctggctgacccaggtgagaatcttccaccagctgagatacaacaagagcgtgcccaacctgtgcaagcagatctgcagccacctgtgcctgctgagacccggcggctacagctgcgcctgcccccagggcagcagcttcatcgagggcagcaccaccgagtgcgacgccgccatcgagctgcccatcaacctgccccccccctgcagatgcatgcacggcggcaactgctacttcgacgagaccgacctgcccaagtgcaagtgccccagcggctacaccggcaagtactgcgagatggccttcagcaagggcatcagccccggcaccaccgccgtggccgtgctgctgaccatcctgctgatcgtggtgatcggcgccctggccatcgccggcttcttccactacagaagaaccggcagcctgctgcccgccctgcccaagctgcccagcctgagcagcctggtgaagcccagcgagaacggcaacggcgtgaccttcagaagcggcgccgacctgaacatggacatcggcgtgagcggcttcggccccgagaccgccatcgacagaagcatggccatgagcgaggacttcgtgatggagatgggcaagcagcccatcatcttcgagaaccccatgtacagcgccagagacagcgccgtgaaggtggtgcagcccatccaggtgaccgtgagcgagaacgtggacaacaagaactacggcagccccatcaaccccagcgagatcgtgcccgagaccaaccccaccagccccgccgccgacggcacccaggtgaccaagtggaacctgttcaagagaaagagcaagcagaccaccaacttcgagaaccccatctacgcccagatggagaacgagcagaaggagagcgtggccgccacccccccccccagccccagcctgcccgccaagcccaagccccccagcagaagagaccccacccccacctacagcgccaccgaggacaccttcaaggacaccgccaacctggtgaaggaggacagcgaggtgtag

SEQ ID NO: 87316 - DNA, 3678 bp, synthetic construct
  misc_feature 1..3678: note = Description of Artificial Sequence: Synthetic coding sequence
  source 1..3678: mol_type = other DNA
atggacagaggccccgccgccgtggcctgcaccctgctgctggccctggtggcctgcctggcccccgccagcggccaggagtgcgacagcgcccacttcagatgcggcagcggccactgcatccccgccgactggagatgcgacggcaccaaggactgcagcgacgacgccgacgagatcggctgcgccgtggtgacctgccagcagggctacttcaagtgccagagcgagggccagtgcatccccaacagctgggtgtgcgaccaggaccaggactgcgacgacggcagcgacgagagacaggactgcagccagagcacctgcagcagccaccagatcacctgcagcaacggccagtgcatccccagcgagtacagatgcgaccacgtgagagactgccccgacggcgccgacgagaacgactgccagtaccccacctgcgagcagctgacctgcgacaacggcgcctgctacaacaccagccagaagtgcgactggaaggtggactgcagagacagcagcgacgagatcaactgcaccgagatctgcctgcacaacgagttcagctgcggcaacggcgagtgcatccccagagcctacgtgtgcgaccacgacaacgactgccaggacggcagcgacgagcacgcctgcaactaccccacctgcggcggctaccagttcacctgccccagcggcagatgcatctaccagaactgggtgtgcgacggcgaggacgactgcaaggacaacggcgacgaggacggctgcgagagcggcccccacgacgtgcacaagtgcagccccagagagtggagctgccccgagagcggcagatgcatcagcatctacaaggtgtgcgacggcatcctggactgccccggcagagaggacgagaacaacaccagcaccggcaagtactgcagcatgaccctgtgcagcgccctgaactgccagtaccagtgccacgagaccccctacggcggcgcctgcttctgcccccccggctacatcatcaaccacaacgacagcagaacctgcgtggagttcgacgactgccagatctggggcatctgcgaccagaagtgcgagagcagacccggcagacacctgtgccactgcgaggagggctacatcctggagagaggccagtactgcaaggccaacgacagcttcggcgaggccagcatcatcttcagcaacggcagagacctgctgatcggcgacatccacggcagaagcttcagaatcctggtggagagccagaacagaggcgtggccgtgggcgtggccttccactaccacctgcagagagtgttctggaccgacaccgtgcagaacaaggtgttcagcgtggacatcaacggcctgaacatccaggaggtgctgaacgtgagcgtggagacccccgagaacctggccgtggactgggtgaacaacaagatctacctggtggagaccaaggtgaacagaatcgacatggtgaacctggacggcagctacagagtgaccctgatcaccgagaacctgggccaccccagaggcatcgccgtggaccccaccgtgggcaagaccgtggtgcacggcggcagcctgatcccccaccccttcggcgtgagcctgttcgagggccaggtgttcttcaccgactggaccaagatggccgtgctgaaggccaacaagttcaccgagaccaacccccaggtgtactaccaggccagcctgagaccctacggcgtgaccgtgtaccacagcctgagacagccctacgccaccaacccctgcaaggacaacaacggcggctgcgagcaggtgtgcgtgctgagccacagaaccgacaacgacggcctgggcttcagatgcaagtgcaccttcggcttccagctggacaccgacgagagacactgcatcggcagagagatcctggccgccaacagagtggagaacgtggagagcctggccttcgactggatcagcaagaacctgtactggaccgacagccactacaagagcatcagcgtgatgagactggccgacaagaccagaagaaccgtggtgcagtacctgaacaaccccagaagcgtggtggtgcaccccttcgccggctacctgttcttcaccgactggttcagacccgccaagatcatgagagcctggagcgacggcagccacctgctgcccgtgatcaacaccaccctgggctggcccaacggcctggccatcgactgggccgccagcagactgtactgggtggacgcctacttcgacaagatcgagcacagcaccttcgacggcctggacagaagaagactgggccacatcgagcagatgacccaccccttcggcctggccatcttcggcgagcacctgttcttcaccgactggagactgggcgccatcatcagagtgagaaaggccgacggcggcgagatgaccgtgatcagaagcggcatcgcctacatcctgcacctgaagagctacgacgtgaacatccagaccggcagcaacgcctgcaaccagcccacccaccccaacggcgactgcagccacttctgcttccccgtgcccaacttccagagagtgtgcggctgcccctacggcatgagactggccagcaaccacctgacctgcgagggcgaccccaccaacgagccccccaccgagcagtgcggcctgttcagcttcccctgcaagaacggcagatgcgtgcccaactactacctgtgcgacggcgtggacgactgccacgacaacagcgacgagcagctgtgcggcaccctgaacaacacctgcagcagcagcgccttcacctgcggccacggcgagtgcatccccgcccactggagatgcgacaagagaaacgactgcgtggacggcagcgacgagcacaactgccccacccacgcccccgccagctgcctggacacccagtacacctgcgacaaccaccagtgcatcagcaagaactgggtgtgcgacaccgacaacgactgcggcgacggcagcgacgagaagaactgcaacagcaccgagacctgccagcccagccagttcaactgccccaaccacagatgcatcgacctgagcttcgtgtgcgacggcgacaaggactgcgtggacggcagcgacgaggtgggctgcgtgctgaactgcaccgccagccagttcaagtgcgccagcggcgacaagtgcatcggcgtgaccaacagatgcgacggcgtgttcgactgcagcgacaacagcgacgaggccggctgccccaccagaccccccggcatgtgccacagcgacgagttccagtgccaggaggacggcatctgcatccccaacttctgggagtgcgacggccaccccgactgcctgtacggcagcgacgagcacaacgcctgcgtgcccaagacctgccccagcagctacttccactgcgacaacggcaactgcatccacagagcctggctgtgcgacagagacaacgactgcggcgacatgagcgacgagaaggactgccccacccagcccttcagatgccccagctggcagtggcagtgcctgggccacaacatctgcgtgaacctgagcgtggtgtgcgacggcatcttcgactgccccaacggcaccgacgagagccccctgtgcagcaagttccccgaccacagcctgctggccatcaacagcttctag

SEQ ID NO: 87317 - DNA, 1941 bp, synthetic construct
  misc_feature 1..1941: note = Description of Artificial Sequence: Synthetic coding sequence
  source 1..1941: mol_type = other DNA
atgctggcccagcactgcgtggacgccaacaacaccttctgcttcgacaaccccagaggcctggccctgcacccccagtacggctacctgtactgggccgactggggccacagagcctacatcggcagagtgggcatggacggcaccaacaagagcgtgatcatcagcaccaagctggagtggcccaacggcatcaccatcgactacaccaacgacctgctgtactgggccgacgcccacctgggctacatcgagtacagcgacctggagggccaccacagacacaccgtgtacgacggcgccctgccccaccccttcgccatcaccatcttcgaggacaccatctactggaccgactggaacaccagaaccgtggagaagggcaacaagtacgacggcagcaacagacagaccctggtgaacaccacccacagacccttcgacatccacgtgtaccacccctacagacagcccatcgtgagcaacccctgcggcaccaacaacggcggctgcagccacctgtgcctgatcaagcccggcggcaagggcttcacctgcgagtgccccgacgacttcagaaccctgcagctgagcggcagcacctactgcatgcccatgtgcagcagcacccagttcctgtgcgccaacaacgagaagtgcatccccatctggtggaagtgcgacggccagaaggactgcagcgacggcagcgacgagctggccctgtgcccccagagattctgcagactgggccagttccagtgcagcgacggcaactgcaccagcccccagaccctgtgcaacgcccaccagaactgccccgacggcagcgacgaggacagactgctgtgcgagaaccaccactgcgacagcaacgagtggcagtgcgccaacaagagatgcatccccgagagctggcagtgcgacaccttcaacgactgcgaggacaacagcgacgaggacagcagccactgcgccagcagaacctgcagacccggccagttcagatgcgccaacggcagatgcatcccccaggcctggaagtgcgacgtggacaacgactgcggcgaccacagcgacgagcccatcgaggagtgcatgagcagcgcccacctgtgcgacaacttcaccgagttcagctgcaagaccaactacagatgcatccccaagtgggccgtgtgcaacggcgtggacgactgcagagacaacagcgacgagcagggctgcgaggagagaacctgccaccccgtgggcgacttcagatgcaagaaccaccactgcatccccctgagatggcagtgcgacggccagaacgactgcggcgacaacagcgacgaggagaactgcgcccccagagagtgcaccgagagcgagttcagatgcgtgaaccagcagtgcatccccagcagatggatctgcgaccactacaacgactgcggcgacaacagcgacgagagagactgcggcatgagactgatgaagctgatcgtgccccacgccttcctgatggtgcacaccgccagactgctgtgcagcaacgccaagaccatgttcgtgagcagacacatcggcaacgtgatggccatgatgaccgtggccatggtgcagatgaagaacttcacctgcgcctggatgttccccgtgatccaccagaccgtgagcggcgtgaccaccatcgccgccttcatcgtgatgagatgcgccatggtgtggatgaccgtggagatggagctgatgagacagagaagcaccgtggagaacagacccctgaacctggtgcagaacatgaacatcagcgtggccatgggcatcgccttccacatgaccatgtgcgtgatgatgcccatgaccgtggtgaccggccccatgaactgggtggccatcaaggagaagaaggagcacgtgctgaagatctacgccagcaagatcgtgcccaactag

SEQ ID NO: 87318 - DNA, 2313 bp, synthetic construct
  misc_feature 1..2313: note = Description of Artificial Sequence: Synthetic coding sequence
  source 1..2313: mol_type = other DNA
atggagaagagagccgccgccggcctggagggcgcccccggcgccagagcccagctggccgtggtgtgcctggtgaacatcttcctgaccggcagactgagcagcgccgtgcccgccctggccgcctgcagcggcaagctggagcagcacaccgagagaagaggcgtgatctacagccccgcctggcccctgaactacccccccggcaccaactgcagctggtacatccagggcgacagaggcgacatgatcaccatcagcttcagaaacttcgacgtggaggagagccaccagtgcagcctggactggctgctgctgggccccgccgccccccccagacaggaggccttcagactgtgcggcagcgccatcccccccgccttcatcagcgccagagaccacgtgtggatcttcttccacagcgacgccagcagcagcggccaggcccagggcttcagactgagctacatcagaggcaagctgggccaggccagctgccaggccgacgagttcagatgcgacaacggcaagtgcctgcccggcccctggcagtgcaacaccgtggacgagtgcggcgacggcagcgacgagggcaactgcagcgcccccgccagcgagccccccggcagcctgtgccccggcggcaccttcccctgcagcggcgccagaagcaccagatgcctgcccgtggagagaagatgcgacggcctgcaggactgcggcgacggcagcgacgaggccggctgccccgacctggcctgcggcagaagactgggcagcttctacggcagcttcgccagccccgacctgttcggcgccgccagaggccccagcgacctgcactgcacctggctggtggacacccaggacagcagaagagtgctgctgcagctggagctgagactgggctacgacgactacgtgcaggtgtacgagggcctgggcgagagaggcgacagactgctgcagaccctgagctacagaagcaaccacagacccgtgagcctggaggccgcccagggcagactgaccgtggcctaccacgccagagccagaagcgccggccacggcttcaacgccacctaccaggtgaagggctactgcctgccctgggagcagccctgcggcagcagcagcgacagcgacggcggcagcctgggcgaccagggctgcttcagcgagccccagagatgcgacggctggtggcactgcgccagcggcagagacgagcagggctgccccgcctgcccccccgaccagtacccctgcgagggcggcagcggcctgtgctacacccccgccgacagatgcaacaaccagaagagctgccccgacggcgccgacgagaagaactgcttcagctgccagcccggcaccttccactgcggcaccaacctgtgcatcttcgagacctggagatgcgacggccaggaggactgccaggacggcagcgacgagcacggctgcctggccgccgtgcccagaaaggtgatcaccgccgccctgatcggcagcctggtgtgcggcctgctgctggtgatcgccctgggctgcgccttcaagctgtacagcctgagaacccaggagtacagagccttcgagacccagatgaccagactggaggccgagttcgtgagaagagaggccccccccagctacggccagctgatcgcccagggcctgatcccccccgtggaggacttccccgtgtacagcgccagccaggccagcgtgctgcagaacctgagaaccgccatgagaagacagatgagaagacacgccagcagaagaggccccagcagaagaagactgggcagactgtggaacagactgttccacagacccagagcccccagaggccagatccccctgctgaccgccgccagacccagccagaccgtgctgggcgacggcttcctgcagcccgcccccggcgccgcccccgacccccccgcccccctgatggacaccggcagcaccagagccgccggcgacagaccccccagcgcccccggcagagcccccgaggtgggccccagcggcccccccctgcccagcggcctgagagaccccgagtgcagacccgtggacaaggacagaaaggtgtgcagagagcccctggtggacggccccgcccccgccgacgcccccagagagccctgcagcgcccaggacccccacccccaggtgagcaccgccagcagcaccctgggcccccacagccccgagcccctgggcgtgtgcagaaaccccccccccccctgcagccccatgctggaggccagcgacgacgaggccctgctggtgtgctag

SEQ ID NO: 87319 - DNA, 858 bp, synthetic construct
  misc_feature 1..858: note = Description of Artificial Sequence: Synthetic coding sequence
  source 1..858: mol_type = other DNA
atgggcaaccacctgcccgccttcggccccagaccccccggcagaagagaggccctgctgagccccgactgccccctgctgagactgcaccccaccggcaagctgggccaggccagctgccaggccgacgagttcagatgcgacaacggcaagtgcctgcccggcccctggcagtgcaacaccgtggacgagtgcggcgacggcagcgacgagggcaactgcagcgcccccgccagcgagccccccggcagcctgtgccccggcggcaccttcccctgcagcggcgccagaagcaccagatgcctgcccgtggagagaagatgcgacggcctgcaggactgcggcgacggcagcgacgaggccggctgccccgacctggcctgcggcagaagactgggcagcttctacggcagcttcgccagccccgacctgttcggcgccgccagaggccccagcgacctgcactgcacctggctggtggacacccaggacagcagaagagtgctgctgcagctggagctgagactgggctacgacgactacgtgcaggtgtacgagggcctgggcgagagaggcgacagactgctgcagaccctgagctacagaagcaaccacagacccgtgagcctggaggccgcccagggcagactgaccgtggcctaccacgccagagccagaagcgccggccacggcttcaacgccacctaccaggtgaagggctactgcctgccctgggagcagccctgcggcagcagcagcgacagcgacggcggcagcctgggcgaccagggctgcttcagcgagccccagagatgcgacggctggtggcactgcgccagcggcagagacgagcagtag

SEQ ID NO: 87320 - DNA, 5718 bp, synthetic construct
  misc_feature 1..5718: note = Description of Artificial Sequence: Synthetic coding sequence
  source 1..5718: mol_type = other DNA
atgagaagacagtggggcgccctgctgctgggcgccctgctgtgcgcccacggcctggccagcagccccgagtgcgcctgcggcagaagccacttcacctgcgccgtgagcgccctgggcgagtgcacctgcatccccgcccagtggcagtgcgacggcgacaacgactgcggcgaccacagcgacgaggacggctgcatcctgcccacctgcagccccctggacttccactgcgacaacggcaagtgcatcagaagaagctgggtgtgcgacggcgacaacgactgcgaggacgacagcgacgagcaggactgcccccccagagagtgcgaggaggacgagttcccctgccagaacggctactgcatcagaagcctgtggcactgcgacggcgacaacgactgcggcgacaacagcgacgagcagtgcgacatgagaaagtgcagcgacaaggagttcagatgcagcgacggcagctgcatcgccgagcactggtactgcgacggcgacaccgactgcaaggacggcagcgacgaggagaactgccccagcgccgtgcccgcccccccctgcaacctggaggagttccagtgcgcctacggcagatgcatcctggacatctaccactgcgacggcgacgacgactgcggcgactggagcgacgagagcgactgcagcagccaccagccctgcagaagcggcgagttcatgtgcgacagcggcctgtgcatcaacgccggctggagatgcgacggcgacgccgactgcgacgaccagagcgacgagagaaactgcaccaccagcatgtgcaccgccgagcagttcagatgccacagcggcagatgcgtgagactgagctggagatgcgacggcgaggacgactgcgccgacaacagcgacgaggagaactgcgagaacaccggcagcccccagtgcgccctggaccagttcctgtgctggaacggcagatgcatcggccagagaaagctgtgcaacggcgtgaacgactgcggcgacaacagcgacgagagcccccagcagaactgcagacccagaaccggcgaggagaactgcaacgtgaacaacggcggctgcgcccagaagtgccagatggtgagaggcgccgtgcagtgcacctgccacaccggctacagactgaccgaggacggccacacctgccaggacgtgaacgagtgcgccgaggagggctactgcagccagggctgcaccaacagcgagggcgccttccagtgctggtgcgagaccggctacgagctgagacccgacagaagaagctgcaaggccctgggccccgagcccgtgctgctgttcgccaacagaatcgacatcagacaggtgctgccccacagaagcgagtacaccctgctgctgaacaacctggagaacgccatcgccctggacttccaccacagaagagagctggtgttctggagcgacgtgaccctggacagaatcctgagagccaacctgaacggcagcaacgtggaggaggtggtgagcaccggcctggagagccccggcggcctggccgtggactgggtgcacgacaagctgtactggaccgacagcggcaccagcagaatcgaggtggccaacctggacggcgcccacagaaaggtgctgctgtggcagaacctggagaagcccagagccatcgccctgcaccccatggagggcaccatctactggaccgactggggcaacacccccagaatcgaggccagcagcatggacggcagcggcagaagaatcatcgccgacacccacctgttctggcccaacggcctgaccatcgactacgccggcagaagaatgtactgggtggacgccaagcaccacgtgatcgagagagccaacctggacggcagccacagaaaggccgtgatcagccagggcctgccccaccccttcgccatcaccgtgttcgaggacagcctgtactggaccgactggcacaccaagagcatcaacagcgccaacaagttcaccggcaagaaccaggagatcatcagaaacaagctgcacttccccatggacatccacaccctgcacccccagagacagcccgccggcaagaacagatgcggcgacaacaacggcggctgcacccacctgtgcctgcccagcggccagaactacacctgcgcctgccccaccggcttcagaaagatcagcagccacgcctgcgcccagagcctggacaagttcctgctgttcgccagaagaatggacatcagaagaatcagcttcgacaccgaggacctgagcgacgacgtgatccccctggccgacgtgagaagcgccgtggccctggactgggacagcagagacgaccacgtgtactggaccgacgtgagcaccgacaccatcagcagagccaagtgggacggcaccggccaggaggtggtggtggacaccagcctggagagccccgccggcctggccatcgactgggtgaccaacaagctgtactggaccgacgccggcaccgacagaatcgaggtggccaacaccgacggcagcatgagaaccgtgctgatctgggagaacctggacagacccagagacatcgtggtggagcccatgggcggctacatgtactggaccgactggggcgccagccccaagatcgagagagccggcatggacgccagcggcagacaggtgatcatcagcagcaacctgacctggcccaacggcctggccatcgactacggcagccagagactgtactgggccgacgccggcatgaagaccatcgagttcgccggcctggacggcagcaagagaaaggtgctgatcggcagccagctgccccaccccttcggcctgaccctgtacggcgagagaatctactggaccgactggcagaccaagagcatccagagcgccgacagactgaccggcctggacagagagaccctgcaggagaacctggagaacctgatggacatccacgtgttccacagaagaagaccccccgtgagcaccccctgcgccatggagaacggcggctgcagccacctgtgcctgagaagccccaaccccagcggcttcagctgcacctgccccaccggcatcaacctgctgagcgacggcaagacctgcagccccggcatgaacagcttcctgatcttcgccagaagaatcgacatcagaatggtgagcctggacatcccctacttcgccgacgtggtggtgcccatcaacatcaccatgaagaacaccatcgccatcggcgtggacccccaggagggcaaggtgtactggagcgacagcaccctgcacagaatcagcagagccaacctggacggcagccagcacgaggacatcatcaccaccggcctgcagaccaccgacggcctggccgtggacgccatcggcagaaaggtgtactggaccgacaccggcaccaacagaatcgaggtgggcaacctggacggcagcatgagaaaggtgctggtgtggcagaacctggacagccccagagccatcgtgctgtaccacgagatgggcttcatgtactggaccgactggggcgagaacgccaagctggagagaagcggcatggacggcagcgacagagccgtgctgatcaacaacaacctgggctggcccaacggcctgaccgtggacaaggccagcagccagctgctgtgggccgacgcccacaccgagagaatcgaggccgccgacctgaacggcgccaacagacacaccctggtgagccccgtgcagcacccctacggcctgaccctgctggacagctacatctactggaccgactggcagaccagaagcatccacagagccgacaagggcaccggcagcaacgtgatcctggtgagaagcaacctgcccggcctgatggacatgcaggccgtggacagagcccagcccctgggcttcaacaagtgcggcagcagaaacggcggctgcagccacctgtgcctgcccagacccagcggcttcagctgcgcctgccccaccggcatccagctgaagggcgacggcaagacctgcgaccccagccccgagacctacctgctgttcagcagcagaggcagcatcagaagaatcagcctggacaccagcgaccacaccgacgtgcacgtgcccgtgcccgagctgaacaacgtgatcagcctggactacgacagcgtggacggcaaggtgtactacaccgacgtgttcctggacgtgatcagaagagccgacctgaacggcagcaacatggagaccgtgatcggcagaggcctgaagaccaccgacggcctggccgtggactgggtggccagaaacctgtactggaccgacaccggcagaaacaccatcgaggccagcagactggacggcagctgcagaaaggtgctgatcaacaacagcctggacgagcccagagccatcgccgtgttccccagaaagggctacctgttctggaccgactggggccacatcgccaagatcgagagagccaacctggacggcagcgagagaaaggtgctgatcaacaccgacctgggctggcccaacggcctgaccctggactacgacaccagaagaatctactgggtggacgcccacctggacagaatcgagagcgccgacctgaacggcaagctgagacaggtgctggtgagccacgtgagccaccccttcgccctgacccagcaggacagatggatctactggaccgactggcagaccaagagcatccagagagtggacaagtacagcggcagaaacaaggagaccgtgctggccaacgtggagggcctgatggacatcatcgtggtgagcccccagagacagaccggcaccaacgcctgcggcgtgaacaacggcggctgcacccacctgtgcttcgccagagccagcgacttcgtgtgcgcctgccccgacgagcccgacagcagaccctgcagcctggtgcccggcctggtgccccccgcccccagagccaccggcatgagcgagaagagccccgtgctgcccaacaccccccccaccaccctgtacagcagcaccaccagaaccagaaccagcctggaggaggtggagggcagatgcagcgagagagacgccagactgggcctgtgcgccagaagcaacgacgccgtgcccgccgcccccggcgagggcctgcacatcagctacgccatcggcggcctgctgagcatcctgctgatcctggtggtgatcgccgccctgatgctgtacagacacaagaagagcaagttcaccgaccccggcatgggcaacctgacctacagcaaccccagctacagaaccagcacccaggaggtgaagatcgaggccatccccaagcccgccatgtacaaccagctgtgctacaagaaggagggcggccccgaccacaactacaccaaggagaagatcaagatcgtggagggcatctgcctgctgagcggcgacgacgccgagtgggacgacctgaagcagctgagaagcagcagaggcggcctgctgagagaccacgtgtgcatgaagaccgacaccgtgagcatccaggccagcagcggcagcctggacgacaccgagaccgagcagctgctgcaggaggagcagagcgagtgcagcagcgtgcacaccgccgccacccccgagagaagaggcagcctgcccgacaccggctggaagcacgagagaaagctgagcagcgagagccaggtgtag

SEQ ID NO: 87321 - DNA, 4848 bp, synthetic construct
  misc_feature 1..4848: note = Description of Artificial Sequence: Synthetic coding sequence
  source 1..4848: mol_type = other DNA
atggaggccgccccccccggccccccctggcccctgctgctgctgctgctgctgctgctggccctgtgcggctgccccgcccccgccgccgccagccccctgctgctgttcgccaacagaagagacgtgagactggtggacgccggcggcgtgaagctggagagcaccatcgtggtgagcggcctggaggacgccgccgccgtggacttccagttcagcaagggcgccgtgtactggaccgacgtgagcgaggaggccatcaagcagacctacctgaaccagaccggcgccgccgtgcagaacgtggtgatcagcggcctggtgagccccgacggcctggcctgcgactgggtgggcaagaagctgtactggaccgacagcgagaccaacagaatcgaggtggccaacctgaacggcaccagcagaaaggtgctgttctggcaggacctggaccagcccagagccatcgccctggaccccgcccacggctacatgtactggaccgactggggcgagacccccagaatcgagagagccggcatggacggcagcaccagaaagatcatcgtggacagcgacatctactggcccaacggcctgaccatcgacctggaggagcagaagctgtactgggccgacgccaagctgagcttcatccacagagccaacctggacggcagcttcagacagaaggtggtggagggcagcctgacccaccccttcgccctgaccctgagcggcgacaccctgtactggaccgactggcagaccagaagcatccacgcctgcaacaagagaaccggcggcaagagaaaggagatcctgagcgccctgtacagccccatggacatccaggtgctgagccaggagagacagcccttcttccacaccagatgcgaggaggacaacggcggctgcagccacctgtgcctgctgagccccagcgagcccttctacacctgcgcctgccccaccggcgtgcagctgcaggacaacggcagaacctgcaaggccggcgccgaggaggtgctgctgctggccagaagaaccgacctgagaagaatcagcctggacacccccgacttcaccgacatcgtgctgcaggtggacgacatcagacacgccatcgccatcgactacgaccccctggagggctacgtgtactggaccgacgacgaggtgagagccatcagaagagcctacctggacggcagcggcgcccagaccctggtgaacaccgagatcaacgaccccgacggcatcgccgtggactgggtggccagaaacctgtactggaccgacaccggcaccgacagaatcgaggtgaccagactgaacggcaccagcagaaagatcctggtgagcgaggacctggacgagcccagagccatcgccctgcaccccgtgatgggcctgatgtactggaccgactggggcgagaaccccaagatcgagtgcgccaacctggacggccaggagagaagagtgctggtgaacgccagcctgggctggcccaacggcctggccctggacctgcaggagggcaagctgtactggggcgacgccaagaccgacaagatcgaggtgatcaacgtggacggcaccaagagaagaaccctgctggaggacaagctgccccacatcttcggcttcaccctgctgggcgacttcatctactggaccgactggcagagaagaagcatcgagagagtgcacaaggtgaaggccagcagagacgtgatcatcgaccagctgcccgacctgatgggcctgaaggccgtgaacgtggccaaggtggtgggcaccaacccctgcgccgacagaaacggcggctgcagccacctgtgcttcttcaccccccacgccaccagatgcggctgccccatcggcctggagctgctgagcgacatgaagacctgcatcgtgcccgaggccttcctggtgttcaccagcagagccgccatccacagaatcagcctggagaccaacaacaacgacgtggccatccccctgaccggcgtgaaggaggccagcgccctggacttcgacgtgagcaacaaccacatctactggaccgacgtgagcctgaagaccatcagcagagccttcatgaacggcagcagcgtggagcacgtggtggagttcggcctggactaccccgagggcatggccgtggactggatgggcaagaacctgtactgggccgacaccggcaccaacagaatcgaggtggccagactggacggccagttcagacaggtgctggtgtggagagacctggacaaccccagaagcctggccctggaccccaccaagggctacatctactggaccgagtggggcggcaagcccagaatcgtgagagccttcatggacggcaccaactgcatgaccctggtggacaaggtgggcagagccaacgacctgaccatcgactacgccgaccagagactgtactggaccgacctggacaccaacatgatcgagagcagcaacatgctgggccaggagagagtggtgatcgccgacgacctgccccaccccttcggcctgacccagtacagcgactacatctactggaccgactggaacctgcacagcatcgagagagccgacaagaccagcggcagaaacagaaccctgatccagggccacctggacttcgtgatggacatcctggtgttccacagcagcagacaggacggcctgaacgactgcatgcacaacaacggccagtgcggccagctgtgcctggccatccccggcggccacagatgcggctgcgccagccactacaccctggaccccagcagcagaaactgcagcccccccaccaccttcctgctgttcagccagaagagcgccatcagcagaatgatccccgacgaccagcacagccccgacctgatcctgcccctgcacggcctgagaaacgtgaaggccatcgactacgaccccctggacaagttcatctactgggtggacggcagacagaacatcaagagagccaaggacgacggcacccagcccttcgtgctgaccagcctgagccagggccagaaccccgacagacagccccacgacctgagcatcgacatctacagcagaaccctgttctggacctgcgaggccaccaacaccatcaacgtgcacagactgagcggcgaggccatgggcgtggtgctgagaggcgacagagacaagcccagagccatcgtggtgaacgccgagagaggctacctgtacttcaccaacatgcaggacagagccgccaagatcgagagagccgccctggacggcaccgagagagaggtgctgttcaccaccggcctgatcagacccgtggccctggtggtggacaacaccctgggcaagctgttctgggtggacgccgacctgaagagaatcgagagctgcgacctgagcggcgccaacagactgaccctggaggacgccaacatcgtgcagcccctgggcctgaccatcctgggcaagcacctgtactggatcgacagacagcagcagatgatcgagagagtggagaagaccaccggcgacaagagaaccagaatccagggcagagtggcccacctgaccggcatccacgccgtggaggaggtgagcctggaggagttcagcgcccacccctgcgccagagacaacggcggctgcagccacatctgcatcgccaagggcgacggcacccccagatgcagctgccccgtgcacctggtgctgctgcagaacctgctgacctgcggcgagccccccacctgcagccccgaccagttcgcctgcgccaccggcgagatcgactgcatccccggcgcctggagatgcgacggcttccccgagtgcgacgaccagagcgacgaggagggctgccccgtgtgcagcgccgcccagttcccctgcgccagaggccagtgcgtggacctgagactgagatgcgacggcgaggccgactgccaggacagaagcgacgaggccgactgcgacgccatctgcctgcccaaccagttcagatgcgccagcggccagtgcgtgctgatcaagcagcagtgcgacagcttccccgactgcatcgacggcagcgacgagctgatgtgcgagatcaccaagccccccagcgacgacagccccgcccacagcagcgccatcggccccgtgatcggcatcatcctgagcctgttcgtgatgggcggcgtgtacttcgtgtgccagagagtggtgtgccagagatacgccggcgccaacggccccttcccccacgagtacgtgagcggcaccccccacgtgcccctgaacttcatcgcccccggcggcagccagcacggccccttcaccggcatcgcctgcggcaagagcatgatgagcagcgtgagcctgatgggcggcagaggcggcgtgcccctgtacgacagaaaccacgtgaccggcgccagcagcagcagcagcagcagcaccaaggccaccctgtacccccccatcctgaaccccccccccagccccgccaccgaccccagcctgtacaacatggacatgttctacagcagcaacatccccgccaccgccagaccctacagaccctacatcatcagaggcatggccccccccaccaccccctgcagcaccgacgtgtgcgacagcgactacagcgccagcagatggaaggccagcaagtactacctggacctgaacagcgacagcgacccctacccccccccccccaccccccacagccagtacctgagcgccgaggacagctgcccccccagccccgccaccgagagaagctacttccacctgttcccccccccccccagcccctgcaccgacagcagctag

SEQ ID NO: 87322 - DNA, 4842 bp, synthetic construct
  misc_feature 1..4842: note = Description of Artificial Sequence: Synthetic coding sequence
  source 1..4842: mol_type = other DNA
atgggcgccgtgctgagaagcctgctggcctgcagcttctgcgtgctgctgagagccgcccccctgctgctgtacgccaacagaagagacctgagactggtggacgccaccaacggcaaggagaacgccaccatcgtggtgggcggcctggaggacgccgccgccgtggacttcgtgttcagccacggcctgatctactggagcgacgtgagcgaggaggccatcaagagaaccgagttcaacaagaccgagagcgtgcagaacgtggtggtgagcggcctgctgagccccgacggcctggcctgcgactggctgggcgagaagctgtactggaccgacagcgagaccaacagaatcgaggtgagcaacctggacggcagcctgagaaaggtgctgttctggcaggagctggaccagcccagagccatcgccctggaccccagcagcggcttcatgtactggaccgactggggcgaggtgcccaagatcgagagagccggcatggacggcagcagcagattcatcatcatcaacagcgagatctactggcccaacggcctgaccctggactacgaggagcagaagctgtactgggccgacgccaagctgaacttcatccacaagagcaacctggacggcaccaacagacaggccgtggtgaagggcagcctgccccaccccttcgccctgaccctgttcgaggacatcctgtactggaccgactggagcacccacagcatcctggcctgcaacaagtacaccggcgagggcctgagagagatccacagcgacatcttcagccccatggacatccacgccttcagccagcagagacagcccaacgccaccaacccctgcggcatcgacaacggcggctgcagccacctgtgcctgatgagccccgtgaagcccttctaccagtgcgcctgccccaccggcgtgaagctgctggagaacggcaagacctgcaaggacggcgccaccgagctgctgctgctggccagaagaaccgacctgagaagaatcagcctggacacccccgacttcaccgacatcgtgctgcagctggaggacatcagacacgccatcgccatcgactacgaccccgtggagggctacatctactggaccgacgacgaggtgagagccatcagaagaagcttcatcgacggcagcggcagccagttcgtggtgaccgcccagatcgcccaccccgacggcatcgccgtggactgggtggccagaaacctgtactggaccgacaccggcaccgacagaatcgaggtgaccagactgaacggcaccatgagaaagatcctgatcagcgaggacctggaggagcccagagccatcgtgctggaccccatggtgggctacatgtactggaccgactggggcgagatccccaagatcgagagagccgccctggacggcagcgacagagtggtgctggtgaacaccagcctgggctggcccaacggcctggccctggactacgacgagggcaagatctactggggcgacgccaagaccgacaagatcgaggtgatgaacaccgacggcaccggcagaagagtgctggtggaggacaagatcccccacatcttcggcttcaccctgctgggcgactacgtgtactggaccgactggcagagaagaagcatcgagagagtgcacaagagaagcgccgagagagaggtgatcatcgaccagctgcccgacctgatgggcctgaaggccaccaacgtgcacagagtgatcggcagcaacccctgcgccgaggagaacggcggctgcagccacctgtgcctgtacagaccccagggcctgagatgcgcctgccccatcggcttcgagctgatcagcgacatgaagacctgcatcgtgcccgaggccttcctgctgttcagcagaagagccgacatcagaagaatcagcctggagaccaacaacaacaacgtggccatccccctgaccggcgtgaaggaggccagcgccctggacttcgacgtgaccgacaacagaatctactggaccgacatcagcctgaagaccatcagcagagccttcatgaacggcagcgccctggagcacgtggtggagttcggcctggactaccccgagggcatggccgtggactggctgggcaagaacctgtactgggccgacaccggcaccaacagaatcgaggtgagcaagctggacggccagcacagacaggtgctggtgtggaaggacctggacagccccagagccctggccctggaccccgccgagggcttcatgtactggaccgagtggggcggcaagcccaagatcgacagagccgccatggacggcagcgagagaaccaccctggtgcccaacgtgggcagagccaacggcctgaccatcgactacgccaagagaagactgtactggaccgacctggacaccaacctgatcgagagcagcaacatgctgggcctgaacagagaggtgatcgccgacgacctgccccaccccttcggcctgacccagtaccaggactacatctactggaccgactggagcagaagaagcatcgagagagccaacaagaccagcggccagaacagaaccatcatccagggccacctggactacgtgatggacatcctggtgttccacagcagcagacagagcggctggaacgagtgcgccagcagcaacggccactgcagccacctgtgcctggccgtgcccgtgggcggcttcgtgtgcggctgccccgcccactacagcctgaacgccgacaacagaacctgcagcgcccccaccaccttcctgctgttcagccagaagagcgccatcaacagaatggtgatcgacgagcagcagagccccgacatcatcctgcccatccacagcctgagaaacgtgagagccatcgactacgaccccctggacaagcagctgtactggatcgacagcagacagaacatgatcagaaaggcccaggaggacggcagccagggcttcaccgtggtggtgagcagcgtgcccagccagaacctggagatccagccctacgacctgagcatcgacatctacagcagatacatctactggacctgcgaggccaccaacgtgatcaacgtgaccagactggacggcagaagcgtgggcgtggtgctgaagggcgagcaggacagacccagagccgtggtggtgaaccccgagaagggctacatgtacttcaccaacctgcaggagagaagccccaagatcgagagagccgccctggacggcaccgagagagaggtgctgttcttcagcggcctgagcaagcccatcgccctggccctggacagcagactgggcaagctgttctgggccgacagcgacctgagaagaatcgagagcagcgacctgagcggcgccaacagaatcgtgctggaggacagcaacatcctgcagcccgtgggcctgaccgtgttcgagaactggctgtactggatcgacaagcagcagcagatgatcgagaagatcgacatgaccggcagagagggcagaaccaaggtgcaggccagaatcgcccagctgagcgacatccacgccgtgaaggagctgaacctgcaggagtacagacagcacccctgcgcccaggacaacggcggctgcagccacatctgcctggtgaagggcgacggcaccaccagatgcagctgccccatgcacctggtgctgctgcaggacgagctgagctgcggcgagccccccacctgcagcccccagcagttcacctgcttcaccggcgagatcgactgcatccccgtggcctggagatgcgacggcttcaccgagtgcgaggaccacagcgacgagctgaactgccccgtgtgcagcgagagccagttccagtgcgccagcggccagtgcatcgacggcgccctgagatgcaacggcgacgccaactgccaggacaagagcgacgagaagaactgcgaggtgctgtgcctgatcgaccagttcagatgcgccaacggccagtgcatcggcaagcacaagaagtgcgaccacaacgtggactgcagcgacaagagcgacgagctggactgctaccccaccgaggagcccgccccccaggccaccaacaccgtgggcagcgtgatcggcgtgatcgtgaccatcttcgtgagcggcaccgtgtacttcatctgccagagaatgctgtgccccagaatgaagggcgacggcgagaccatgaccaacgactacgtggtgcacggccccgccagcgtgcccctgggctacgtgccccaccccagcagcctgagcggcagcctgcccggcatgagcagaggcaagagcatgatcagcagcctgagcatcatgggcggcagcagcggccccccctacgacagagcccacgtgaccggcgccagcagcagcagcagcagcagcaccaagggcacctacttccccgccatcctgaaccccccccccagccccgccaccgagagaagccactacaccatggagttcggctacagcagcaacagccccagcacccacagaagctacagctacagaccctacagctacagacacttcgccccccccaccaccccctgcagcaccgacgtgtgcgacagcgactacgcccccagcagaagaatgaccagcgtggccaccgccaagggctacaccagcgacctgaactacgacagcgagcccgtgccccccccccccacccccagaagccagtacctgagcgccgaggagaactacgagagctgcccccccagcccctacaccgagagaagctacagccaccacctgtacccccccccccccagcccctgcaccgacagcagctag

SEQ ID NO: 87323 - DNA, 4437 bp, synthetic construct
  misc_feature 1..4437: note = Description of Artificial Sequence: Synthetic coding sequence
  source 1..4437: mol_type = other DNA
tgactggaccagcccagagccatcgccctggaccccagcagcggcttcatgtactggaccgactggggcgaggtgcccaagatcgagagagccggcatggacggcagcagcagattcatcatcatcaacagcgagatctactggcccaacggcctgaccctggactacgaggagcagaagctgtactgggccgacgccaagctgaacttcatccacaagagcaacctggacggcaccaacagacaggccgtggtgaagggcagcctgccccaccccttcgccctgaccctgttcgaggacatcctgtactggaccgactggagcacccacagcatcctggcctgcaacaagtacaccggcgagggcctgagagagatccacagcgacatcttcagccccatggacatccacgccttcagccagcagagacagcccaacgccaccaacccctgcggcatcgacaacggcggctgcagccacctgtgcctgatgagccccgtgaagcccttctaccagtgcgcctgccccaccggcgtgaagctgctggagaacggcaagacctgcaaggacggcgccaccgagctgctgctgctggccagaagaaccgacctgagaagaatcagcctggacacccccgacttcaccgacatcgtgctgcagctggaggacatcagacacgccatcgccatcgactacgaccccgtggagggctacatctactggaccgacgacgaggtgagagccatcagaagaagcttcatcgacggcagcggcagccagttcgtggtgaccgcccagatcgcccaccccgacggcatcgccgtggactgggtggccagaaacctgtactggaccgacaccggcaccgacagaatcgaggtgaccagactgaacggcaccatgagaaagatcctgatcagcgaggacctggaggagcccagagccatcgtgctggaccccatggtgggctacatgtactggaccgactggggcgagatccccaagatcgagagagccgccctggacggcagcgacagagtggtgctggtgaacaccagcctgggctggcccaacggcctggccctggactacgacgagggcaagatctactggggcgacgccaagaccgacaagatcgaggtgatgaacaccgacggcaccggcagaagagtgctggtggaggacaagatcccccacatcttcggcttcaccctgctgggcgactacgtgtactggaccgactggcagagaagaagcatcgagagagtgcacaagagaagcgccgagagagaggtgatcatcgaccagctgcccgacctgatgggcctgaaggccaccaacgtgcacagagtgatcggcagcaacccctgcgccgaggagaacggcggctgcagccacctgtgcctgtacagaccccagggcctgagatgcgcctgccccatcggcttcgagctgatcagcgacatgaagacctgcatcgtgcccgaggccttcctgctgttcagcagaagagccgacatcagaagaatcagcctggagaccaacaacaacaacgtggccatccccctgaccggcgtgaaggaggccagcgccctggacttcgacgtgaccgacaacagaatctactggaccgacatcagcctgaagaccatcagcagagccttcatgaacggcagcgccctggagcacgtggtggagttcggcctggactaccccgagggcatggccgtggactggctgggcaagaacctgtactgggccgacaccggcaccaacagaatcgaggtgagcaagctggacggccagcacagacaggtgctggtgtggaaggacctggacagccccagagccctggccctggaccccgccgagggcttcatgtactggaccgagtggggcggcaagcccaagatcgacagagccgccatggacggcagcgagagaaccaccctggtgcccaacgtgggcagagccaacggcctgaccatcgactacgccaagagaagactgtactggaccgacctggacaccaacctgatcgagagcagcaacatgctgggcctgaacagagaggtgatcgccgacgacctgccccaccccttcggcctgacccagtaccaggactacatctactggaccgactggagcagaagaagcatcgagagagccaacaagaccagcggccagaacagaaccatcatccagggccacctggactacgtgatggacatcctggtgttccacagcagcagacagagcggctggaacgagtgcgccagcagcaacggccactgcagccacctgtgcctggccgtgcccgtgggcggcttcgtgtgcggctgccccgcccactacagcctgaacgccgacaacagaacctgcagcgcccccaccaccttcctgctgttcagccagaagagcgccatcaacagaatggtgatcgacgagcagcagagccccgacatcatcctgcccatccacagcctgagaaacgtgagagccatcgactacgaccccctggacaagcagctgtactggatcgacagcagacagaacatgatcagaaaggcccaggaggacggcagccagggcttcaccgtggtggtgagcagcgtgcccagccagaacctggagatccagccctacgacctgagcatcgacatctacagcagatacatctactggacctgcgaggccaccaacgtgatcaacgtgaccagactggacggcagaagcgtgggcgtggtgctgaagggcgagcaggacagacccagagccgtggtggtgaaccccgagaagggctacatgtacttcaccaacctgcaggagagaagccccaagatcgagagagccgccctggacggcaccgagagagaggtgctgttcttcagcggcctgagcaagcccatcgccctggccctggacagcagactgggcaagctgttctgggccgacagcgacctgagaagaatcgagagcagcgacctgagcggcgccaacagaatcgtgctggaggacagcaacatcctgcagcccgtgggcctgaccgtgttcgagaactggctgtactggatcgacaagcagcagcagatgatcgagaagatcgacatgaccggcagagagggcagaaccaaggtgcaggccagaatcgcccagctgagcgacatccacgccgtgaaggagctgaacctgcaggagtacagacagcacccctgcgcccaggacaacggcggctgcagccacatctgcctggtgaagggcgacggcaccaccagatgcagctgccccatgcacctggtgctgctgcaggacgagctgagctgcggcgagccccccacctgcagcccccagcagttcacctgcttcaccggcgagatcgactgcatccccgtggcctggagatgcgacggcttcaccgagtgcgaggaccacagcgacgagctgaactgccccgtgtgcagcgagagccagttccagtgcgccagcggccagtgcatcgacggcgccctgagatgcaacggcgacgccaactgccaggacaagagcgacgagaagaactgcgaggtgctgtgcctgatcgaccagttcagatgcgccaacggccagtgcatcggcaagcacaagaagtgcgaccacaacgtggactgcagcgacaagagcgacgagctggactgctaccccaccgaggagcccgccccccaggccaccaacaccgtgggcagcgtgatcggcgtgatcgtgaccatcttcgtgagcggcaccgtgtacttcatctgccagagaatgctgtgccccagaatgaagggcgacggcgagaccatgaccaacgactacgtggtgcacggccccgccagcgtgcccctgggctacgtgccccaccccagcagcctgagcggcagcctgcccggcatgagcagaggcaagagcatgatcagcagcctgagcatcatgggcggcagcagcggccccccctacgacagagcccacgtgaccggcgccagcagcagcagcagcagcagcaccaagggcacctacttccccgccatcctgaaccccccccccagccccgccaccgagagaagccactacaccatggagttcggctacagcagcaacagccccagcacccacagaagctacagctacagaccctacagctacagacacttcgccccccccaccaccccctgcagcaccgacgtgtgcgacagcgactacgcccccagcagaagaatgaccagcgtggccaccgccaagggctacaccagcgacctgaactacgacagcgagcccgtgccccccccccccacccccagaagccagtacctgagcgccgaggagaactacgagagctgcccccccagcccctacaccgagagaagctacagccaccacctgtacccccccccccccagcccctgcaccgacagcagctag

SEQ ID NO: 87324 - DNA, 2382 bp, synthetic construct
  misc_feature 1..2382: note = Description of Artificial Sequence: Synthetic coding sequence
  source 1..2382: mol_type = other DNA
atgggcctgcccgagcccggccccctgagactgctggccctgctgctgctgctgctgctgctgctgctgctgcagctgcagcacctggccgccgccgccgccgaccccctgctgggcggccagggccccgccaaggactgcgagaaggaccagttccagtgcagaaacgagagatgcatccccagcgtgtggagatgcgacgaggacgacgactgcctggaccacagcgacgaggacgactgccccaagaagacctgcgccgacagcgacttcacctgcgacaacggccactgcatccacgagagatggaagtgcgacggcgaggaggagtgccccgacggcagcgacgagagcgaggccacctgcaccaagcaggtgtgccccgccgagaagctgagctgcggccccaccagccacaagtgcgtgcccgccagctggagatgcgacggcgagaaggactgcgagggcggcgccgacgaggccggctgcgccacctggctgaacgagtgcctgcacaacaacggcggctgcagccacatctgcaccgacctgaagatcggcttcgagtgcacctgccccgccggcttccagctgctggaccagaagacctgcggcgacatcgacgagtgcaaggaccccgacgcctgcagccagatctgcgtgaactacaagggctacttcaagtgcgagtgctaccccggctacgagatggacctgctgaccaagaactgcaaggccgccgccggcaagagccccagcctgatcttcaccaacagacacgaggtgagaagaatcgacctggtgaagagaaactacagcagactgatccccatgctgaagaacgtggtggccctggacgtggaggtggccaccaacagaatctactggtgcgacctgagctacagaaagatctacagcgcctacatggacaaggccagcgaccccaaggagcaggaggtgctgatcgacgagcagctgcacagccccgagggcctggccgtggactgggtgcacaagcacatctactggaccgacagcggcaacaagaccatcagcgtggccaccgtggacggcggcagaagaagaaccctgttcagcagaaacctgagcgagcccagagccatcgccgtggaccccctgagaggcttcatgtactggagcgactggggcgaccaggccaagatcgagaagagcggcctgaacggcgtggacagacagaccctggtgagcgacaacatcgagtggcccaacggcatcaccctggacctgctgagccagagactgtactgggtggacagcaagctgcaccagctgagcagcatcgacttcagcggcggcaacagaaagaccctgatcagcagcaccgacttcctgagccaccccttcggcatcgccgtgttcgaggacaaggtgttctggaccgacctggagaacgaggccatcttcagcgccaacagactgaacggcctggagatcagcatcctggccgagaacctgaacaacccccacgacatcgtgatcttccacgagctgaagcagcccagagcccccgacgcctgcgagctgagcgtgcagcccaacggcggctgcgagtacctgtgcctgcccgccccccagatcagcagccacagccccaagtacacctgcgcctgccccgacaccatgtggctgggccccgacatgaagagatgctacagagccccccagagcaccagcaccaccaccctggccagcaccatgaccagaaccgtgcccgccaccaccagagcccccggcaccaccgtgcacagaagcacctaccagaaccacagcaccgagacccccagcctgaccgccgccgtgcccagcagcgtgagcgtgcccagagcccccagcatcagccccagcaccctgagccccgccaccagcaaccacagccagcactacgccaacgaggacagcaagatgggcagcaccgtgaccgccgccgtgatcggcatcatcgtgcccatcgtggtgatcgccctgctgtgcatgagcggctacctgatctggagaaactggaagagaaagaacaccaagagcatgaacttcgacaaccccgtgtacagaaagaccaccgaggaggaggacgaggacgagctgcacatcggcagaaccgcccagatcggccacgtgtaccccgccgccatcagcagcttcgacagacccctgtgggccgagccctgcctgggcgagaccagagagcccgaggaccccgcccccgccctgaaggagctgttcgtgctgcccggcgagcccagaagccagctgcaccagctgcccaagaaccccctgagcgagctgcccgtggtgaagagcaagagagtggccctgagcctggaggacgacggcctgccctag

SEQ ID NO: 87325 - DNA, 2892 bp, synthetic construct
  misc_feature 1..2892: note = Description of Artificial Sequence: Synthetic coding sequence
  source 1..2892: mol_type = other DNA
atgggcctgcccgagcccggccccctgagactgctggccctgctgctgctgctgctgctgctgctgctgctgcagctgcagcacctggccgccgccgccgccgaccccctgctgggcggccagggccccgccaaggactgcgagaaggaccagttccagtgcagaaacgagagatgcatccccagcgtgtggagatgcgacgaggacgacgactgcctggaccacagcgacgaggacgactgccccaagaagacctgcgccgacagcgacttcacctgcgacaacggccactgcatccacgagagatggaagtgcgacggcgaggaggagtgccccgacggcagcgacgagagcgaggccacctgcaccaagcaggtgtgccccgccgagaagctgagctgcggccccaccagccacaagtgcgtgcccgccagctggagatgcgacggcgagaaggactgcgagggcggcgccgacgaggccggctgcgccaccctgtgcgccccccacgagttccagtgcggcaacagaagctgcctggccgccgtgttcgtgtgcgacggcgacgacgactgcggcgacggcagcgacgagagaggctgcgccgaccccgcctgcggccccagagagttcagatgcggcggcgacggcggcggcgcctgcatccccgagagatgggtgtgcgacagacagttcgactgcgaggacagaagcgacgaggccgccgagctgtgcggcagacccggccccggcgccaccagcgcccccgccgcctgcgccaccgccagccagttcgcctgcagaagcggcgagtgcgtgcacctgggctggagatgcgacggcgacagagactgcaaggacaagagcgacgaggccgactgccccctgggcacctgcagaggcgacgagttccagtgcggcgacggcacctgcgtgctggccatcaagcactgcaaccaggagcaggactgccccgacggcagcgacgaggccggctgcctgcagggcctgaacgagtgcctgcacaacaacggcggctgcagccacatctgcaccgacctgaagatcggcttcgagtgcacctgccccgccggcttccagctgctggaccagaagacctgcggcgacatcgacgagtgcaaggaccccgacgcctgcagccagatctgcgtgaactacaagggctacttcaagtgcgagtgctaccccggctacgagatggacctgctgaccaagaactgcaaggccgccgccggcaagagccccagcctgatcttcaccaacagacacgaggtgagaagaatcgacctggtgaagagaaactacagcagactgatccccatgctgaagaacgtggtggccctggacgtggaggtggccaccaacagaatctactggtgcgacctgagctacagaaagatctacagcgcctacatggacaaggccagcgaccccaaggagcaggaggtgctgatcgacgagcagctgcacagccccgagggcctggccgtggactgggtgcacaagcacatctactggaccgacagcggcaacaagaccatcagcgtggccaccgtggacggcggcagaagaagaaccctgttcagcagaaacctgagcgagcccagagccatcgccgtggaccccctgagaggcttcatgtactggagcgactggggcgaccaggccaagatcgagaagagcggcctgaacggcgtggacagacagaccctggtgagcgacaacatcgagtggcccaacggcatcaccctggacctgctgagccagagactgtactgggtggacagcaagctgcaccagctgagcagcatcgacttcagcggcggcaacagaaagaccctgatcagcagcaccgacttcctgagccaccccttcggcatcgccgtgttcgaggacaaggtgttctggaccgacctggagaacgaggccatcttcagcgccaacagactgaacggcctggagatcagcatcctggccgagaacctgaacaacccccacgacatcgtgatcttccacgagctgaagcagcccagagcccccgacgcctgcgagctgagcgtgcagcccaacggcggctgcgagtacctgtgcctgcccgccccccagatcagcagccacagccccaagtacacctgcgcctgccccgacaccatgtggctgggccccgacatgaagagatgctacagagccccccagagcaccagcaccaccaccctggccagcaccatgaccagaaccgtgcccgccaccaccagagcccccggcaccaccgtgcacagaagcacctaccagaaccacagcaccgagacccccagcctgaccgccgccgtgcccagcagcgtgagcgtgcccagagcccccagcatcagccccagcaccctgagccccgccaccagcaaccacagccagcactacgccaacgaggacagcaagatgggcagcaccgtgaccgccgccgtgatcggcatcatcgtgcccatcgtggtgatcgccctgctgtgcatgagcggctacctgatctggagaaactggaagagaaagaacaccaagagcatgaacttcgacaaccccgtgtacagaaagaccaccgaggaggaggacgaggacgagctgcacatcggcagaaccgcccagatcggccacgtgtaccccgccgccatcagcagcttcgacagacccctgtgggccgagccctgcctgggcgagaccagagagcccgaggaccccgcccccgccctgaaggagctgttcgtgctgcccggcgagcccagaagccagctgcaccagctgcccaagaaccccctgagcgagctgcccgtggtgaagagcaagagagtggccctgagcctggaggacgacggcctgccctag

SEQ ID NO: 87326 - DNA, 2103 bp, synthetic construct
  misc_feature 1..2103: note = Description of Artificial Sequence: Synthetic coding sequence
  source 1..2103: mol_type = other DNA
atgggcctgcccgagcccggccccctgagactgctggccctgctgctgctgctgctgctgctgctgctgctgcagctgcagcacctggccgccgccgccgccgaccccctgctgggcggccagggccccgccaaggactgcgagaaggaccagttccagtgcagaaacgagagatgcatccccagcgtgtggagatgcgacgaggacgacgactgcctggaccacagcgacgaggacgactgccccaagaagacctgcgccgacagcgacttcacctgcgacaacggccactgcatccacgagagatggaagtgcgacggcgaggaggagtgccccgacggcagcgacgagagcgaggccacctgcaccaagcaggtgtgccccgccgagaagctgagctgcggccccaccagccacaagtgcgtgcccgccagctggagatgcgacggcgagaaggactgcgagggcggcgccgacgaggccggctgcgccaccagcctgggcacctgcagaggcgacgagttccagtgcggcgacggcacctgcgtgctggccatcaagcactgcaaccaggagcaggactgccccgacggcagcgacgaggccggctgcctgcagggcctgaacgagtgcctgcacaacaacggcggctgcagccacatctgcaccgacctgaagatcggcttcgagtgcacctgccccgccggcttccagctgctggaccagaagacctgcggcgacatcgacgagtgcaaggaccccgacgcctgcagccagatctgcgtgaactacaagggctacttcaagtgcgagtgctaccccggctacgagatggacctgctgaccaagaactgcaaggccgccgccggcaagagccccagcctgatcttcaccaacagacacgaggtgagaagaatcgacctggtgaagagaaactacagcagactgatccccatgctgaagaacgtggtggccctggacgtggaggtggccaccaacagaatctactggtgcgacctgagctacagaaagatctacagcgcctacatggacaaggccagcgaccccaaggagcaggaggtgctgatcgacgagcagctgcacagccccgagggcctggccgtggactgggtgcacaagcacatctactggaccgacagcggcaacaagaccatcagcgtggccaccgtggacggcggcagaagaagaaccctgttcagcagaaacctgagcgagcccagagccatcgccgtggaccccctgagaggcttcatgtactggagcgactggggcgaccaggccaagatcgagaagagcggcctgaacggcgtggacagacagaccctggtgagcgacaacatcgagtggcccaacggcatcaccctggacctgctgagccagagactgtactgggtggacagcaagctgcaccagctgagcagcatcgacttcagcggcggcaacagaaagaccctgatcagcagcaccgacttcctgagccaccccttcggcatcgccgtgttcgaggacaaggtgttctggaccgacctggagaacgaggccatcttcagcgccaacagactgaacggcctggagatcagcatcctggccgagaacctgaacaacccccacgacatcgtgatcttccacgagctgaagcagcccagagcccccgacgcctgcgagctgagcgtgcagcccaacggcggctgcgagtacctgtgcctgcccgccccccagatcagcagccacagccccaagtacacctgcgcctgccccgacaccatgtggctgggccccgacatgaagagatgctacagagacgccaacgaggacagcaagatgggcagcaccgtgaccgccgccgtgatcggcatcatcgtgcccatcgtggtgatcgccctgctgtgcatgagcggctacctgatctggagaaactggaagagaaagaacaccaagagcatgaacttcgacaaccccgtgtacagaaagaccaccgaggaggaggacgaggacgagctgcacatcggcagaaccgcccagatcggccacgtgtaccccgccagagtggccctgagcctggaggacgacggcctgccctag

SEQ ID NO: 87327 - DNA, 2715 bp, synthetic construct
  misc_feature 1..2715: note = Description of Artificial Sequence: Synthetic coding sequence
  source 1..2715: mol_type = other DNA
atgggcctgcccgagcccggccccctgagactgctggccctgctgctgctgctgctgctgctgctgctgctgcagctgcagcacctggccgccgccgccgccgaccccctgctgggcggccagggccccgccaaggactgcgagaaggaccagttccagtgcagaaacgagagatgcatccccagcgtgtggagatgcgacgaggacgacgactgcctggaccacagcgacgaggacgactgccccaagaagacctgcgccgacagcgacttcacctgcgacaacggccactgcatccacgagagatggaagtgcgacggcgaggaggagtgccccgacggcagcgacgagagcgaggccacctgcaccaagcaggtgtgccccgccgagaagctgagctgcggccccaccagccacaagtgcgtgcccgccagctggagatgcgacggcgagaaggactgcgagggcggcgccgacgaggccggctgcgccaccctgtgcgccccccacgagttccagtgcggcaacagaagctgcctggccgccgtgttcgtgtgcgacggcgacgacgactgcggcgacggcagcgacgagagaggctgcgccgaccccgcctgcggccccagagagttcagatgcggcggcgacggcggcggcgcctgcatccccgagagatgggtgtgcgacagacagttcgactgcgaggacagaagcgacgaggccgccgagctgtgcggcagacccggccccggcgccaccagcgcccccgccgcctgcgccaccgccagccagttcgcctgcagaagcggcgagtgcgtgcacctgggctggagatgcgacggcgacagagactgcaaggacaagagcgacgaggccgactgccccctgggcacctgcagaggcgacgagttccagtgcggcgacggcacctgcgtgctggccatcaagcactgcaaccaggagcaggactgccccgacggcagcgacgaggccggctgcctgcagggcctgaacgagtgcctgcacaacaacggcggctgcagccacatctgcaccgacctgaagatcggcttcgagtgcacctgccccgccggcttccagctgctggaccagaagacctgcggcgacatcgacgagtgcaaggaccccgacgcctgcagccagatctgcgtgaactacaagggctacttcaagtgcgagtgctaccccggctacgagatggacctgctgaccaagaactgcaaggccgccgccggcaagagccccagcctgatcttcaccaacagacacgaggtgagaagaatcgacctggtgaagagaaactacagcagactgatccccatgctgaagaacgtggtggccctggacgtggaggtggccaccaacagaatctactggtgcgacctgagctacagaaagatctacagcgcctacatggacaaggccagcgaccccaaggagcaggaggtgctgatcgacgagcagctgcacagccccgagggcctggccgtggactgggtgcacaagcacatctactggaccgacagcggcaacaagaccatcagcgtggccaccgtggacggcggcagaagaagaaccctgttcagcagaaacctgagcgagcccagagccatcgccgtggaccccctgagaggcttcatgtactggagcgactggggcgaccaggccaagatcgagaagagcggcctgaacggcgtggacagacagaccctggtgagcgacaacatcgagtggcccaacggcatcaccctggacctgctgagccagagactgtactgggtggacagcaagctgcaccagctgagcagcatcgacttcagcggcggcaacagaaagaccctgatcagcagcaccgacttcctgagccaccccttcggcatcgccgtgttcgaggacaaggtgttctggaccgacctggagaacgaggccatcttcagcgccaacagactgaacggcctggagatcagcatcctggccgagaacctgaacaacccccacgacatcgtgatcttccacgagctgaagcagcccagagcccccgacgcctgcgagctgagcgtgcagcccaacggcggctgcgagtacctgtgcctgcccgccccccagatcagcagccacagccccaagtacacctgcgcctgccccgacaccatgtggctgggccccgacatgaagagatgctacagagccccccagagcaccagcaccaccaccctggccagcaccatgaccagaaccgtgcccgccaccaccagagcccccggcaccaccgtgcacagaagcacctaccagaaccacagcaccgagacccccagcctgaccgccgccgtgcccagcagcgtgagcgtgcccagagcccccagcatcagccccagcaccctgagccccgccaccagcaaccacagccagcactacgccaacgaggacagcaagatgggcagcaccgtgaccgccgccgtgatcggcatcatcgtgcccatcgtggtgatcgccctgctgtgcatgagcggctacctgatctggagaaactggaagagaaagaacaccaagagcatgaacttcgacaaccccgtgtacagaaagaccaccgaggaggaggacgaggacgagctgcacatcggcagaaccgcccagatcggccacgtgtaccccgccagagtggccctgagcctggaggacgacggcctgccctag

SEQ ID NO: 87328 - DNA, 1074 bp, synthetic construct
  misc_feature 1..1074: note = Description of Artificial Sequence: Synthetic coding sequence
  source 1..1074: mol_type = other DNA
atggcccccagaagagtgagaagcttcctgagaggcctgcccgccctgctgctgctgctgctgttcctgggcccctggcccgccgccagccacggcggcaagtacagcagagagaagaaccagcccaagcccagccccaagagagagagcggcgaggagttcagaatggagaagctgaaccagctgtgggagaaggcccagagactgcacctgccccccgtgagactggccgagctgcacgccgacctgaagatccaggagagagacgagctggcctggaagaagctgaagctggacggcctggacgaggacggcgagaaggaggccagactgatcagaaacctgaacgtgatcctggccaagtacggcctggacggcaagaaggacgccagacaggtgaccagcaacagcctgagcggcacccaggaggacggcctggacgaccccagactggagaagctgtggcacaaggccaagaccagcggcaagttcagcggcgaggagctggacaagctgtggagagagttcctgcaccacaaggagaaggtgcacgagtacaacgtgctgctggagaccctgagcagaaccgaggagatccacgagaacgtgatcagccccagcgacctgagcgacatcaagggcagcgtgctgcacagcagacacaccgagctgaaggagaagctgagaagcatcaaccagggcctggacagactgagaagagtgagccaccagggctacagcaccgaggccgagttcgaggagcccagagtgatcgacctgtgggacctggcccagagcgccaacctgaccgacaaggagctggaggccttcagagaggagctgaagcacttcgaggccaagatcgagaagcacaaccactaccagaagcagctggagatcgcccacgagaagctgagacacgccgagagcgtgggcgacggcgagagagtgagcagaagcagagagaagcacgccctgctggagggcagaaccaaggagctgggctacaccgtgaagaagcacctgcaggacctgagcggcagaatcagcagagccagacacaacgagctgtag

SEQ ID NO: 87329 - DNA, 402 bp, synthetic construct
  misc_feature 1..402: note = Description of Artificial Sequence: Synthetic coding sequence
  source 1..402: mol_type = other DNA
atgaactacatgcccggcaccgccagcctgatcgaggacatcgacaagaagcacctggtgctgctgagagacggcagaaccctgatcggcttcctgagaagcatcgaccagttcgccaacctggtgctgcaccagaccgtggagagaatccacgtgggcaagaagtacggcgacatccccagaggcatcttcgtggtgagaggcgagaacgtggtgctgctgggcgagatcgacctggagaaggagagcgacacccccctgcagcaggtgagcatcgaggagatcctggaggagcagagagtggagcagcagaccaagctggaggccgagaagctgaaggtgcaggccctgaaggacagaggcctgagcatccccagagccgacaccctggacgagtactag

SEQ ID NO: 87330 - DNA, 588 bp, synthetic construct
  misc_feature 1..588: note = Description of Artificial Sequence: Synthetic coding sequence
  source 1..588: mol_type = other DNA
atggccgccccccccggcgagtacttcagcgtgggcagccaggtgagctgcagaacctgccaggagcagagactgcagggcgaggtggtggccttcgactaccagagcaagatgctggccctgaagtgccccagcagcagcggcaagcccaaccacgccgacatcctgctgatcaacctgcagtacgtgagcgaggtggagatcatcaacgacagaaccgagacccccccccccctggccagcctgaacgtgagcaagctggccagcaaggccagaaccgagaaggaggagaagctgagccaggcctacgccatcagcgccggcgtgagcctggagggccagcagctgttccagaccatccacaagaccatcaaggactgcaagtggcaggagaagaacatcgtggtgatggaggaggtggtgatcacccccccctaccaggtggagaactgcaagggcaaggagggcagcgccctgagccacgtgagaaagatcgtggagaagcacttcagagacgtggagagccagaagatcctgcagagaagccaggcccagcagccccagaaggaggccgccctgagcagctag

SEQ ID NO: 87331 - DNA, 588 bp, synthetic construct; identical to SEQ ID NO: 87330
  misc_feature 1..588: note = Description of Artificial Sequence: Synthetic coding sequence
  source 1..588: mol_type = other DNA

SEQ ID NO: 87332 - DNA, 288 bp, synthetic construct
  misc_feature 1..288: note = Description of Artificial Sequence: Synthetic coding sequence
  source 1..288: mol_type = other DNA
atgctgttctacagcttcttcaagagcctggtgggcaaggacgtggtggtggagctgaagaacgacctgagcatctgcggcaccctgcacagcgtggaccagtacctgaacatcaagctgaccgacatcagcgtgaccgaccccgagaagtacccccacatgctgagcgtgaagaactgcttcatcagaggcagcgtggtgagatacgtgcagctgcccgccgacgaggtggacacccagctgctgcaggacgccgccagaaaggaggccctgcagcagaagcagtag

SEQ ID NO: 87333 - DNA, 288 bp, synthetic construct; identical to SEQ ID NO: 87332
  misc_feature 1..288: note = Description of Artificial Sequence: Synthetic coding sequence
  source 1..288: mol_type = other DNA

SEQ ID NO: 87334 - DNA, 288 bp, synthetic construct; identical to SEQ ID NO: 87332
  misc_feature 1..288: note = Description of Artificial Sequence: Synthetic coding sequence
  source 1..288: mol_type = other DNA

SEQ ID NO: 87335 - DNA, 288 bp, synthetic construct; identical to SEQ ID NO: 87332
  misc_feature 1..288: note = Description of Artificial Sequence: Synthetic coding sequence
  source 1..288: mol_type = other DNA

SEQ ID NO: 87336 - DNA, 288 bp, synthetic construct; identical to SEQ ID NO: 87332
  misc_feature 1..288: note = Description of Artificial Sequence: Synthetic coding sequence
  source 1..288: mol_type = other DNA

SEQ ID NO: 87337 - DNA, 288 bp, synthetic construct; identical to SEQ ID NO: 87332
  misc_feature 1..288: note = Description of Artificial Sequence: Synthetic coding sequence
  source 1..288: mol_type = other DNA

SEQ ID NO: 87338 - DNA, 309 bp, synthetic construct
  misc_feature 1..309: note = Description of Artificial Sequence: Synthetic coding sequence
  source 1..309: mol_type = other DNA
atggccgacgacgtggaccagcagcagaccaccaacaccgtggaggagcccctggacctgatcagactgagcctggacgagagaatctacgtgaagatgagaaacgacagagagctgagaggcagactgcacgcctacgaccagcacctgaacatgatcctgggcgacgtggaggagaccgtgaccaccatcgagatcgacgaggagacctacgaggagatctacaagagcaccaagagaaacatccccatgctgttcgtgagaggcgacggcgtggtgctggtggccccccccctgagagtgggctag

SEQ ID NO: 87339 - DNA, 420 bp, synthetic construct
  misc_feature 1..420: note = Description of Artificial Sequence: Synthetic coding sequence
  source 1..420: mol_type = other DNA
atgctgcccctgagcctgctgaagaccgcccagaaccaccccatgctggtggagctgaagaacggcgagacctacaacggccacctggtgagctgcgacaactggatgaacatcaacctgagagaggtgatctgcaccagcagagacggcgacaagttctggagaatgcccgagtgctacatcagaggcagcaccatcaagtacctgagaatccccgacgagatcatcgacatggtgaaggaggaggtggtggccaagggcagaggcagaggcggcctgcagcagcagaagcagcagaagggcagaggcatgggcggcgccggcagaggcgtgttcggcggcagaggcagaggcggcatccccggcaccggcagaggccagcccgagaagaagcccggcagacaggccggcaagcagtag

SEQ ID NO: 87340 - DNA, 420 bp, synthetic construct; identical to SEQ ID NO: 87339
  misc_feature 1..420: note = Description of Artificial Sequence: Synthetic coding sequence
  source 1..420: mol_type = other DNA

SEQ ID NO: 87341 - DNA, 276 bp, synthetic construct
  misc_feature 1..276: note = Description of Artificial Sequence: Synthetic coding sequence
  source 1..276: mol_type = other DNA
atggccgccaacgccaccaccaaccccagccagctgctgcccctggagctggtggacaagtgcatcggcagcagaatccacatcgtgatgaagagcgacaaggagatcgtgggcaccctgctgggcttcgacgacttcgtgaacatggtgctggaggacgtgaccgagttcgagatcacccccgagggcagaagaatcaccaagctggaccagatcctgctgaacggcaacaacatcaccatgctggtgcccggcggcgagggccccgaggtgtag

SEQ ID NO: 87342 - DNA, 243 bp, synthetic construct
  misc_feature 1..243: note = Description of Artificial Sequence: Synthetic coding sequence
  source 1..243: mol_type = other DNA
atgagcctgagaaagcagacccccagcgacttcctgaagcagatcatcggcagacccgtggtggtgaagctgaacagcggcgtggactacagaggcgtgctggcctgcctggacggctacatgaacatcgccctggagcagaccgaggagtacgtgaacggccagctgaagaacaagtacggcgacgccttcatcagaggcaacaacgtgctgtacatcagcacccagaagagaagaatgtag

SEQ ID NO: 87343 - DNA, 243 bp, synthetic construct; identical to SEQ ID NO: 87342
  misc_feature 1..243: note = Description of Artificial Sequence: Synthetic coding sequence
  source 1..243: mol_type = other DNA

SEQ ID NO: 87344 - DNA, 243 bp, synthetic construct; identical to SEQ ID NO: 87342
  misc_feature 1..243: note = Description of Artificial Sequence: Synthetic coding sequence
  source 1..243: mol_type = other DNA

SEQ ID NO: 87345 - DNA, 243 bp, synthetic construct; identical to SEQ ID NO: 87342
  misc_feature 1..243: note = Description of Artificial Sequence: Synthetic coding sequence
  source 1..243: mol_type = other DNA

SEQ ID NO: 87346 - DNA, 312 bp, synthetic construct
  misc_feature 1..312: note = Description of Artificial Sequence: Synthetic coding sequence
  source 1..312: mol_type = other DNA
atggccgacaaggagaagaagaagaaggagagcatcctggacctgagcaagtacatcgacaagaccatcagagtgaagttccagggcggcagagaggccagcggcatcctgaagggcttcgaccccctgctgaacctggtgctggacggcaccatcgagtacatgagagaccccgacgaccagtacaagctgaccgaggacaccagacagctgggcctggtggtgtgcagaggcaccagcgtggtgctgatctgcccccaggacggcatggaggccatccccaaccccttcatccagcagcaggacgcctag

SEQ ID NO: 87347 - DNA, 1116 bp, synthetic construct
  misc_feature 1..1116: note = Description of Artificial Sequence: Synthetic coding sequence
  source 1..1116: mol_type = other DNA
atgagcgcccaggcccagatgagagccctgctggaccagctgatgggcaccgccagagacggcgacgagaccagacagagagtgaagttcaccgacgacagagtgtgcaagagccacctgctggactgctgcccccacgacatcctggccggcaccagaatggacctgggcgagtgcaccaagatccacgacctggccctgagagccgactacgagatcgccagcaaggagagagacctgttcttcgagctggacgccatggaccacctggagagcttcatcgccgagtgcgacagaagaaccgagctggccaagaagagactggccgagacccaggaggagatcagcgccgaggtgagcgccaaggccgagaaggtgcacgagctgaacgaggagatcggcaagctgctggccaaggccgagcagctgggcgccgagggcaacgtggacgagagccagaagatcctgatggaggtggagaaggtgagagccaagaagaaggaggccgaggaggagtacagaaacagcatgcccgccagcagcttccagcagcagaagctgagagtgtgcgaggtgtgcagcgcctacctgggcctgcacgacaacgacagaagactggccgaccacttcggcggcaagctgcacctgggcttcatccagatcagagagaagctggaccagctgagaaagaccgtggccgagaagcaggagaagagaaaccaggacagactgagaagaagagaggagagagagagagaggagagactgagcagaagaagcggcagcagaaccagagacagaagaagaagcagaagcagagacagaagaagaagaagaagcagaagcaccagcagagagagaagaaagctgagcagaagcagaagcagagacagacacagaagacacagaagcagaagcagaagccacagcagaggccacagaagagccagcagagacagaagcgccaagtacaagttcagcagagagagagccagcagagaggagagctgggagagcggcagaagcgagagaggcccccccgactggagactggagagcagcaacggcaagatggccagcagaagaagcgaggagaaggaggccggcgagatctag

SEQ ID NO: 87348 - DNA, 978 bp, synthetic construct
  misc_feature 1..978: note = Description of Artificial Sequence: Synthetic coding sequence
  source 1..978: mol_type = other DNA
atgagcgcccaggcccagatgagagccctgctggaccagctgatgggcaccgccagagacggcgacgagaccagacagagagtgaagttcaccgacgacagagtgtgcaagagccacctgctggactgctgcccccacgacatcctggccggcaccagaatggacctgggcgagtgcaccaagatccacgacctggccctgagagccgactacgagatcgccagcaaggagagagacctgttcttcgagctggacgccatggaccacctggagagcttcatcgccgagtgcgacagaagaaccgagctggccaagaagagactggccgagacccaggaggagatcagcgccgaggtgagcgccaaggccgagaaggtgcacgagctgaacgaggagatcggcaagctgctggccaaggccgagcagctgggcgccgagggcaacgtggacgagagccagaagatcctgatggaggtggagaaggtgagagccaagaagaaggaggccgaggaggagtacagaaacagcatgcccgccagcagcttccagcagcagaagctgagagtgtgcgaggtgtgcagcgcctacctgggcctgcacgacaacgacagaagactggccgaccacttcggcggcaagctgcacctgggcttcatccagatcagagagaagctggaccagctgagaaagaccgtggccgagaagcaggagaagagaaaccaggacagactgagaagaagagaggagagagagagagaggagagactgagcagaagaagcggcagcagaaccagagacagaagaagaagcagaagcagagacagaagaagaagaagaagcagaagcaccagcagagagagaagaaagctgagcagaagcagaagcagagacagacacagaagacacagaagcagaagcagaagccacagcagaggccacagaagagccagcagagacagaagcgccaagtacaagtag

SEQ ID NO: 87349 - DNA, 819 bp, synthetic construct
  misc_feature 1..819: note = Description of Artificial Sequence: Synthetic coding sequence
  source 1..819: mol_type = other DNA
atggacctgggcgagtgcaccaagatccacgacctggccctgagagccgactacgagatcgccagcaaggagagagacctgttcttcgagctggacgccatggaccacctggagagcttcatcgccgagtgcgacagaagaaccgagctggccaagaagagactggccgagacccaggaggagatcagcgccgaggtgagcgccaaggccgagaaggtgcacgagctgaacgaggagatcggcaagctgctggccaaggccgagcagctgggcgccgagggcaacgtggacgagagccagaagatcctgatggaggtggagaaggtgagagccaagaagaaggaggccgaggaggagtacagaaacagcatgcccgccagcagcttccagcagcagaagctgagagtgtgcgaggtgtgcagcgcctacctgggcctgcacgacaacgacagaagactggccgaccacttcggcggcaagctgcacctgggcttcatccagatcagagagaagctggaccagctgagaaagaccgtggccgagaagcaggagaagagaaaccaggacagactgagaagaagagaggagagagagagagaggagagactgagcagaagaagcggcagcagaaccagagacagaagaagaagcagaagcagagacagaagaagaagaagaagcagaagcaccagcagagagagaagaaagctgagcagaagcagaagcagagacagacacagaagacacagaagcagaagcagaagccacagcagaggccacagaagagccagcagagacagaagcgccaagtacaagtag

SEQ ID NO: 87350 - DNA, 978 bp, synthetic construct; identical to SEQ ID NO: 87348
  misc_feature 1..978: note = Description of Artificial Sequence: Synthetic coding sequence
  source 1..978: mol_type = other DNA

SEQ ID NO: 87351 - DNA, 99 bp, synthetic construct
  misc_feature 1..99: note = Description of Artificial Sequence: Synthetic coding sequence
  source 1..99: mol_type = other DNA
atggacctgggcgagtgcaccaagatccacgacctggccctgagagccgactacgagatcgccagcaaggagagagacctgttcttcgagctggactag

SEQ ID NO: 87352 - DNA, 549 bp, synthetic construct
  misc_feature 1..549: note = Description of Artificial Sequence: Synthetic coding sequence
  source 1..549: mol_type = other DNA
atggaccacctggagagcttcatcgccgagtgcgacagaagaaccgagctggccaagaagagactggccgagacccaggaggagatcagcgccgaggtgagcgccaaggccgagaaggtgcacgagctgaacgaggagatcggcaagctgctggccaaggccgagcagctgggcgccgagggcaacgtggacgagagccagaagatcctgatggaggtggagaaggtgagagccaagaagaaggaggccgaggaggagtacagaaacagcatgcccgccagcagcttccagcagcagaagctgagagtgtgcgaggtgtgcagcgcctacctgggcctgcacgacaacgacagaagactggccgaccacttcggcggcaagctgcacctgggcttcatccagatcagagagaagctggaccagctgagaaagaccgtggccgagaagcaggagaagagaaaccaggacagactgagaagaagagaggagagagagagagaggagagactgagcagaagaagcggcagcagaaccagagacagaagatag

SEQ ID NO: 87353 - DNA, 183 bp, synthetic construct
  misc_feature 1..183: note = Description of Artificial Sequence: Synthetic coding sequence
  source 1..183: mol_type = other DNA
tgaagaagaagaagcagaagcagagacagaagaagaagaagaagcagaagcaccagcagagagagaagaaagctgagcagaagcagaagcagagacagacacagaagacacagaagcagaagcagaagccacagcagaggccacagaagagccagcagagacagaagcgccaagtacaagtag

SEQ ID NO: 87354 - DNA, 255 bp, synthetic construct
  misc_feature 1..255: note = Description of Artificial Sequence: Synthetic coding sequence
  source 1..255: mol_type = other DNA
atggaccacctggagagcttcatcgccgagtgcgacagaagaaccgagctggccaagaagagactggccgagacccaggaggagatcagcgccgaggtgagcgccaaggccgagaaggtgcacgagctgaacgaggagatcggcaagctgctggccaaggccgagcagctgggcgccgagggcaacgtggacgagagccagaagatcctgatggaggtggagaaggtgagagccaagaagaaggaggccgagtag

SEQ ID NO: 87355 - DNA, 1176 bp, synthetic construct
  misc_feature 1..1176: note = Description of Artificial Sequence: Synthetic coding sequence
  source 1..1176: mol_type = other DNA
atgcccgcctacctgaacctgcagggcagcgtgagaaaggccccccacagccccagcagagacaccaccagacagagaatcaagttcagcgacgacagagtgtgcaagagccacctgctgaactgctgcccccacgacgtgctgagcggcaccagaatggacctgggcgagtgcctgaaggtgcacgacctggccctgagagccgactacgagatcgccagcaaggagcaggacttcttcttcgagctggacgccatggaccacctgcagagcttcatcgccgactgcgacagaagaaccgaggtggccaagaagagactggccgagacccaggaggagatcagcgccgaggtggccgccaaggccgagagagtgcacgagctgaacgaggagatcggcaagctgctggccaaggtggagcagctgggcgccgagggcaacgtggaggagagccagaaggtgatggacgaggtggagaaggccagagccaagaagagagaggccgaggaggtgtacagaaacagcatgcccgccagcagcttccagcagcagaagctgagagtgtgcgaggtgtgcagcgcctacctgggcctgcacgacaacgacagaagactggccgaccacttcggcggcaagctgcacctgggcttcatcgagatcagagagaagctggaggagctgaagagagtggtggccgagaagcaggagaagagaaaccaggagagactgaagagaagagaggagagagagagagaggagagagagaagctgagaagaagcagaagccacagcaagaaccccaagagaagcagaagcagagagcacagaagacacagaagcagaagcatgagcagagagagaaagagaagaaccagaagcaagagcagagagaagagacacagacacagaagcagaagcagcagcagaagcagaagcagaagccaccagagaagcagacacagcagcagagacagaagcagagagagaagcaagagaagaagcagcaaggagagattcagagaccaggacctggccagctgcgacagagacagaagcagcagagacagaagccccagagacagagacagaaaggacaagaagagaagctacgagagcgccaacggcagaagcgaggacagaagaagcagcgaggagagagaggccggcgagatctag

SEQ ID NO: 87356 - DNA, 1179 bp, synthetic construct
  misc_feature 1..1179: note = Description of Artificial Sequence: Synthetic coding sequence
  source 1..1179: mol_type = other DNA
atgagcgcccaggcccagatgagagccatgctggaccagctgatgggcaccagcagagacggcgacaccaccagacagagaatcaagttcagcgacgacagagtgtgcaagagccacctgctgaactgctgcccccacgacgtgctgagcggcaccagaatggacctgggcgagtgcctgaaggtgcacgacctggccctgagagccgactacgagatcgccagcaaggagcaggacttcttcttcgagctggacgccatggaccacctgcagagcttcatcgccgactgcgacagaagaaccgaggtggccaagaagagactggccgagacccaggaggagatcagcgccgaggtggccgccaaggccgagagagtgcacgagctgaacgaggagatcggcaagctgctggccaaggtggagcagctgggcgccgagggcaacgtggaggagagccagaaggtgatggacgaggtggagaaggccagagccaagaagagagaggccgaggaggtgtacagaaacagcatgcccgccagcagcttccagcagcagaagctgagagtgtgcgaggtgtgcagcgcctacctgggcctgcacgacaacgacagaagactggccgaccacttcggcggcaagctgcacctgggcttcatcgagatcagagagaagctggaggagctgaagagagtggtggccgagaagcaggagaagagaaaccaggagagactgaagagaagagaggagagagagagagaggagagagagaagctgagaagaagcagaagccacagcaagaaccccaagagaagcagaagcagagagcacagaagacacagaagcagaagcatgagcagagagagaaagagaagaaccagaagcaagagcagagagaagagacacagacacagaagcagaagcagcagcagaagcagaagcagaagccaccagagaagcagacacagcagcagagacagaagcagagagagaagcaagagaagaagcagcaaggagagattcagagaccaggacctggccagctgcgacagagacagaagcagcagagacagaagccccagagacagagacagaaaggacaagaagagaagctacgagagcgccaacggcagaagcgaggacagaagaagcagcgaggagagagaggccggcgagatctag

SEQ ID NO: 87357 - DNA, 1170 bp, synthetic construct
  misc_feature 1..1170: note = Description of Artificial Sequence: Synthetic coding sequence
  source 1..1170: mol_type = other DNA
atggtgatccacagccagctgaagaagatccagggcgccagcgagagaatgggcgacaccaccagacagagaatcaagttcagcgacgacagagtgtgcaagagccacctgctgaactgctgcccccacgacgtgctgagcggcaccagaatggacctgggcgagtgcctgaaggtgcacgacctggccctgagagccgactacgagatcgccagcaaggagcaggacttcttcttcgagctggacgccatggaccacctgcagagcttcatcgccgactgcgacagaagaaccgaggtggccaagaagagactggccgagacccaggaggagatcagcgccgaggtggccgccaaggccgagagagtgcacgagctgaacgaggagatcggcaagctgctggccaaggtggagcagctgggcgccgagggcaacgtggaggagagccagaaggtgatggacgaggtggagaaggccagagccaagaagagagaggccgaggaggtgtacagaaacagcatgcccgccagcagcttccagcagcagaagctgagagtgtgcgaggtgtgcagcgcctacctgggcctgcacgacaacgacagaagactggccgaccacttcggcggcaagctgcacctgggcttcatcgagatcagagagaagctggaggagctgaagagagtggtggccgagaagcaggagaagagaaaccaggagagactgaagagaagagaggagagagagagagaggagagagagaagctgagaagaagcagaagccacagcaagaaccccaagagaagcagaagcagagagcacagaagacacagaagcagaagcatgagcagagagagaaagagaagaaccagaagcaagagcagagagaagagacacagacacagaagcagaagcagcagcagaagcagaagcagaagccaccagagaagcagacacagcagcagagacagaagcagagagagaagcaagagaagaagcagcaaggagagattcagagaccaggacctggccagctgcgacagagacagaagcagcagagacagaagccccagagacagagacagaaaggacaagaagagaagctacgagagcgccaacggcagaagcgaggacagaagaagcagcgaggagagagaggccggcgagatctag

SEQ ID NO: 87358 - DNA, 1377 bp, synthetic construct
  misc_feature 1..1377: note = Description of Artificial Sequence: Synthetic coding sequence
  source 1..1377: mol_type = other DNA
atggccgccctgggcagccccagccacaccttcagaggcctgctgagagagctgagatacctgagcgccgccaccggcagaccctacagagacaccgccgcctacagatacctggtgaaggccttcagagcccacagagtgaccagcgagaagctgtgcagagcccagcacgagctgcacttccaggccgccacctacctgtgcctgctgagaagcatcagaaagcacgtggccctgcaccaggagttccacggcaagggcgacaccaccagacagagaatcaagttcagcgacgacagagtgtgcaagagccacctgctgaactgctgcccccacgacgtgctgagcggcaccagaatggacctgggcgagtgcctgaaggtgcacgacctggccctgagagccgactacgagatcgccagcaaggagcaggacttcttcttcgagctggacgccatggaccacctgcagagcttcatcgccgactgcgacagaagaaccgaggtggccaagaagagactggccgagacccaggaggagatcagcgccgaggtggccgccaaggccgagagagtgcacgagctgaacgaggagatcggcaagctgctggccaaggtggagcagctgggcgccgagggcaacgtggaggagagccagaaggtgatggacgaggtggagaaggccagagccaagaagagagaggccgaggaggtgtacagaaacagcatgcccgccagcagcttccagcagcagaagctgagagtgtgcgaggtgtgcagcgcctacctgggcctgcacgacaacgacagaagactggccgaccacttcggcggcaagctgcacctgggcttcatcgagatcagagagaagctggaggagctgaagagagtggtggccgagaagcaggagaagagaaaccaggagagactgaagagaagagaggagagagagagagaggagagagagaagctgagaagaagcagaagccacagcaagaaccccaagagaagcagaagcagagagcacagaagacacagaagcagaagcatgagcagagagagaaagagaagaaccagaagcaagagcagagagaagagacacagacacagaagcagaagcagcagcagaagcagaagcagaagccaccagagaagcagacacagcagcagagacagaagcagagagagaagcaagagaagaagcagcaaggagagattcagagaccaggacctggccagctgcgacagagacagaagcagcagagacagaagccccagagacagagacagaaaggacaagaagagaagctacgagagcgccaacggcagaagcgaggacagaagaagcagcgaggagagagaggccggcgagatctag

SEQ ID NO: 87359 - DNA, 1179 bp, synthetic construct; identical to SEQ ID NO: 87356
  misc_feature 1..1179: note = Description of Artificial Sequence: Synthetic coding sequence
  source 1..1179: mol_type = other DNA

SEQ ID NO: 87360 - DNA, 252 bp, synthetic construct
  misc_feature 1..252: note = Description of Artificial Sequence: Synthetic coding sequence
  source 1..252: mol_type = other DNA
atgagcgcccaggcccagatgagagccatgctggaccagctgatgggcaccagcagagacggcagcatgtacctgtgcctgcccaccagcatctgcaagggcgtgagcgagagacccagaatcagacaggccgagatccagctggtgaacgagagcaacagcgtgatgaccgagtacgccagagtgaccttcagcaccgtggtgctgatgatgagcttcctggagctggagtggatcctggagaacgtgtag

SEQ ID NO: 87361 - DNA, 1299 bp, synthetic construct
  misc_feature 1..1299: note = Description of Artificial Sequence: Synthetic coding sequence
  source 1..1299: mol_type = other DNA
atgatcagcgccgcccagctgctggacgagctgatgggcagagacagaaacctggcccccgacgagaagagaagcaacgtgagatgggaccacgagagcgtgtgcaagtactacctgtgcggcttctgccccgccgagctgttcaccaacaccagaagcgacctgggcccctgcgagaagatccacgacgagaacctgagaaagcagtacgagaagagcagcagattcatgaaggtgggctacgagagagacttcctgagatacctgcagagcctgctggccgaggtggagagaagaatcagaagaggccacgccagactggccctgagccagaaccagcagagcagcggcgccgccggccccaccggcaagaacgaggagaagatccaggtgctgaccgacaagatcgacgtgctgctgcagcagatcgaggagctgggcagcgagggcaaggtggaggaggcccagggcatgatgaagctggtggagcagctgaaggaggagagagagctgctgagaagcaccaccagcaccatcgagagcttcgccgcccaggagaagcagatggaggtgtgcgaggtgtgcggcgccttcctgatcgtgggcgacgcccagagcagagtggacgaccacctgatgggcaagcagcacatgggctacgccaagatcaaggccaccgtggaggagctgaaggagaagctgagaaagagaaccgaggagcccgacagagacgagagactgaagaaggagaagcaggagagagaggagagagagaaggagagagagagagagagagaggagagagagagaaagagaagaagagaggaggaggagagagagaaggagagagccagagacagagagagaagaaagagaagcagaagcagaagcagacacagcagcagaaccagcgacagaagatgcagcagaagcagagaccacaagagaagcagaagcagagagagaagaagaagcagaagcagagacagaagaagaagcagaagccacgacagaagcgagagaaagcacagaagcagaagcagagacagaagaagaagcaagagcagagacagaaagagctacaagcacagaagcaagagcagagacagagagcaggacagaaagagcaaggagaaggagaagagaggcagcgacgacaagaagagcagcgtgaagagcggcagcagagagaagcagagcgaggacaccaacaccgagagcaaggagagcgacaccaagaacgaggtgaacggcaccagcgaggacatcaagagcgagggcgacacccagagcaactag

SEQ ID NO: 87362 - DNA, 240 bp, synthetic construct
  misc_feature 1..240: note = Description of Artificial Sequence: Synthetic coding sequence
  source 1..240: mol_type = other DNA
atgatcagcgccgcccagctgctggacgagctgatgggcagagacagaaacctggcccccgacgagaagagaagcaacgtgagatgggaccacgagagcgtgtgcaagtactacctgtgcggcttctgccccgccgagctgttcaccaacaccagaagcgacctggacgtgttcggcagaggcgacaacatcagagacgtgagcaagttcctggaggacgacaagtggatggaggagtag

SEQ ID NO: 87363 - DNA, 1299 bp, synthetic construct; identical to SEQ ID NO: 87361
  misc_feature 1..1299: note = Description of Artificial Sequence: Synthetic coding sequence
  source 1..1299: mol_type = other DNA

SEQ ID NO: 87364 - DNA, 711 bp, synthetic construct
  misc_feature 1..711: note = Description of Artificial Sequence: Synthetic coding sequence
  source 1..711: mol_type = other DNA
atgatcagcgccgcccagctgctggacgagctgatgggcagagacagaaacctggcccccgacgagaagagaagcaacgtgagatgggaccacgagagcgtgtgcaagtactacctgtgcggcttctgccccgccgagctgttcaccaacaccagaagcgacctgggcccctgcgagaagatccacgacgagaacctgagaaagcagtacgagaagagcagcagattcatgaaggtgggctacgagagagacttcctgagatacctgcagagcctgctggccgaggtggagagaagaatcagaagaggccacgccagactggccctgagccagaaccagcagagcagcggcgccgccggccccaccggcaagaacgaggagaagatccaggtgctgaccgacaagatcgacgtgctgctgcagcagatcgaggagctgggcagcgagggcaaggtggaggaggcccagggcatgatgaagctggtggagcagctgaaggaggagagagagctgctgagaagcaccaccagcaccatcgagagcttcgccgcccaggagaagcagatggaggtgtgcgaggtgtgcggcgccttcctgatcgtgggcgacgcccagagcagagtggacgaccacctgatgggcaagcagcacatgggctacgccaagatcaaggccaccgtggaggagaagaagaagaagaagaagaagtag

SEQ ID NO: 87365 - DNA, 1071 bp, synthetic construct
  misc_feature 1..1071: note = Description of Artificial Sequence: Synthetic coding sequence
  source 1..1071: mol_type = other DNA
atgaaggtgggctacgagagagacttcctgagatacctgcagagcctgctggccgaggtggagagaagaatcagaagaggccacgccagactggccctgagccagaaccagcagagcagcggcgccgccggccccaccggcaagaacgaggagaagatccaggtgctgaccgacaagatcgacgtgctgctgcagcagatcgaggagctgggcagcgagggcaaggtggaggaggcccagggcatgatgaagctggtggagcagctgaaggaggagagagagctgctgagaagcaccaccagcaccatcgagagcttcgccgcccaggagaagcagatggaggtgtgcgaggtgtgcggcgccttcctgatcgtgggcgacgcccagagcagagtggacgaccacctgatgggcaagcagcacatgggctacgccaagatcaaggccaccgtggaggagctgaaggagaagctgagaaagagaaccgaggagcccgacagagacgagagactgaagaaggagaagcaggagagagaggagagagagaaggagagagagagagagagagaggagagagagagaaagagaagaagagaggaggaggagagagagaaggagagagccagagacagagagagaagaaagagaagcagaagcagaagcagacacagcagcagaaccagcgacagaagatgcagcagaagcagagaccacaagagaagcagaagcagagagagaagaagaagcagaagcagagacagaagaagaagcagaagccacgacagaagcgagagaaagcacagaagcagaagcagagacagaagaagaagcaagagcagagacagaaagagctacaagcacagaagcaagagcagagacagagagcaggacagaaagagcaaggagaaggagaagagaggcagcgacgacaagaagagcagcgtgaagagcggcagcagagagaagcagagcgaggacaccaacaccgagagcaaggagagcgacaccaagaacgaggtgaacggcaccagcgaggacatcaagagcgagggcctgttcgtgaccgtgtag

SEQ ID NO: 87366 - DNA, 1017 bp, synthetic construct
  misc_feature 1..1017: note = Description of Artificial Sequence: Synthetic coding sequence
  source 1..1017: mol_type = other DNA
atgagcctgagcgccttcaccctgttcctggccctgatcggcggcaccagcggccagtactacgactacgacttccccctgagcatctacggccagagcagccccaactgcgcccccgagtgcaactgccccgagagctaccccagcgccatgtactgcgacgagctgaagctgaagagcgtgcccatggtgccccccggcatcaagtacctgtacctgagaaacaaccagatcgaccacatcgacgagaaggccttcgagaacgtgaccgacctgcagtggctgatcctggaccacaacctgctggagaacagcaagatcaagggcagagtgttcagcaagctgaagcagctgaagaagctgcacatcaaccacaacaacctgaccgagagcgtgggccccctgcccaagagcctggaggacctgcagctgacccacaacaagatcaccaagctgggcagcttcgagggcctggtgaacctgaccttcatccacctgcagcacaacagactgaaggaggacgccgtgagcgccgccttcaagggcctgaagagcctggagtacctggacctgagcttcaaccagatcgccagactgcccagcggcctgcccgtgagcctgctgaccctgtacctggacaacaacaagatcagcaacatccccgacgagtacttcaagagattcaacgccctgcagtacctgagactgagccacaacgagctggccgacagcggcatccccggcaacagcttcaacgtgagcagcctggtggagctggacctgagctacaacaagctgaagaacatccccaccgtgaacgagaacctggagaactactacctggaggtgaaccagctggagaagttcgacatcaagagcttctgcaagatcctgggccccctgagctacagcaagatcaagcacctgagactggacggcaacagaatcagcgagaccagcctgccccccgacatgtacgagtgcctgagagtggccaacgaggtgaccctgaactag

SEQ ID NO: 87367 - DNA, 2100 bp, synthetic construct
  misc_feature 1..2100: note = Description of Artificial Sequence: Synthetic coding sequence
  source 1..2100: mol_type = other DNA
atgaagcagagattcagcgccctgcagctgctgaagctgctgctgctgctgcagccccccctgcccagagccctgagagaggccctgtgccccgagccctgcaactgcgtgcccgacggcgccctgagatgccccggccccaccgccggcctgaccagactgagcctggcctacctgcccgtgaaggtgatccccagccaggccttcagaggcctgaacgaggtgatcaagatcgagatcagccagatcgacagcctggagagaatcgaggccaacgccttcgacaacctgctgaacctgagcgagatcctgatccagaacaccaagaacctgagatacatcgagcccggcgccttcatcaacctgcccagactgaagtacctgagcatctgcaacaccggcatcagaaagttccccgacgtgaccaaggtgttcagcagcgagagcaacttcatcctggagatctgcgacaacctgcacatcaccaccatccccggcaacgccttccagggcatgaacaacgagagcgtgaccctgaagctgtacggcaacggcttcgaggaggtgcagagccacgccttcaacggcaccaccctgaccagcctggagctgaaggagaacgtgcacctggagaagatgcacaacggcgccttcagaggcgccaccggccccaagaccctggacatcagcagcaccaagctgcaggccctgcccagctacggcctggagagcatccagagactgatcgccaccagcagctacagcctgaagaagctgcccagcagagagaccttcgtgaacctgctggaggccaccctgacctaccccagccactgctgcgccttcagaaacctgcccaccaaggagcagaacttcagccacagcatcagcgagaacttcagcaagcagtgcgagagcaccgtgagaaaggtgaacaacaagaccctgtacagcagcatgctggccgagagcgagctgagcggctgggactacgagtacggcttctgcctgcccaagacccccagatgcgcccccgagcccgacgccttcaacccctgcgaggacatcatgggctacgacttcctgagagtgctgatctggctgatcaacatcctggccatcatgggcaacatgaccgtgctgttcgtgctgctgaccagcagatacaagctgaccgtgcccagattcctgatgtgcaacctgagcttcgccgacttctgcatgggcctgtacctgctgctgatcgccagcgtggacagccagaccaagggccagtactacaaccacgccatcgactggcagaccggcagcggctgcagcaccgccggcttcttcaccgtgttcgccagcgagctgagcgtgtacaccctgaccgtgatcaccctggagagatggcacaccatcacctacgccatccacctggaccagaagctgagactgagacacgccatcctgatcatgctgggcggctggctgttcagcagcctgatcgccatgctgcccctggtgggcgtgagcaactacatgaaggtgagcatctgcttccccatggacgtggagaccaccctgagccaggtgtacatcctgaccatcctgatcctgaacgtggtggccttcttcatcatctgcgcctgctacatcaagatctacttcgccgtgagaaaccccgagctgatggccaccaacaaggacaccaagatcgccaagaagatggccatcctgatcttcaccgacttcacctgcatggcccccatcagcttcttcgccatcagcgccgccttcaaggtgcccctgatcaccgtgaccaacagcaaggtgctgctggtgctgttctaccccatcaacagctgcgccaaccccttcctgtacgccatcttcaccaagaccttccagagagacttcttcctgctgctgagcaagttcggctgctgcaagagaagagccgagctgtacagaagaaaggacttcagcgcctacaccagcaactgcaagaacggcttcaccggcagcaacaagcccagccagagcaccctgaagctgagcaccctgcactgccagggcaccgccctgctggacaagaccagatacaccgagtgctag

SEQ ID NO: 87368 - DNA, 1914 bp, synthetic construct
  misc_feature 1..1914: note = Description of Artificial Sequence: Synthetic coding sequence
  source 1..1914: mol_type = other DNA
atgaagcagagattcagcgccctgcagctgctgaagctgctgctgctgctgcagccccccctgcccagagccctgagagaggccctgtgccccgagccctgcaactgcgtgcccgacggcgccctgagatgccccggccccaccgccggcctgaccagactgagcctggcctacctgcccgtgaaggtgatccccagccaggccttcagaggcctgaacgaggtgatcaagatcgagatcagccagatcgacagcctggagagaatcgaggccaacgccttcgacaacctgctgaacctgagcgagatcctgatccagaacaccaagaacctgagatacatcgagcccggcgccttcatcaacctgcccagactgaagtacctgagcatctgcaacaccggcatcagaaagttccccgacgtgaccaaggtgttcagcagcgagagcaacttcatcctggagatctgcgacaacctgcacatcaccaccatccccggcaacgccttccagggcatgaacaacgagagcgtgaccctgaagctgtacggcaacggcttcgaggaggtgcagagccacgccttcaacggcaccaccctgaccagcctggagctgaaggagaacgtgcacctggagaagatgcacaacggcgccttcagaggcgccaccggccccaagaccctgcagaacttcagccacagcatcagcgagaacttcagcaagcagtgcgagagcaccgtgagaaaggtgaacaacaagaccctgtacagcagcatgctggccgagagcgagctgagcggctgggactacgagtacggcttctgcctgcccaagacccccagatgcgcccccgagcccgacgccttcaacccctgcgaggacatcatgggctacgacttcctgagagtgctgatctggctgatcaacatcctggccatcatgggcaacatgaccgtgctgttcgtgctgctgaccagcagatacaagctgaccgtgcccagattcctgatgtgcaacctgagcttcgccgacttctgcatgggcctgtacctgctgctgatcgccagcgtggacagccagaccaagggccagtactacaaccacgccatcgactggcagaccggcagcggctgcagcaccgccggcttcttcaccgtgttcgccagcgagctgagcgtgtacaccctgaccgtgatcaccctggagagatggcacaccatcacctacgccatccacctggaccagaagctgagactgagacacgccatcctgatcatgctgggcggctggctgttcagcagcctgatcgccatgctgcccctggtgggcgtgagcaactacatgaaggtgagcatctgcttccccatggacgtggagaccaccctgagccaggtgtacatcctgaccatcctgatcctgaacgtggtggccttcttcatcatctgcgcctgctacatcaagatctacttcgccgtgagaaaccccgagctgatggccaccaacaaggacaccaagatcgccaagaagatggccatcctgatcttcaccgacttcacctgcatggcccccatcagcttcttcgccatcagcgccgccttcaaggtgcccctgatcaccgtgaccaacagcaaggtgctgctggtgctgttctaccccatcaacagctgcgccaaccccttcctgtacgccatcttcaccaagaccttccagagagacttcttcctgctgctgagcaagttcggctgctgcaagagaagagccgagctgtacagaagaaaggacttcagcgcctacaccagcaactgcaagaacggcttcaccggcagcaacaagcccagccagagcaccctgaagctgagcaccctgcactgccagggcaccgccctgctggacaagaccagatacaccgagtgctag

SEQ ID NO: 87369 - DNA, 978 bp, synthetic construct
  misc_feature 1..978: note = Description of Artificial Sequence: Synthetic coding sequence
  source 1..978: mol_type = other DNA
atgaagcagagattcagcgccctgcagctgctgaagctgctgctgctgctgcagccccccctgcccagagccctgagagaggccctgtgccccgagccctgcaactgcgtgcccgacggcgccctgagatgccccggccccaccgccggcctgaccagactgagcctggcctacctgcccgtgaaggtgatccccagccaggccttcagaggcctgaacgaggtgatcaagatcgagatcagccagatcgacagcctggagagaatcgaggccaacgccttcgacaacctgctgaacctgagcgagatcctgatccagaacaccaagaacctgagatacatcgagcccggcgccttcatcaacctgcccagactgaagtacctgagcatctgcaacaccggcatcagaaagttccccgacgtgaccaaggtgttcagcagcgagagcaacttcatcctggagatctgcgacaacctgcacatcaccaccatccccggcaacgccttccagggcatgaacaacgagagcgtgaccctgaagctgtacggcaacggcttcgaggaggtgcagagccacgccttcaacggcaccaccctgaccagcctggagctgaaggagaacgtgcacctggagaagatgcacaacggcgccttcagaggcgccaccggccccaagaccctggacatcagcagcaccaagctgcaggccctgcccagctacggcctggagagcatccagagactgatcgccaccagcagctacagcctgaagaagctgcccagcagagagaccttcgtgaacctgctggaggccaccctgacctaccccagccactgctgcgccttcagaaacctgcccaccaaggagcagaacttcagccacagcatcagcgagaacttcagcaagcagtgcgagagcaccgtgagaaaggtgaacaacaagaccctgagcaagcccagaatcaacggctaccagtag

SEQ ID NO: 87370 - DNA, 990 bp, synthetic construct
  misc_feature 1..990: note = Description of Artificial Sequence: Synthetic coding sequence
  source 1..990: mol_type = other DNA
atgaagcagagattcagcgccctgcagctgctgaagctgctgctgctgctgcagccccccctgcccagagccctgagagaggccctgtgccccgagccctgcaactgcgtgcccgacggcgccctgagatgccccggccccaccgccggcctgaccagactgagcctggcctacctgcccgtgaaggtgatccccagccaggccttcagaggcctgaacgaggtgatcaagatcgagatcagccagatcgacagcctggagagaatcgaggccaacgccttcgacaacctgctgaacctgagcgagatcctgatccagaacaccaagaacctgagatacatcgagcccggcgccttcatcaacctgcccagactgaagtacctgagcatctgcaacaccggcatcagaaagttccccgacgtgaccaaggtgttcagcagcgagagcaacttcatcctggagatctgcgacaacctgcacatcaccaccatccccggcaacgccttccagggcatgaacaacgagagcgtgaccctgaagctgtacggcaacggcttcgaggaggtgcagagccacgccttcaacggcaccaccctgaccagcctggagctgaaggagaacgtgcacctggagaagatgcacaacggcgccttcagaggcgccaccggccccaagaccctggacatcagcagcaccaagctgcaggccctgcccagctacggcctggagagcatccagagactgatcgccaccagcagctacagcctgaagaagctgcccagcagagagaccttcgtgaacctgctggaggccaccctgacctaccccagccactgctgcgccttcagaaacctgcccaccaaggagcagaacttcagccacagcatcagcgagaacttcagcaagcagtgcgagagcaccgtgagaaaggtgaacaacaagaccctgctgctgcacggcgccctgagcgccgcccacagcctgagctag

SEQ ID NO: 87371 - DNA, 2019 bp, synthetic construct
  misc_feature 1..2019: note = Description of Artificial Sequence: Synthetic coding sequence
  source 1..2019: mol_type = other DNA
atgaagcagagattcagcgccctgcagctgctgaagctgctgctgctgctgcagccccccctgcccagagccctgagagaggccctgtgccccgagccctgcaactgcgtgcccgacggcgccctgagatgccccggccccaccgccggcctgaccagactgagcctggcctacctgcccgtgaaggtgatccccagccaggccttcagaggcctgaacgaggtgatcaagatcgagatcagccagatcgacagcctggagagaatcgaggccaacgccttcgacaacctgctgaacctgagcgagatcctgatccagaacaccaagaacctgagatacatcgagcccggcgccttcatcaacctgcccagactgaagtacctgagcatctgcaacaccggcatcagaaagttccccgacgtgaccaaggtgttcagcagcgagagcaacttcatcctggagatctgcgacaacctgcacatcaccaccatccccggcaacgccttccagggcatgaacaacgagagcgtgaccctgaagctgtacggcaacggcttcgaggaggtgcagagccacgccttcaacggcaccaccctgaccagcctggagctgaaggagaacgtgcacctggagaagatgcacaacggcgccttcagaggcgccaccggccccaagaccctggacatcagcagcaccaagctgcaggccctgcccagctacggcctggagagcatccagagactgatcgccaccagcagctacagcctgaagaagctgcccagcagagagaccttcgtgaacctgctggaggccaccctgacctaccccagccactgctgcgccttcagaaacctgcccaccaaggactacagcagcatgctggccgagagcgagctgagcggctgggactacgagtacggcttctgcctgcccaagacccccagatgcgcccccgagcccgacgccttcaacccctgcgaggacatcatgggctacgacttcctgagagtgctgatctggctgatcaacatcctggccatcatgggcaacatgaccgtgctgttcgtgctgctgaccagcagatacaagctgaccgtgcccagattcctgatgtgcaacctgagcttcgccgacttctgcatgggcctgtacctgctgctgatcgccagcgtggacagccagaccaagggccagtactacaaccacgccatcgactggcagaccggcagcggctgcagcaccgccggcttcttcaccgtgttcgccagcgagctgagcgtgtacaccctgaccgtgatcaccctggagagatggcacaccatcacctacgccatccacctggaccagaagctgagactgagacacgccatcctgatcatgctgggcggctggctgttcagcagcctgatcgccatgctgcccctggtgggcgtgagcaactacatgaaggtgagcatctgcttccccatggacgtggagaccaccctgagccaggtgtacatcctgaccatcctgatcctgaacgtggtggccttcttcatcatctgcgcctgctacatcaagatctacttcgccgtgagaaaccccgagctgatggccaccaacaaggacaccaagatcgccaagaagatggccatcctgatcttcaccgacttcacctgcatggcccccatcagcttcttcgccatcagcgccgccttcaaggtgcccctgatcaccgtgaccaacagcaaggtgctgctggtgctgttctaccccatcaacagctgcgccaaccccttcctgtacgccatcttcaccaagaccttccagagagacttcttcctgctgctgagcaagttcggctgctgcaagagaagagccgagctgtacagaagaaaggacttcagcgcctacaccagcaactgcaagaacggcttcaccggcagcaacaagcccagccagagcaccctgaagctgagcaccctgcactgccagggcaccgccctgctggacaagaccagatacaccgagtgctag

SEQ ID NO: 87372 - DNA, 396 bp, synthetic construct
  misc_feature 1..396: note = Description of Artificial Sequence: Synthetic coding sequence
  source 1..396: mol_type = other DNA
atgacccccctgctgaccctgatcctggtggtgctgatgggcctgcccctggcccaggccctggactgccacgtgtgcgcctacaacggcgacaactgcttcaaccccatgagatgccccgccatggtggcctactgcatgaccaccagaaccagcgccgccgaggccatctggtgccaccagtgcaccggcttcggcggctgcagccacggcagcagatgcctgagagacagcacccactgcgtgaccaccgccaccagagtgctgagcaacaccgaggacctgcccctggtgaccaagatgtgccacatcggctgccccgacatccccagcctgggcctgggcccctacgtgagcatcgcctgctgccagaccagcctgtgcaaccacgactag

SEQ ID NO: 87373 - DNA, 351 bp, synthetic construct
  misc_feature 1..351: note = Description of Artificial Sequence: Synthetic coding sequence
  source 1..351: mol_type = other DNA
atgacccccctgctgaccctgatcctggtggtgctgatgggcctgcccctggcccaggccctggactgccacgtgtgcgcctacaacggcgacaactgcttcaaccccatgagatgccccgccatggtggcctactgcatgaccaccagaacctactacacccccaccagaatgaaggtgagcaagagctgcgtgcccagatgcttcgagaccgtgtacgacggctacagcaagcacgccagcaccaccagctgctgccagtacgacctgtgcaacggcaccggcctggccacccccgccaccctggccctggcccccatcctgctggccaccctgtggggcctgctgtag

SEQ ID NO: 87374 - DNA, 351 bp, synthetic construct; identical to SEQ ID NO: 87373
  misc_feature 1..351: note = Description of Artificial Sequence: Synthetic coding sequence
  source 1..351: mol_type = other DNA

SEQ ID NO: 87375 - DNA, 351 bp, synthetic construct; identical to SEQ ID NO: 87373
  misc_feature 1..351: note = Description of Artificial Sequence: Synthetic coding sequence
  source 1..351: mol_type = other DNA

SEQ ID NO: 87376 - DNA, 249 bp, synthetic construct
  misc_feature 1..249: note = Description of Artificial Sequence: Synthetic coding sequence
  source 1..249: mol_type = other DNA
atgacccccctgctgaccctgatcctggtggtgctgatgggcctgcccctggcccaggccctggactgccacgtgtgcgcctacaacggcgacaactgcttcaaccccatgagatgccccgccatggtggcctactgcatgaccaccagaacctactacacccccaccagaatgaaggtgagcaagagctgcgtgcccagatgcttcgagaccgtgtacgacggctacagcaagcacgccagcacctag

SEQ ID NO: 87377 - DNA, 255 bp, synthetic construct
  misc_feature 1..255: note = Description of Artificial Sequence: Synthetic coding sequence
  source 1..255: mol_type = other DNA
atgacccccctgctgaccctgatcctggtggtgctgatgggcctgcccctggcccaggccctggactgccacgtgtgcgcctacaacggcgacaactgcttcaaccccatgagatgccccgccatggtggcctactgcatgaccaccagaacctactacacccccaccagaatgaaggtgagcaagagctgcgtgcccagatgcttcgagaccgtgtacgacggctacagcaagcacgccagcaccaccagctag

SEQ ID NO: 87378 - DNA, 1041 bp, synthetic construct
  misc_feature 1..1041: note = Description of Artificial Sequence: Synthetic coding sequence
  source 1..1041: mol_type = other DNA
atggaccccgccagaaaggccggcgcccaggccatgatctggaccgccggctggctgctgctgctgctgctgagaggcggcgcccaggccctggagtgctacagctgcgtgcagaaggccgacgacggctgcagccccaacaagatgaagaccgtgaagtgcgcccccggcgtggacgtgtgcaccgaggccgtgggcgccgtggagaccatccacggccagttcagcctggccgtgagaggctgcggcagcggcctgcccggcaagaacgacagaggcctggacctgcacggcctgctggccttcatccagctgcagcagtgcgcccaggacagatgcaacgccaagctgaacctgaccagcagagccctggaccccgccggcaacgagagcgcctacccccccaacggcgtggagtgctacagctgcgtgggcctgagcagagaggcctgccagggcaccagcccccccgtggtgagctgctacaacgccagcgaccacgtgtacaagggctgcttcgacggcaacgtgaccctgaccgccgccaacgtgaccgtgagcctgcccgtgagaggctgcgtgcaggacgagttctgcaccagagacggcgtgaccggccccggcttcaccctgagcggcagctgctgccagggcagcagatgcaacagcgacctgagaaacaagacctacttcagccccagaatcccccccctggtgagactgcccccccccgagcccaccaccgtggccagcaccaccagcgtgaccaccagcaccagcgcccccgtgagacccaccagcaccaccaagcccatgcccgcccccaccagccagacccccagacagggcgtggagcacgaggccagcagagacgaggagcccagactgaccggcggcgccgccggccaccaggacagaagcaacagcggccagtaccccgccaagggcggcccccagcagccccacaacaagggctgcgtggcccccaccgccggcctggccgccctgctgctggccgtggccgccggcgtgctgctgtag

SEQ ID NO: 87379 - DNA, 885 bp, synthetic construct
  misc_feature 1..885: note = Description of Artificial Sequence: Synthetic coding sequence
  source 1..885: mol_type = other DNA
atggaccccgccagaaaggccggcgcccaggccatgatctggaccgccggctggctgctgctgctgctgctgagaggcggcgcccaggccctggagtgctacagctgcgtgcagaaggccgacgacggctgcagccccaacaagatgaagaccgtgaagtgcgcccccggcgtggacgtgtgcaccgaggccgtgggcgccgtggagaccatccacggccagttcagcctggccgtgagaggctgcggcagcggcctgcccggcaagaacgacagaggcctggacctgcacggcctgctggccttcatccagctgcagcagtgcgcccaggacagatgcaacgccaagctgaacctgaccagcagagccctggaccccgccgccgccgccaacgtgaccgtgagcctgcccgtgagaggctgcgtgcaggacgagttctgcaccagagacggcgtgaccggccccggcttcaccctgagcggcagctgctgccagggcagcagatgcaacagcgacctgagaaacaagacctacttcagccccagaatcccccccctggtgagactgcccccccccgagcccaccaccgtggccagcaccaccagcgtgaccaccagcaccagcgcccccgtgagacccaccagcaccaccaagcccatgcccgcccccaccagccagacccccagacagggcgtggagcacgaggccagcagagacgaggagcccagactgaccggcggcgccgccggccaccaggacagaagcaacagcggccagtaccccgccaagggcggcccccagcagccccacaacaagggctgcgtggcccccaccgccggcctggccgccctgctgctggccgtggccgccggcgtgctgctgtag

SEQ ID NO: 87380 - DNA, 516 bp, synthetic construct
  misc_feature 1..516: note = Description of Artificial Sequence: Synthetic coding sequence
  source 1..516: mol_type = other DNA
atggagcccggccccgccctggcctggctgctgctgctgagcctgctggccgactgcctgaaggccgcccagagcagagacttcaccgtgaaggacatcatctacctgcaccccagcaccaccccctaccccggcggcttcaagtgcttcacctgcgagaaggccgccgacaactacgagtgcaacagatgggcccccgacatctactgccccagagagaccagatactgctacacccagcacaccatggaggtgaccggcaacagcatcagcgtgaccaagagatgcgtgcccctggaggagtgcctgagcaccggctgcagagacagcgagcacgagggccacaaggtgtgcaccagctgctgcgagggcaacatctgcaacctgcccctgcccagaaacgagaccgacgccaccttcgccaccaccagccccatcaaccagaccaacggccaccccagatgcatgagcgtgatcgtgagctgcctgtggctgtggctgggcctgatgctgtag

SEQ ID NO: 87381 - DNA, 516 bp, synthetic construct; identical to SEQ ID NO: 87380
  misc_feature 1..516: note = Description of Artificial Sequence: Synthetic coding sequence
  source 1..516: mol_type = other DNA

SEQ ID NO: 87382 - DNA, 162 bp, synthetic construct
  misc_feature 1..162: note = Description of Artificial Sequence: Synthetic coding sequence
  source 1..162: mol_type = other DNA
atggagcccggccccgccctggcctggctgctgctgctgagcctgctggccgactgcctgaaggccgcccagagcagagacttcaccgtgaaggacatcatctacctgcaccccagcaccaccccctaccccggcggcttcaagtgcttcacctgcgagtag

SEQ ID NO: 87383 - DNA, 969 bp, synthetic construct
  misc_feature 1..969: note = Description of Artificial Sequence: Synthetic coding sequence
  source 1..969: mol_type = other DNA
atggccagatgcttcagcctggtgctgctgctgaccagcatctggaccaccagactgctggtgcagggcagcctgagagccgaggagctgagcatccaggtgagctgcagaatcatgggcatcaccctggtgagcaagaaggccaaccagcagctgaacttcaccgaggccaaggaggcctgcagactgctgggcctgagcctggccggcaaggaccaggtggagaccgccctgaaggccagcttcgagacctgcagctacggctgggtgggcgacggcttcgtggtgatcagcagaatcagccccaaccccaagtgcggcaagaacggcgtgggcgtgctgatctggaaggtgcccgtgagcagacagttcgccgcctactgctacaacagcagcgacacctggaccaacagctgcatccccgagatcatcaccaccaaggaccccatcttcaacacccagaccgccacccagaccaccgagttcatcgtgagcgacagcacctacagcgtggccagcccctacagcaccatccccgcccccaccaccaccccccccgcccccgccagcaccagcatccccagaagaaagaagctgatctgcgtgaccgaggtgttcatggagaccagcaccatgagcaccgagaccgagcccttcgtggagaacaaggccgccttcaagaacgaggccgccggcttcggcggcgtgcccaccgccctgctggtgctggccctgctgttcttcggcgccgccgccggcctgggcttctgctacgtgaagagatacgtgaaggccttccccttcaccaacaagaaccagcagaaggagatgatcgagaccaaggtggtgaaggaggagaaggccaacgacagcaaccccaacgaggagagcaagaagaccgacaagaaccccgaggagagcaagagccccagcaagaccaccgtgagatgcctggaggccgaggtgtag

SEQ ID NO: 87384 - DNA, 387 bp, synthetic construct
  misc_feature 1..387: note = Description of Artificial Sequence: Synthetic coding sequence
  source 1..387: mol_type = other DNA
atgagaaccgccctgctgctgctggccgccctggccgtggccaccggccccgccctgaccctgagatgccacgtgtgcaccagcagcagcaactgcaagcacagcgtggtgtgccccgccagcagcagattctgcaagaccaccaacaccgtggagcccctgagaggcaacctggtgaagaaggactgcgccgagagctgcacccccagctacaccctgcagggccaggtgagcagcggcaccagcagcacccagtgctgccaggaggacctgtgcaacgagaagctgcacaacgccgcccccaccagaaccgccctggcccacagcgccctgagcctgggcctggccctgagcctgctggccgtgatcctggcccccagcctgtag

SEQ ID NO: 87385 - DNA, 396 bp, synthetic construct
  misc_feature 1..396: note = Description of Artificial Sequence: Synthetic coding sequence
  source 1..396: mol_type = other DNA
atgaagatcttcctgcccgtgctgctggccgccctgctgggcgtggagagagccagcagcctgatgtgcttcagctgcctgaaccagaagagcaacctgtactgcctgaagcccaccatctgcagcgaccaggacaactactgcgtgaccgtgagcgccagcgccggcatcggcaacctggtgaccttcggccacagcctgagcaagacctgcagccccgcctgccccatccccgagggcgtgaacgtgggcgtggccagcatgggcatcagctgctgccagagcttcctgtgcaacttcagcgccgccgacggcggcctgagagccagcgtgaccctgctgggcgccggcctgctgctgagcctgctgcccgccctgctgagattcggcccctag

SEQ ID NO: 87386 - DNA, 396 bp, synthetic construct; identical to SEQ ID NO: 87385
  misc_feature 1..396: note = Description of Artificial Sequence: Synthetic coding sequence
  source 1..396: mol_type = other DNA

SEQ ID NO: 87387 - DNA, 267 bp, synthetic construct
  misc_feature 1..267: note = Description of Artificial Sequence: Synthetic coding sequence
  source 1..267: mol_type = other DNA
atgaagatcttcctgcccgtgctgctggccgccctgctgggcgtggagagagccagcagcctgatgtgcttcagctgcctgaaccagaagagcaacctgtactgcctgaagcccaccatctgcagcgaccaggacaactactgcgtgaccgtgagcgccagcgccggcatcggcaacctggtgaccttcggccacagcctgagcaagacctgcagccccgcctgccccatccccgagggcgtgaacgtgggcgtggccagcatgtag

SEQ ID NO: 87388 - DNA, 396 bp, synthetic construct; identical to SEQ ID NO: 87385
  misc_feature 1..396: note = Description of Artificial Sequence: Synthetic coding sequence
  source 1..396: mol_type = other DNA

SEQ ID NO: 87389 - DNA, 396 bp, synthetic construct; identical to SEQ ID NO: 87385
  misc_feature 1..396: note = Description of Artificial Sequence: Synthetic coding sequence
  source 1..396: mol_type = other DNA

SEQ ID NO: 87390 - DNA, 396 bp, synthetic construct; identical to SEQ ID NO: 87385
  misc_feature 1..396: note = Description of Artificial Sequence: Synthetic coding sequence
  source 1..396: mol_type = other DNA

SEQ ID NO: 87391 - DNA, 396 bp, synthetic construct; identical to SEQ ID NO: 87385
  misc_feature 1..396: note = Description of Artificial Sequence: Synthetic coding sequence
  source 1..396: mol_type = other DNA

SEQ ID NO: 87392 - DNA, 396 bp, synthetic construct; identical to SEQ ID NO: 87385
  misc_feature 1..396: note = Description of Artificial Sequence: Synthetic coding sequence
  source 1..396: mol_type = other DNA

SEQ ID NO: 87393 - DNA, 402 bp, synthetic construct
  misc_feature 1..402: note = Description of Artificial Sequence: Synthetic coding sequence
  source 1..402: mol_type = other DNA
atgaagccccagttcgtgggcatcctgctgagcagcctgctgggcgccgccctgggcaacagaatgagatgctacaactgcggcggcagccccagcagcagctgcaaggaggccgtgaccacctgcggcgagggcagaccccagcccggcctggagcagatcaagctgcccggcaacccccccgtgaccctgatccaccagcaccccgcctgcgtggccgcccaccactgcaaccaggtggagaccgagagcgtgggcgacgtgacctaccccgcccacagagactgctacctgggcgacctgtgcaacagcgccgtggccagccacgtggcccccgccggcatcctggccgccgccgccaccgccctgacctgcctgctgcccggcctgtggagcggctag

SEQ ID NO: 87394 - DNA, 525 bp, synthetic construct
  misc_feature 1..525: note = Description of Artificial Sequence: Synthetic coding sequence
  source 1..525: mol_type = other DNA
atgaagccccagttcgtgggcatcctgctgagcagcctgctgggcgccgccctgggcaacagaatgagatgctacaactgcggcggcagccccagcagcagctgcaaggaggccgtgaccacctgcggcgagggcagaccccagcccggcctggagcagatcaagctgcccggcaacagaagatgcttcctgagaggcctgaagatccccctgggcagcctgaagagccacctgctgtgccccagaagacaggtgctgaagcccggcgtgcagcaccccagcttcatcctgagcctgagccccagcgacctggacagccccaccagcagcctgagaagaagccccagcctgcagagcagcggcgacagagtgggcggcagaagagacctgagcagcccccagggcctgctgcccggcagacccgtgcagcagagaagaggcaagccctgcggcccctgcagacacttcggctgcagcagctacagacccgacctgagcctggccagaaccgtggagagaatctag

SEQ ID NO: 87395 - DNA, 402 bp, synthetic construct; identical to SEQ ID NO: 87393
  misc_feature 1..402: note = Description of Artificial Sequence: Synthetic coding sequence
  source 1..402: mol_type = other DNA

SEQ ID NO: 87396 - DNA, 1149 bp, synthetic construct
  misc_feature 1..1149: note = Description of Artificial Sequence: Synthetic coding sequence
  source 1..1149: mol_type = other DNA
atggccgtgctgttcctgctgctgttcctgtgcggcaccccccaggccgccgacaacatgcaggccatctacgtggccctgggcgaggccgtggagctgccctgccccagcccccccaccctgcacggcgacgagcacctgagctggttctgcagccccgccgccggcagcttcaccaccctggtggcccaggtgcaggtgggcagacccgcccccgaccccggcaagcccggcagagagagcagactgagactgctgggcaactacagcctgtggctggagggcagcaaggaggaggacgccggcagatactggtgcaccgtgctgggccagcaccacaactaccagaactggagagtgtacgacgtgctggtgctgaagggcagccagctgagcgccagagccgccgacggcagcccctgcaacgtgctgctgtgcagcgtggtgcccagcagaagaatggacagcgtgacctggcaggagggcaagggccccgtgagaggcagagtgcagagcttctggggcagcgaggccgccctgctgctggtgtgccccggcgagggcctgagcgagcccagaagcagaagacccagaatcatcagatgcctgatgacccacaacaagggcgtgagcttcagcctggccgccagcatcgacgccagccccgccctgtgcgcccccagcaccggctgggacatgccctggatcctgatgctgctgctgaccatgggccagggcgtggtgatcctggccctgagcatcgtgctgtggagacagagagtgagaggcgcccccggcagaggcaacagaatgagatgctacaactgcggcggcagccccagcagcagctgcaaggaggccgtgaccacctgcggcgagggcagaccccagcccggcctggagcagatcaagctgcccggcaacccccccgtgaccctgatccaccagcaccccgcctgcgtggccgcccaccactgcaaccaggtggagaccgagagcgtgggcgacgtgacctaccccgcccacagagactgctacctgggcgacctgtgcaacagcgccgtggccagccacgtggcccccgccggcatcctggccgccgccgccaccgccctgacctgcctgctgcccggcctgtggagcggctag

SEQ ID NO: 87397 - DNA, 402 bp, synthetic construct; identical to SEQ ID NO: 87393
  misc_feature 1..402: note = Description of Artificial Sequence: Synthetic coding sequence
  source 1..402: mol_type = other DNA

SEQ ID NO: 87398 - DNA, 402 bp, synthetic construct; identical to SEQ ID NO: 87393
  misc_feature 1..402: note = Description of Artificial Sequence: Synthetic coding sequence
  source 1..402: mol_type = other DNA

SEQ ID NO: 87399 - DNA, 1149 bp, synthetic construct
  misc_feature 1..1149: note = Description of Artificial Sequence: Synthetic coding sequence
  source 1..1149: mol_type = other DNA
atggccgtgctgttcctgctgctgttcctgtgcggcaccccccaggccgccgacaacatgcaggccatctacgtggccctgggcgaggccgtggagctgccctgccccagcccccccaccctgcacggcgacgagcacctgagctggttctgcagccccgccgccggcagcttcaccaccctggtggcccaggtgcaggtgggcagacccgcccccgaccccggcaagcccggcagagagagcagactgagactgctgggcaactacagcctgtggctggagggcagcaaggaggaggacgccggcagatactggtgcgccgtgctgggccagcaccacaactaccagaactggagagtgtacgacgtgctggtgctgaagggcagccagctgagcgccagagccgccgacggcagcccctgcaacgtgctgctgtgcagcgtggtgcccagcagaagaatggacagcgtgacctggcaggagggcaagggccccgtgagaggcagagtgcagagcttctggggcagcgaggccgccctgctgctggtgtgccccggcgagggcctgagcgagcccagaagcagaagacccagaatcatcagatgcctgatgacccacaacaagggcgtgagcttcagcctggccgccagcatcgacgccagccccgccctgtgcgcccccagcaccggctgggacatgccctggatcctgatgctgctgctgaccatgggccagggcgtggtgatcctggccctgagcatcgtgctgtggagacagagagtgagaggcgcccccggcagaggcaacagaatgagatgctacaactgcggcggcagccccagcagcagctgcaaggaggccgtgaccacctgcggcgagggcagaccccagcccggcctggagcagatcaagctgcccggcaacccccccgtgaccctgatccaccagcaccccgcctgcgtggccgcccaccactgcaaccaggtggagaccgagagcgtgggcgacgtgacctaccccgcccacagagactgctacctgggcgacctgtgcaacagcgccgtggccagccacgtggcccccgccggcatcctggccgccgccgccaccgccctgacctgcctgctgcccggcctgtggagcggctag

SEQ ID NO: 87400 - DNA, 402 bp, synthetic construct
  misc_feature 1..402: note = Description of Artificial Sequence: Synthetic coding sequence
  source 1..402: mol_type = other DNA
atgaagccccagttcgtgggcatcctgctgagcagcctgctgggcgccgccctgggcaacagaatgagatgctacaactgcggcggcagccccagcagcacctgcaaggaggccgtgaccacctgcggcgagggcagaccccagcccggcctggagcagatcaagctgcccggcaacccccccgtgaccctgatccaccagcaccccgcctgcgtggccgcccaccactgcaaccaggtggagaccgagagcgtgggcgacgtgacctaccccgcccacagagactgctacctgggcgacctgtgcaacagcgccgtggccagccacgtggcccccgccggcatcctggccgccgccgccaccgccctgacctgcctgctgcccggcctgtggagcggctag

SEQ ID NO: 87401 - DNA, 402 bp, synthetic construct; identical to SEQ ID NO: 87393
  misc_feature 1..402: note = Description of Artificial Sequence: Synthetic coding sequence
  source 1..402: mol_type = other DNA

SEQ ID NO: 87402 - DNA, 402 bp, synthetic construct; identical to SEQ ID NO: 87393
  misc_feature 1..402: note = Description of Artificial Sequence: Synthetic coding sequence
  source 1..402: mol_type = other DNA

SEQ ID NO: 87403 - DNA, 525 bp, synthetic construct; identical to SEQ ID NO: 87394
  misc_feature 1..525: note = Description of Artificial Sequence: Synthetic coding sequence
  source 1..525: mol_type = other DNA

SEQ ID NO: 87404 - DNA, 486 bp, synthetic construct
  misc_feature 1..486: note = Description of Artificial Sequence: Synthetic coding sequence
  source 1..486: mol_type = other DNA
atgctggccccccagagaaccagagcccccagccccagagccgcccccagacccaccagaagcatgctgcccgccgccatgaagggcctgggcctggccctgctggccgtgctgctgtgcagcgcccccgcccacggcctgtggtgccaggactgcaccctgaccaccaacagcagccactgcacccccaagcagtgccagcccagcgacaccgtgtgcgccagcgtgagaatcaccgaccccagcagcagcagaaaggaccacagcgtgaacaagatgtgcgccagcagctgcgacttcgtgaagagacacttcttcagcgactacctgatgggcttcatcaacagcggcatcctgaaggtggacgtggactgctgcgagaaggacctgtgcaacggcgccgccggcgccggccacagcccctgggccctggccggcggcctgctgctgagcctgggccccgccctgctgtgggccggcccctag

SEQ ID NO: 87405 - DNA, 486 bp, synthetic construct; identical to SEQ ID NO: 87404
  misc_feature 1..486: note = Description of Artificial Sequence: Synthetic coding sequence
  source 1..486: mol_type = other DNA

SEQ ID NO: 87406 - DNA, 423 bp, synthetic construct
  misc_feature 1..423: note = Description of Artificial Sequence: Synthetic coding sequence
  source 1..423: mol_type = other DNA
atgctgcccgccgccatgaagggcctgggcctggccctgctggccgtgctgctgtgcagcgcccccgcccacggcctgtggtgccaggactgcaccctgaccaccaacagcagccactgcacccccaagcagtgccagcccagcgacaccgtgtgcgccagcgtgagaatcaccgaccccagcagcagcagaaaggaccacagcgtgaacaagatgtgcgccagcagctgcgacttcgtgaagagacacttcttcagcgactacctgatgggcttcatcaacagcggcatcctgaaggtggacgtggactgctgcgagaaggacctgtgcaacggcgccgccggcgccggccacagcccctgggccctggccggcggcctgctgctgagcctgggccccgccctgctgtgggccggcccctag

SEQ ID NO: 87407 - DNA, 1971 bp, synthetic construct
  misc_feature 1..1971: note = Description of Artificial Sequence: Synthetic coding sequence
  source 1..1971: mol_type = other DNA
atggtggcccccaagagccacaccgacgactgggcccccggccccttcagcagcaagccccagagaagccagctgcagatcttcagcagcgtgctgcagaccagcctgctgttcctgctgatgggcctgagagccagcggcaaggacagcgcccccaccgtggtgagcggcatcctgggcggcagcgtgaccctgcccctgaacatcagcgtggacaccgagatcgagaacgtgatctggatcggccccaagaacgccctggccttcgccagacccaaggagaacgtgaccatcatggtgaagagctacctgggcagactggacatcaccaagtggagctacagcctgtgcatcagcaacctgaccctgaacgacgccggcagctacaaggcccagatcaaccagagaaacttcgaggtgaccaccgaggaggagttcaccctgttcgtgtacgagcagctgcaggagccccaggtgaccatgaagagcgtgaaggtgagcgagaacttcagctgcaacatcaccctgatgtgcagcgtgaagggcgccgagaagagcgtgctgtacagctggacccccagagagccccacgccagcgagagcaacggcggcagcatcctgaccgtgagcagaaccccctgcgaccccgacctgccctacatctgcaccgcccagaaccccgtgagccagagaagcagcctgcccgtgcacgtgggccagttctgcaccgaccccggcgccagcagaggcggcaccaccggcgagaccgtggtgggcgtgctgggcgagcccgtgaccctgcccctggccctgcccgcctgcagagacaccgagaaggtggtgtggctgttcaacaccagcatcatcagcaaggagagagaggaggccgccaccgccgaccccctgatcaagagcagagacccctacaagaacagagtgtgggtgagcagccaggactgcagcctgaagatcagccagctgaagatcgaggacgccggcccctaccacgcctacgtgtgcagcgaggccagcagcgtgaccagcatgacccacgtgaccctgctgatctacagaagactgagaaagcccaagatcacctggagcctgagacacagcgaggacggcatctgcagaatcagcctgacctgcagcgtggaggacggcggcaacaccgtgatgtacacctggacccccctgcagaaggaggccgtggtgagccagggcgagagccacctgaacgtgagctggagaagcagcgagaaccaccccaacctgacctgcaccgccagcaaccccgtgagcagaagcagccaccagttcctgagcgagaacatctgcagcggccccgagagaaacaccaagctgtggatcggcctgttcctgatggtgtgcctgctgtgcgtgggcatcttcagctggtgcatctggaagagaaagggcagatgcagcgtgcccgccttctgcagcagccaggccgaggcccccgccgacacccccgagcccaccgccggccacaccctgtacagcgtgctgagccagggctacgagaagctggacacccccctgagacccgccagacagcagcccacccccaccagcgacagcagcagcgacagcaacctgaccaccgaggaggacgaggacagacccgaggtgcacaagcccatcagcggcagatacgaggtgttcgaccaggtgacccaggagggcgccggccacgaccccgcccccgagggccaggccgactacgaccccgtgaccccctacgtgaccgaggtggagagcgtggtgggcgagaacaccatgtacgcccaggtgttcaacctgcagggcaagacccccgtgagccagaaggaggagagcagcgccaccatctactgcagcatcagaaagccccaggtggtggtgccccccccccagcagaacgacctggagatccccgagagccccacctacgagaacttcacctag

SEQ ID NO: 87408 - DNA, 1566 bp, synthetic construct
  misc_feature 1..1566: note = Description of Artificial Sequence: Synthetic coding sequence
  source 1..1566: mol_type = other DNA
atggtggcccccaagagccacaccgacgactgggcccccggccccttcagcagcaagccccagagaagccagctgcagatcttcagcagcgtgctgcagaccagcctgctgttcctgctgatgggcctgagagccagcggcaaggacagcgcccccaccgtggtgagcggcatcctgggcggcagcgtgaccctgcccctgaacatcagcgtggacaccgagatcgagaacgtgatctggatcggccccaagaacgccctggccttcgccagacccaaggagaacgtgaccatcatggtgaagagctacctgggcagactggacatcaccaagtggagctacagcctgtgcatcagcaacctgaccctgaacgacgccggcagctacaaggcccagatcaaccagagaaacttcgaggtgaccaccgaggaggagttcaccctgttcgtgtacgagcagctgcaggagccccaggtgaccatgaagagcgtgaaggtgagcgagaacttcagctgcaacatcaccctgatgtgcagcgtgaagggcgccgagaagagcgtgctgtacagctggacccccagagagccccacgccagcgagagcaacggcggcagcatcctgaccgtgagcagaaccccctgcgaccccgacctgccctacatctgcaccgcccagaaccccgtgagccagagaagcagcctgcccgtgcacgtgggccagttctgcaccgaccccggcgccagcagaggcggcaccaccggcgagaccgtggtgggcgtgctgggcgagcccgtgaccctgcccctggccctgcccgcctgcagagacaccgagaaggtggtgtggctgttcaacaccagcatcatcagcaaggagagagaggaggccgccaccgccgaccccctgatcaagagcagagacccctacaagaacagagtgtgggtgagcagccaggactgcagcctgaagatcagccagctgaagatcgaggacgccggcccctaccacgcctacgtgtgcagcgaggccagcagcgtgaccagcatgacccacgtgaccctgctgatctacagacccgagagaaacaccaagctgtggatcggcctgttcctgatggtgtgcctgctgtgcgtgggcatcttcagctggtgcatctggaagagaaagggcagatgcagcgtgcccgccttctgcagcagccaggccgaggcccccgccgacacccccggctacgagaagctggacacccccctgagaaagcccatcagcggcagatacgaggtgttcgaccaggtgacccaggagggcgccggccacgaccccgcccccgagggccaggccgactacgaccccgtgaccccctacgtgaccgaggtggagagcgtggtgggcgagaacaccatgtacgcccaggtgttcaacctgcagggcaagacccccgtgagccagaaggaggagagcagcgccaccatctactgcagcatcagaaagccccaggtggtgccccccccccagcagaacgacctggagatccccgagagccccacctacgagaacttcacctag

SEQ ID NO: 87409 - DNA, 813 bp, synthetic construct
  misc_feature 1..813: note = Description of Artificial Sequence: Synthetic coding sequence
  source 1..813: mol_type = other DNA
atgacccacgtgaccctgctgatctacagaagactgagaaagcccaagatcacctggagcctgagacacagcgaggacggcatctgcagaatcagcctgacctgcagcgtggaggacggcggcaacaccgtgatgtacacctggacccccctgcagaaggaggccgtggtgagccagggcgagagccacctgaacgtgagctggagaagcagcgagaaccaccccaacctgacctgcaccgccagcaaccccgtgagcagaagcagccaccagttcctgagcgagaacatctgcagcggccccgagagaaacaccaagctgtggatcggcctgttcctgatggtgtgcctgctgtgcgtgggcatcttcagctggtgcatctggaagagaaagggcagatgcagcgtgcccgccttctgcagcagccaggccgaggcccccgccgacacccccggctacgagaagctggacacccccctgagacccgccagacagcagcccacccccaccagcgacagcagcagcgacagcaacctgaccaccgaggaggacgaggacagacccgaggtgcacaagcccatcagcggcagatacgaggtgttcgaccaggtgacccaggagggcgccggccacgaccccgcccccgagggccaggccgactacgaccccgtgaccccctacgtgaccgaggtggagagcgtggtgggcgagaacaccatgtacgcccaggtgttcaacctgcaggtggtgccccccccccagcagaacgacctggagatccccgagagccccacctacgagaacttcacctag

SEQ ID NO: 87410 - DNA, 813 bp, synthetic construct; identical to SEQ ID NO: 87409
  misc_feature 1..813: note = Description of Artificial Sequence: Synthetic coding sequence
  source 1..813: mol_type = other DNA

SEQ ID NO: 87411 - DNA, 1968 bp, synthetic construct
  misc_feature 1..1968: note = Description of Artificial Sequence: Synthetic coding sequence
  source 1..1968: mol_type = other DNA
atggtggcccccaagagccacaccgacgactgggcccccggccccttcagcagcaagccccagagaagccagctgcagatcttcagcagcgtgctgcagaccagcctgctgttcctgctgatgggcctgagagccagcggcaaggacagcgcccccaccgtggtgagcggcatcctgggcggcagcgtgaccctgcccctgaacatcagcgtggacaccgagatcgagaacgtgatctggatcggccccaagaacgccctggccttcgccagacccaaggagaacgtgaccatcatggtgaagagctacctgggcagactggacatcaccaagtggagctacagcctgtgcatcagcaacctgaccctgaacgacgccggcagctacaaggcccagatcaaccagagaaacttcgaggtgaccaccgaggaggagttcaccctgttcgtgtacgagcagctgcaggagccccaggtgaccatgaagagcgtgaaggtgagcgagaacttcagctgcaacatcaccctgatgtgcagcgtgaagggcgccgagaagagcgtgctgtacagctggacccccagagagccccacgccagcgagagcaacggcggcagcatcctgaccgtgagcagaaccccctgcgaccccgacctgccctacatctgcaccgcccagaaccccgtgagccagagaagcagcctgcccgtgcacgtgggccagttctgcaccgaccccggcgccagcagaggcggcaccaccggcgagaccgtggtgggcgtgctgggcgagcccgtgaccctgcccctggccctgcccgcctgcagagacaccgagaaggtggtgtggctgttcaacaccagcatcatcagcaaggagagagaggaggccgccaccgccgaccccctgatcaagagcagagacccctacaagaacagagtgtgggtgagcagccaggactgcagcctgaagatcagccagctgaagatcgaggacgccggcccctaccacgcctacgtgtgcagcgaggccagcagcgtgaccagcatgacccacgtgaccctgctgatctacagaagactgagaaagcccaagatcacctggagcctgagacacagcgaggacggcatctgcagaatcagcctgacctgcagcgtggaggacggcggcaacaccgtgatgtacacctggacccccctgcagaaggaggccgtggtgagccagggcgagagccacctgaacgtgagctggagaagcagcgagaaccaccccaacctgacctgcaccgccagcaaccccgtgagcagaagcagccaccagttcctgagcgagaacatctgcagcggccccgagagaaacaccaagctgtggatcggcctgttcctgatggtgtgcctgctgtgcgtgggcatcttcagctggtgcatctggaagagaaagggcagatgcagcgtgcccgccttctgcagcagccaggccgaggcccccgccgacacccccgagcccaccgccggccacaccctgtacagcgtgctgagccagggctacgagaagctggacacccccctgagacccgccagacagcagcccacccccaccagcgacagcagcagcgacagcaacctgaccaccgaggaggacgaggacagacccgaggtgcacaagcccatcagcggcagatacgaggtgttcgaccaggtgacccaggagggcgccggccacgaccccgcccccgagggccaggccgactacgaccccgtgaccccctacgtgaccgaggtggagagcgtggtgggcgagaacaccatgtacgcccaggtgttcaacctgcagggcaagacccccgtgagccagaaggaggagagcagcgccaccatctactgcagcatcagaaagccccaggtggtgccccccccccagcagaacgacctggagatccccgagagccccacctacgagaacttcacctag

SEQ ID NO: 87412 - DNA, 1116 bp, synthetic construct
  misc_feature 1..1116: note = Description of Artificial Sequence: Synthetic coding sequence
  source 1..1116: mol_type = other DNA
atggtggcccccaagagccacaccgacgactgggcccccggccccttcagcagcaagccccagagaagccagctgcagatcttcagcagcgtgctgcagaccagcctgctgttcctgctgatgggcctgagagccagcggcaaggacagcgcccccaccgtggtgagcggcatcctgggcggcagcgtgaccctgcccctgaacatcagcgtggacaccgagatcgagaacgtgatctggatcggccccaagaacgccctggccttcgccagacccaaggagaacgtgaccatcatggtgaagagctacctgggcagactggacatcaccaagtggagctacagcctgtgcatcagcaacctgaccctgaacgacgccggcagctacaaggcccagatcaaccagagaaacttcgaggtgaccaccgaggaggagttcaccctgttcgtgtacgagcagctgcaggagccccaggtgaccatgaagagcgtgaaggtgagcgagaacttcagctgcaacatcaccctgatgtgcagcgtgaagggcgccgagaagagcgtgctgtacagctggacccccagagagccccacgccagcgagagcaacggcggcagcatcctgaccgtgagcagaaccccctgcgaccccgacctgccctacatctgcaccgcccagaaccccgtgagccagagaagcagcctgcccgtgcacgtgggccagttctgcaccgaccccggcgccagcagaggcggcaccaccggcgagaccgtggtgggcgtgctgggcgagcccgtgaccctgcccctggccctgcccgcctgcagagacaccgagaaggtggtgtggctgttcaacaccagcatcatcagcaaggagagagaggaggccgccaccgccgaccccctgatcaagagcagagacccctacaagaacagagtgtgggtgagcagccaggactgcagcctgaagatcagccagctgaagatcgaggacgccggcccctaccacgcctacgtgtgcagcgaggccagcagcgtgaccagcatgacccacgtgaccctgctgatctacagagagagcctgggcagagcccccatcaccagattcctgctgtag

SEQ ID NO: 87413 - DNA, 1809 bp, synthetic construct
  misc_feature 1..1809: note = Description of Artificial Sequence: Synthetic coding sequence
  source 1..1809: mol_type = other DNA
atgggcctgagagccagcggcaaggacagcgcccccaccgtggtgagcggcatcctgggcggcagcgtgaccctgcccctgaacatcagcgtggacaccgagatcgagaacgtgatctggatcggccccaagaacgccctggccttcgccagacccaaggagaacgtgaccatcatggtgaagagctacctgggcagactggacatcaccaagtggagctacagcctgtgcatcagcaacctgaccctgaacgacgccggcagctacaaggcccagatcaaccagagaaacttcgaggtgaccaccgaggaggagttcaccctgttcgtgtacgagcagctgcaggagccccaggtgaccatgaagagcgtgaaggtgagcgagaacttcagctgcaacatcaccctgatgtgcagcgtgaagggcgccgagaagagcgtgctgtacagctggacccccagagagccccacgccagcgagagcaacggcggcagcatcctgaccgtgagcagaaccccctgcgaccccgacctgccctacatctgcaccgcccagaaccccgtgagccagagaagcagcctgcccgtgcacgtgggccagttctgcaccgaccccggcgccagcagaggcggcaccaccggcgagaccgtggtgggcgtgctgggcgagcccgtgaccctgcccctggccctgcccgcctgcagagacaccgagaaggtggtgtggctgttcaacaccagcatcatcagcaaggagagagaggaggccgccaccgccgaccccctgatcaagagcagagacccctacaagaacagagtgtgggtgagcagccaggactgcagcctgaagatcagccagctgaagatcgaggacgccggcccctaccacgcctacgtgtgcagcgaggccagcagcgtgaccagcatgacccacgtgaccctgctgatctacagaagactgagaaagcccaagatcacctggagcctgagacacagcgaggacggcatctgcagaatcagcctgacctgcagcgtggaggacggcggcaacaccgtgatgtacacctggacccccctgcagaaggaggccgtggtgagccagggcgagagccacctgaacgtgagctggagaagcagcgagaaccaccccaacctgacctgcaccgccagcaaccccgtgagcagaagcagccaccagttcctgagcgagaacatctgcagcggccccgagagaaacaccaagctgtggatcggcctgttcctgatggtgtgcctgctgtgcgtgggcatcttcagctggtgcatctggaagagaaagggcagatgcagcgtgcccgccttctgcagcagccaggccgaggcccccgccgacacccccggctacgagaagctggacacccccctgagacccgccagacagcagcccacccccaccagcgacagcagcagcgacagcaacctgaccaccgaggaggacgaggacagacccgaggtgcacaagcccatcagcggcagatacgaggtgttcgaccaggtgacccaggagggcgccggccacgaccccgcccccgagggccaggccgactacgaccccgtgaccccctacgtgaccgaggtggagagcgtggtgggcgagaacaccatgtacgcccaggtgttcaacctgcagggcaagacccccgtgagccagaaggaggagagcagcgccaccatctactgcagcatcagaaagccccaggtggtggtgccccccccccagcagaacgacctggagatccccgagagccccacctacgagaacttcacctag

SEQ ID NO: 87414 - DNA, 582 bp, synthetic construct
  misc_feature 1..582: note = Description of Artificial Sequence: Synthetic coding sequence
  source 1..582: mol_type = other DNA
atggtggcccccaagagccacaccgacgactgggcccccggccccttcagcagcaagccccagagaagccagctgcagatcttcagcagcgtgctgcagaccagcctgctgttcctgctgatgggcctgagagccagcggcaaggacagcgcccccaccgtggtgagcggcatcctgggcggcagcgtgaccctgcccctgaacatcagcgtggacaccgagatcgagaacgtgatctggatcggccccaagaacgccctggccttcgccagacccaaggagaacgtgaccatcatggtgaagagctacctgggcagactggacatcaccaagtggagctacagcctgtgcatcagcaacctgaccctgaacgacgccggcagctacaaggcccagatcaaccagagaaacttcgaggtgaccaccgaggaggagttcaccctgttcgtgtacgcccccttcatcgagaagctgagcgtgcacgtgatcgagggcgaccacagaaccctgctggagggcagcggcctggagagcatcatcagcaccctggccgagcccagagtgagcgtgagagagggctag

SEQ ID NO: 87415 - DNA, 1581 bp, synthetic construct
  misc_feature 1..1581: note = Description of Artificial Sequence: Synthetic coding sequence
  source 1..1581: mol_type = other DNA
atgggcctgagagccagcggcaaggacagcgcccccaccgtggtgagcggcatcctgggcggcagcgtgaccctgcccctgaacatcagcgtggacaccgagatcgagaacgtgatctggatcggccccaagaacgccctggccttcgccagacccaaggagaacgtgaccatcatggtgaagagctacctgggcagactggacatcaccaagtggagctacagcctgtgcatcagcaacctgaccctgaacgacgccggcagctacaaggcccagatcaaccagagaaacttcgaggtgaccaccgaggaggagttcaccctgttcgtgtacgagcagctgcaggagccccaggtgaccatgaagagcgtgaaggtgagcgagaacttcagctgcaacatcaccctgatgtgcagcgtgaagggcgccgagaagagcgtgctgtacagctggacccccagagagccccacgccagcgagagcaacggcggcagcatcctgaccgtgagcagaaccccctgcgaccccgacctgccctacatctgcaccgcccagaaccccgtgagccagagaagcagcctgcccgtgcacgtgggccagttctgcaccgaccccggcgccagcagaggcggcaccaccggcgagaccgtggtgggcgtgctgggcgagcccgtgaccctgcccctggccctgcccgcctgcagagacaccgagaaggtggtgtggctgttcaacaccagcatcatcagcaaggagagagaggaggccgccaccgccgaccccctgatcaagagcagagacccctacaagaacagagtgtgggtgagcagccaggactgcagcctgaagatcagccagctgaagatcgaggacgccggcccctaccacgcctacgtgtgcagcgaggccagcagcgtgaccagcatgacccacgtgaccctgctgatctacagacccgagagaaacaccaagctgtggatcggcctgttcctgatggtgtgcctgctgtgcgtgggcatcttcagctggtgcatctggaagagaaagggcagatgcagcgtgcccgccttctgcagcagccaggccgaggcccccgccgacacccccgagcccaccgccggccacaccctgtacagcgtgctgagccagggctacgagaagctggacacccccctgagacccgccagacagcagcccacccccaccagcgacagcagcagcgacagcaacctgaccaccgaggaggacgaggacagacccgaggtgcacaagcccatcagcggcagatacgaggtgttcgaccaggtgacccaggagggcgccggccacgaccccgcccccgagggccaggccgactacgaccccgtgaccccctacgtgaccgaggtggagagcgtggtgggcgagaacaccatgtacgcccaggtgttcaacctgcagggcaagacccccgtgagccagaaggaggagagcagcgccaccatctactgcagcatcagaaagccccaggtggtggtgccccccccccagcagaacgacctggagatccccgagagccccacctacgagaacttcacctag

SEQ ID NO: 87416 - DNA, 1884 bp, synthetic construct
  misc_feature 1..1884: note = Description of Artificial Sequence: Synthetic coding sequence
  source 1..1884: mol_type = other DNA
atggccagaggcagcgtgagcgacgaggagatgatggagctgagagaggccttcgccaaggtggacaccgacggcaacggctacatcagcttcaacgagctgaacgacctgttcaaggccgcctgcctgcccctgcccggctacagagtgagagagatcaccgagaacctgatggccaccggcgacctggaccaggacggcagaatcagcttcgacgagttcatcaagatcttccacggcctgaagagcaccgacgtggccaagaccttcagaaaggccatcaacaagaaggagggcatctgcgccatcggcggcaccagcgagcagagcagcgtgggcacccagcacagctacagcgaggaggagaagtacgccttcgtgaactggatcaacaaggccctggagaacgaccccgactgcagacacgtgatccccatgaaccccaacaccaacgacctgttcaacgccgtgggcgacggcatcgtgctgtgcaagatgatcaacctgagcgtgcccgacaccatcgacgagagaaccatcaacaagaagaagctgacccccttcaccatccaggagaacctgaacctggccctgaacagcgccagcgccatcggctgccacgtggtgaacatcggcgccgaggacctgaaggagggcaagccctacctggtgctgggcctgctgtggcaggtgatcaagatcggcctgttcgccgacatcgagctgagcagaaacgaggccctgatcgccctgctgagagagggcgagagcctggaggacctgatgaagctgagccccgaggagctgctgctgagatgggccaactaccacctggagaacgccggctgcaacaagatcggcaacttcagcaccgacatcaaggacagcaaggcctactaccacctgctggagcaggtggcccccaagggcgacgaggagggcgtgcccgccgtggtgatcgacatgagcggcctgagagagaaggacgacatccagagagccgagtgcatgctgcagcaggccgagagactgggctgcagacagttcgtgaccgccaccgacgtggtgagaggcaaccccaagctgaacctggccttcatcgccaacctgttcaacagataccccgccctgcacaagcccgagaaccaggacatcgactggggcgccctggagggcgagaccagagaggagagaaccttcagaaactggatgaacagcctgggcgtgaaccccagagtgaaccacctgtacagcgacctgagcgacgccctggtgatcttccagctgtacgagaagatcaaggtgcccgtggactggaacagagtgaacaagcccccctaccccaagctgggcggcaacatgaagaagctggagaactgcaactacgccgtggagctgggcaagaaccaggccaagttcagcctggtgggcatcggcggccaggacctgaacgagggcaacagaaccctgaccctggccctgatctggcagctgatgagaagatacaccctgaacatcctggaggagatcggcggcggccagaaggtgaacgacgacatcatcgtgaactgggtgaacgagaccctgagagaggccaagaagagcagcagcatcagcagcttcaaggaccccaagatcagcaccagcctgcccgtgctggacctgatcgacgccatccagcccggcagcatcaactacgacctgctgaagaccgagaacctgaacgacgacgagaagctgaacaacgccaagtacgccatcagcatggccagaaagatcggcgccagagtgtacgccctgcccgaggacctggtggaggtgaaccccaagatggtgatgaccgtgttcgcctgcctgatgggcaagggcatgaagagagtgtag

SEQ ID NO: 87417 - DNA, 1884 bp, synthetic construct; identical to SEQ ID NO: 87416
  misc_feature 1..1884: note = Description of Artificial Sequence: Synthetic coding sequence
  source 1..1884: mol_type = other DNA

SEQ ID NO: 87418 - DNA, 741 bp, synthetic construct
  misc_feature 1..741: note = Description of Artificial Sequence: Synthetic coding sequence
  source 1..741: mol_type = other DNA
atggccagaggcagcgtgagcgacgaggagatgatggagctgagagaggccttcgccaaggtggacaccgacggcaacggctacatcagcttcaacgagctgaacgacctgttcaaggccgcctgcctgcccctgcccggctacagagtgagagagatcaccgagaacctgatggccaccggcgacctggaccaggacggcagaatcagcttcgacgagttcatcaagatcttccacggcctgaagagcaccgacgtggccaagaccttcagaaaggccatcaacaagaaggagggcatctgcgccatcggcggcaccagcgagcagagcagcgtgggcacccagcacagctacagcgaggaggagaagtacgccttcgtgaactggatcaacaaggccctggagaacgaccccgactgcagacacgtgatccccatgaaccccaacaccaacgacctgttcaacgccgtgggcgacggcatcgtgctgtgcaagatgatcaacctgagcgtgcccgacaccatcgacgagagaaccatcaacaagaagaagctgacccccttcaccatccaggagaacctgaacctggccctgaacagcgccagcgccatcggctgccacgtggtgaacatcggcgccgaggacctgaaggagggcaagccctacctggtgctgggcctgctgtggcaggtgatcaagatcggcctgttcgccgacatcgagctgagcagaaacgagtag

SEQ ID NO: 87419 - DNA, 591 bp, synthetic construct
  misc_feature 1..591: note = Description of Artificial Sequence: Synthetic coding sequence
  source 1..591: mol_type = other DNA
atgtgcgccgaggacggcgacagcaagttcagcatgagcatcagcatgaacagccccttcctggagatcctgcacctggagaactgcaactacgccgtggagctgggcaagaaccaggccaagttcagcctggtgggcatcggcggccaggacctgaacgagggcaacagaaccctgaccctggccctgatctggcagctgatgagaagatacaccctgaacatcctggaggagatcggcggcggccagaaggtgaacgacgacatcatcgtgaactgggtgaacgagaccctgagagaggccaagaagagcagcagcatcagcagcttcaaggaccccaagatcagcaccagcctgcccgtgctggacctgatcgacgccatccagcccggcagcatcaactacgacctgctgaagaccgagaacctgaacgacgacgagaagctgaacaacgccaagtacgccatcagcatggccagaaagatcggcgccagagtgtacgccctgcccgaggacctggtggaggtgaaccccaagatggtgatgaccgtgttcgcctgcctgatgggcaagggcatgaagagagtgtag

SEQ ID NO: 87420 - DNA, 201 bp, synthetic construct
  misc_feature 1..201: note = Description of Artificial Sequence: Synthetic coding sequence
  source 1..201: mol_type = other DNA
atggccagaggcagcgtgagcgacgaggagatgatggagctgagagaggccttcgccaaggtggacaccgacggcaacggctacatcagcttcaacgagctgaacgacctgttcaaggccgcctgcctgcccctgcccggctacagagtgagagagatcaccgagaacctgatggccaccggcgacctggaccaggactag

SEQ ID NO: 87421 - DNA, 1602 bp, synthetic construct
  misc_feature 1..1602: note = Description of Artificial Sequence: Synthetic coding sequence
  source 1..1602: mol_type = other DNA
atggccctgagaaacgtgcccttcagaagcgaggtgctgggctgggaccccgacagcctggccgactacttcaagaagctgaactacaaggactgcgagaaggccgtgaagaagtaccacatcgacggcgccagattcctgaacctgaccgagaacgacatccagaagttccccaagctgagagtgcccatcctgagcaagctgagccaggagatcaacaagaacgaggagagaagaagcatcttcaccagaaagccccaggtgcccagattccccgaggagaccgagagccacgaggaggacaacggcggctggagcagcttcgaggaggacgactacgagagccccaacgacgaccaggacggcgaggacgacggcgactacgagagccccaacgaggaggaggaggcccccgtggaggacgacgccgactacgagcccccccccagcaacgacgaggaggccctgcagaacagcatcctgcccgccaagcccttccccaacagcaacagcatgtacatcgacagaccccccagcggcaagaccccccagcagccccccgtgcccccccagagacccatggccgccctgccccccccccccgccggcagaaaccacagccccctgccccccccccagaccaaccacgaggagcccagcagaagcagaaaccacaagaccgccaagctgcccgcccccagcatcgacagaagcaccaagccccccctggacagaagcctggcccccttcgacagagagcccttcaccctgggcaagaagccccccttcagcgacaagcccagcatccccgccggcagaagcctgggcgagcacctgcccaagatccagaagccccccctgccccccaccaccgagagacacgagagaagcagccccctgcccggcaagaagccccccgtgcccaagcacggctggggccccgacagaagagagaacgacgaggacgacgtgcaccagagacccctgccccagcccgccctgctgcccatgagcagcaacaccttccccagcagaagcaccaagcccagccccatgaaccccctgcccagcagccacatgcccggcgccttcagcgagagcaacagcagcttcccccagagcgccagcctgcccccctacttcagccagggccccagcaacagaccccccatcagagccgagggcagaaacttccccctgcccctgcccaacaagcccagaccccccagccccgccgaggaggagaacagcctgaacgaggagtggtacgtgagctacatcaccagacccgaggccgaggccgccctgagaaagatcaaccaggacggcaccttcctggtgagagacagcagcaagaagaccaccaccaacccctacgtgctgatggtgctgtacaaggacaaggtgtacaacatccagatcagataccagaaggagagccaggtgtacctgctgggcaccggcctgagaggcaaggaggacttcctgagcgtgagcgacatcatcgactacttcagaaagatgcccctgctgctgatcgacggcaagaacagaggcagcagataccagtgcaccctgacccacgccgccggctacccctag

SEQ ID NO: 87422 - DNA, 1578 bp, synthetic construct
  misc_feature 1..1578: note = Description of Artificial Sequence: Synthetic coding sequence
  source 1..1578: mol_type = other DNA
atgtgggaggcccagttcctgggcctgctgttcctgcagcccctgtgggtggcccccgtgaagcccctgcagcccggcgccgaggtgcccgtggtgtgggcccaggagggcgcccccgcccagctgccctgcagccccaccatccccctgcaggacctgagcctgctgagaagagccggcgtgacctggcagcaccagcccgacagcggcccccccgccgccgcccccggccaccccctggcccccggcccccaccccgccgcccccagcagctggggccccagacccagaagatacaccgtgctgagcgtgggccccggcggcctgagaagcggcagactgcccctgcagcccagagtgcagctggacgagagaggcagacagagaggcgacttcagcctgtggctgagacccgccagaagagccgacgccggcgagtacagagccgccgtgcacctgagagacagagccctgagctgcagactgagactgagactgggccaggccagcatgaccgccagcccccccggcagcctgagagccagcgactgggtgatcctgaactgcagcttcagcagacccgacagacccgccagcgtgcactggttcagaaacagaggccagggcagagtgcccgtgagagagagcccccaccaccacctggccgagagcttcctgttcctgccccaggtgagccccatggacagcggcccctggggctgcatcctgacctacagagacggcttcaacgtgagcatcatgtacaacctgaccgtgctgggcctggagccccccacccccctgaccgtgtacgccggcgccggcagcagagtgggcctgccctgcagactgcccgccggcgtgggcaccagaagcttcctgaccgccaagtggaccccccccggcggcggccccgacctgctggtgaccggcgacaacggcgacttcaccctgagactggaggacgtgagccaggcccaggccggcacctacacctgccacatccacctgcaggagcagcagctgaacgccaccgtgaccctggccatcatcaccgtgacccccaagagcttcggcagccccggcagcctgggcaagctgctgtgcgaggtgacccccgtgagcggccaggagagattcgtgtggagcagcctggacacccccagccagagaagcttcagcggcccctggctggaggcccaggaggcccagctgctgagccagccctggcagtgccagctgtaccagggcgagagactgctgggcgccgccgtgtacttcaccgagctgagcagccccggcgcccagagaagcggcagagcccccggcgccctgcccgccggccacctgctgctgttcctgatcctgggcgtgctgagcctgctgctgctggtgaccggcgccttcggcttccacctgtggagaagacagtggagacccagaagattcagcgccctggagcagggcatccaccccccccaggcccagagcaagatcgaggagctggagcaggagcccgagcccgagcccgagcccgagcccgagcccgagcccgagcccgagcccgagcagctgtag

SEQ ID NO: 87423 - DNA, 1020 bp, synthetic construct
  misc_feature 1..1020: note = Description of Artificial Sequence: Synthetic coding sequence
  source 1..1020: mol_type = other DNA
atggccgaggccagcagcgaccccggcgccgaggagagagaggagctgctgggccccaccgcccagtggagcgtggaggacgaggaggaggccgtgcacgagcagtgccagcacgagagagacagacagctgcaggcccaggacgaggagggcggcggccacgtgcccgagagacccaagcaggagatgctgctgagcctgaagcccagcgaggcccccgagctggacgaggacgagggcttcggcgactggagccagagacccgagcagagacagcagcacgagggcgcccagggcgccctggacagcggcgagcccccccagtgcagaagccccgagggcgagcaggaggacagacccggcctgcacgcctacgagaaggaggacagcgacgaggtgcacctggaggagctgagcctgagcaaggagggccccggccccgaggacaccgtgcaggacaacctgggcgccgccggcgccgaggaggagcaggaggagcaccagaagtgccagcagcccagaacccccagccccctggtgctggagggcaccatcgagcagagcagcccccccctgagccccaccaccaagctgatcgacagaaccgagagcctgaacagaagcatcgagaagagcaacagcgtgaagaagagccagcccgacctgcccatcagcaagatcgaccagtggctggagcagtacacccaggccatcgagaccgccggcagaacccccaagctggccagacaggccagcatcgagctgcccagcatggccgtggccagcaccaagagcagatgggagaccggcgaggtgcaggcccagagcgccgccaagacccccagctgcaaggacatcgtggccggcgacatgagcaagaagagcctgtgggagcagaagggcggcagcaagaccagcagcaccatcaagagcacccccagcggcaagagatacaagttcgtggccaccggccacggcaagtacgagaaggtgctggtggagggcggccccgccccctag

SEQ ID NO: 87424 - DNA, 834 bp, synthetic construct
  misc_feature 1..834: note = Description of Artificial Sequence: Synthetic coding sequence
  source 1..834: mol_type = other DNA
atgctgctgagcctgaagcccagcgaggcccccgagctggacgaggacgagggcttcggcgactggagccagagacccgagcagagacagcagcacgagggcgcccagggcgccctggacagcggcgagcccccccagtgcagaagccccgagggcgagcaggaggacagacccggcctgcacgcctacgagaaggaggacagcgacgaggtgcacctggaggagctgagcctgagcaaggagggccccggccccgaggacaccgtgcaggacaacctgggcgccgccggcgccgaggaggagcaggaggagcaccagaagtgccagcagcccagaacccccagccccctggtgctggagggcaccatcgagcagagcagcccccccctgagccccaccaccaagctgatcgacagaaccgagagcctgaacagaagcatcgagaagagcaacagcgtgaagaagagccagcccgacctgcccatcagcaagatcgaccagtggctggagcagtacacccaggccatcgagaccgccggcagaacccccaagctggccagacaggccagcatcgagctgcccagcatggccgtggccagcaccaagagcagatgggagaccggcgaggtgcaggcccagagcgccgccaagacccccagctgcaaggacatcgtggccggcgacatgagcaagaagagcctgtgggagcagaagggcggcagcaagaccagcagcaccatcaagagcacccccagcggcaagagatacaagttcgtggccaccggccacggcaagtacgagaaggtgctggtggagggcggccccgccccctag

SEQ ID NO: 87425 - DNA, 834 bp, synthetic construct; identical to SEQ ID NO: 87424
  misc_feature 1..834: note = Description of Artificial Sequence: Synthetic coding sequence
  source 1..834: mol_type = other DNA

SEQ ID NO: 87426 - DNA, 669 bp, synthetic construct
  misc_feature 1..669: note = Description of Artificial Sequence: Synthetic coding sequence
  source 1..669: mol_type = other DNA
atgctgctgagcctgaagcccagcgaggcccccgagctggacgaggacgagggcttcggcgactggagccagagacccgagcagagacagcagcacgagggcgcccagggcgccctggacagcggcgagcccccccagtgcagaagccccgagggcgagcaggaggacagacccggcctgcacgcctacgagaaggaggacagcgacgaggtgcacctggaggagctgagcctgagcaaggagggccccggccccgaggacaccgtgcaggacaacctgggcgccgccggcgccgaggaggagcaggaggagcaccagaagtgccagcagcccagaacccccagccccctggtgctggagggcaccatcgagcagagcagcccccccctgagccccaccaccaagctgatcgacagaaccgagagcctgaacagaagcatcgagaagagcaacagcgtgaagaagagccagcccgacctgcccatcagcaagatcgaccagtggctggagcagtacacccaggccatcgagaccgccggcagaacccccaagctggccagacaggccagcatcgagctgcccagcatggccgtggccagcaccaagagcagatgggagaccggcgaggtgcaggcccagagcgccgccaagacccccagctgcaagtag

SEQ ID NO: 87427 - DNA, 183 bp, synthetic construct
  misc_feature 1..183: note = Description of Artificial Sequence: Synthetic coding sequence
  source 1..183: mol_type = other DNA
atgctgctgagcctgaagcccagcgaggcccccgagctggacgaggacgagggcttcggcgactggagccagagacccgagcagagacagcagcacgagggcgcccagggcgccctggacagcggcgagcccccccagtgcagaagccccgagggcgagcaggaggacagacccggcctgtag

SEQ ID NO: 87428 - DNA, 669 bp, synthetic construct; identical to SEQ ID NO: 87426
  misc_feature 1..669: note = Description of Artificial Sequence: Synthetic coding sequence
  source 1..669: mol_type = other DNA

SEQ ID NO: 87429 - DNA, 381 bp, synthetic construct
  misc_feature 1..381: note = Description of Artificial Sequence: Synthetic coding sequence
  source 1..381: mol_type = other DNA
atgctgctgagcctgaagcccagcgaggcccccgagctggacgaggacgagggcttcggcgactggagccagagacccgagcagagacagcagcacgagggcgcccagggcgccctggacagcggcgagcccccccagtgcagaagccccgagggcgagcaggaggacagacccggcctgcacgcctacgagaaggaggacagcgacgaggtgcacctggaggagctgagcctgagcaaggagggccccggccccgaggacaccgtgcaggacaacctgggcgccgccggcgccgaggaggagcaggaggagcaccagaagtgccagcagcccagaacccccagccccctggtgctggagggcaccatcgagcagagctag

SEQ ID NO: 87430 - DNA, 195 bp, synthetic construct
  misc_feature 1..195: note = Description of Artificial Sequence: Synthetic coding sequence
  source 1..195: mol_type = other DNA
atgctgctgagcctgaagcccagcgaggcccccgagctggacgaggacgagggcttcggcgactggagccagagacccgagcagagacagcagcacgagggcgcccagggcgccctggacagcggcgagcccccccagtgcagaagccccgagggcgagcaggaggacagacccggcctgcacgcctacgagtag

SEQ ID NO: 87431 - DNA, 1404 bp, synthetic construct
  misc_feature 1..1404: note = Description of Artificial Sequence: Synthetic coding sequence
  source 1..1404: mol_type = other DNA
atggcccccatctggagcccccccggcagagtgagcggctgccacctgagcagcggccccgcccccggcagcgccgtgggcccctggctgggcaccccccaccccagcctgcccctgcccctggccccccacaagccccccccccccggcctgcccggcagcgccggccagaccagcctgcccgcccagagagagtgcgtgttccccggcgacgccgccgtgcaccaggagctgtgcggcctgggcttcgaggagtgcctgggcagcatcccccaggcccaccagtgctacctgaccaacggccccaagagaagaaagtgcagccccagaagaagaggcagagcccccgcctggctgtgcggcggcagccccccctgccaccagggcctgggccacgagcaccccagcagcggccccagcaccaactgcagccccagacccaccgcccagtggagcgtggaggacgaggaggaggccgtgcacgagcagtgccagcacgagagagacagacagctgcaggcccaggacgaggagggcggcggccacgtgcccgagagacccaagcaggagatgctgctgagcctgaagcccagcgaggcccccgagctggacgaggacgagggcttcggcgactggagccagagacccgagcagagacagcagcacgagggcgcccagggcgccctggacagcggcgagcccccccagtgcagaagccccgagggcgagcaggaggacagacccggcctgcacgcctacgagaaggaggacagcgacgaggtgcacctggaggagctgagcctgagcaaggagggccccggccccgaggacaccgtgcaggacaacctgggcgccgccggcgccgaggaggagcaggaggagcaccagaagtgccagcagcccagaacccccagccccctggtgctggagggcaccatcgagcagagcagcccccccctgagccccaccaccaagctgatcgacagaaccgagagcctgaacagaagcatcgagaagagcaacagcgtgaagaagagccagcccgacctgcccatcagcaagatcgaccagtggctggagcagtacacccaggccatcgagaccgccggcagaacccccaagctggccagacaggccagcatcgagctgcccagcatggccgtggccagcaccaagagcagatgggagaccggcgaggtgcaggcccagagcgccgccaagacccccagctgcaaggacatcgtggccggcgacatgagcaagaagagcctgtgggagcagaagggcggcagcaagaccagcagcaccatcaagagcacccccagcggcaagagatacaagttcgtggccaccggccacggcaagtacgagaaggtgctggtggagggcggccccgccccctag

SEQ ID NO: 87432 - DNA, 618 bp, synthetic construct
  misc_feature 1..618: note = Description of Artificial Sequence: Synthetic coding sequence
  source 1..618: mol_type = other DNA
atgaccccccccgagagactgttcctgcccagagtgtgcggcaccaccctgcacctgctgctgctgggcctgctgctggtgctgctgcccggcgcccagggcctgcccggcgtgggcctgacccccagcgccgcccagaccgccagacagcaccccaagatgcacctggcccacagcaacctgaagcccgccgcccacctgatcggcgaccccagcaagcagaacagcctgctgtggagagccaacaccgacagagccttcctgcaggacggcttcagcctgagcaacaacagcctgctggtgcccaccagcggcatctacttcgtgtacagccaggtggtgttcagcggcaaggcctacagccccaaggccaccagcagccccctgtacctggcccacgaggtgcagctgttcagcagccagtaccccttccacgtgcccctgctgagcagccagaagatggtgtaccccggcctgcaggagccctggctgcacagcatgtaccacggcgccgccttccagctgacccagggcgaccagctgagcacccacaccgacggcatcccccacctggtgctgagccccagcaccgtgttcttcggcgccttcgccctgtag

SEQ ID NO: 87433 - DNA, 618 bp, synthetic construct; identical to SEQ ID NO: 87432
  misc_feature 1..618: note = Description of Artificial Sequence: Synthetic coding sequence
  source 1..618: mol_type = other DNA

SEQ ID NO: 87434 - DNA, 618 bp, synthetic construct
  misc_feature 1..618: note = Description of Artificial Sequence: Synthetic coding sequence
  source 1..618: mol_type = other DNA
atgaccccccccgagagactgttcctgcccagagtgtgcggcaccaccctgcacctgctgctgctgggcctgctgctggtgctgctgcccggcgcccagggcctgcccggcgtgggcctgacccccagcgccgcccagaccgccagacagcaccccaagatgcacctggcccacagcaccctgaagcccgccgcccacctgatcggcgaccccagcaagcagaacagcctgctgtggagagccaacaccgacagagccttcctgcaggacggcttcagcctgagcaacaacagcctgctggtgcccaccagcggcatctacttcgtgtacagccaggtggtgttcagcggcaaggcctacagccccaaggccaccagcagccccctgtacctggcccacgaggtgcagctgttcagcagccagtaccccttccacgtgcccctgctgagcagccagaagatggtgtaccccggcctgcaggagccctggctgcacagcatgtaccacggcgccgccttccagctgacccagggcgaccagctgagcacccacaccgacggcatcccccacctggtgctgagccccagcaccgtgttcttcggcgccttcgccctgtag

SEQ ID NO: 87435 - DNA, 618 bp, synthetic construct; identical to SEQ ID NO: 87434
  misc_feature 1..618: note = Description of Artificial Sequence: Synthetic coding sequence
  source 1..618: mol_type = other DNA

SEQ ID NO: 87436 - DNA, 618 bp, synthetic construct; identical to SEQ ID NO: 87434
  misc_feature 1..618: note = Description of Artificial Sequence: Synthetic coding sequence
  source 1..618: mol_type = other DNA

SEQ ID NO: 87437 - DNA, 618 bp, synthetic construct
  misc_feature 1..618: note = Description of Artificial Sequence: Synthetic coding sequence
  source 1..618: mol_type = other DNA
atgaccccccccgagagactgttcctgcccagagtgagaggcaccaccctgcacctgctgctgctgggcctgctgctggtgctgctgcccggcgcccagggcctgcccggcgtgggcctgacccccagcgccgcccagaccgccagacagcaccccaagatgcacctggcccacagcaccctgaagcccgccgcccacctgatcggcgaccccagcaagcagaacagcctgctgtggagagccaacaccgacagagccttcctgcaggacggcttcagcctgagcaacaacagcctgctggtgcccaccagcggcatctacttcgtgtacagccaggtggtgttcagcggcaaggcctacagccccaaggccaccagcagccccctgtacctggcccacgaggtgcagctgttcagcagccagtaccccttccacgtgcccctgctgagcagccagaagatggtgtaccccggcctgcaggagccctggctgcacagcatgtaccacggcgccgccttccagctgacccagggcgaccagctgagcacccacaccgacggcatcccccacctggtgctgagccccagcaccgtgttcttcggcgccttcgccctgtag

SEQ ID NO: 87438 - DNA, 618 bp, synthetic construct; identical to SEQ ID NO: 87434
  misc_feature 1..618: note = Description of Artificial Sequence: Synthetic coding sequence
  source 1..618: mol_type = other DNA

SEQ ID NO: 87439 - DNA, 417 bp, synthetic construct
  misc_feature 1..417: note = Description of Artificial Sequence: Synthetic coding sequence
  source 1..417: mol_type = other DNA
atgaccccccccgagagactgttcctgcccagagtgtgcggcaccaccctgcacctgctgctgctgggcctgctgctggtgctgctgcccggcgcccagggcctgcccggcgtgggcctgacccccagcgccgcccagaccgccagacagcaccccaagatgcacctggcccacagcaccctgaagcccgccgcccacctgatcggcgaccccagcaagcagaacagcctgctgtggagagccaacaccgacagagccttcctgcaggacggcttcagcctgagcaacaacagcctgctggtgcccaccagcggcatctacttcgtgtacagccagggcagcagcccccccctgctgtggcccttccagcagctgaagagcagcctgatcaagagccccgagctgagcaagaagtag

SEQ ID NO: 87440 - DNA, 618 bp, synthetic construct; identical to SEQ ID NO: 87437
  misc_feature 1..618: note = Description of Artificial Sequence: Synthetic coding sequence
  source 1..618: mol_type = other DNA

SEQ ID NO: 87441 - DNA, 618 bp, synthetic construct; identical to SEQ ID NO: 87437
  misc_feature 1..618: note = Description of Artificial Sequence: Synthetic coding sequence
  source 1..618: mol_type = other DNA

SEQ ID NO: 87442 - DNA, 618 bp, synthetic construct; identical to SEQ ID NO: 87434
  misc_feature 1..618: note = Description of Artificial Sequence: Synthetic coding sequence
  source 1..618: mol_type = other DNA

SEQ ID NO: 87443 - DNA, 618 bp, synthetic construct; identical to SEQ ID NO: 87434
  misc_feature 1..618: note = Description of Artificial Sequence: Synthetic coding sequence
  source 1..618: mol_type = other DNA

SEQ ID NO: 87444 - DNA, 618 bp, synthetic construct; identical to SEQ ID NO: 87437
  misc_feature 1..618: note = Description of Artificial Sequence: Synthetic coding sequence
  source 1..618: mol_type = other DNA

SEQ ID NO: 87445 - DNA, 417 bp, synthetic construct
  misc_feature 1..417: note = Description of Artificial Sequence: Synthetic coding sequence
  source 1..417: mol_type = other DNA
atgaccccccccgagagactgttcctgcccagagtgagaggcaccaccctgcacctgctgctgctgggcctgctgctggtgctgctgcccggcgcccagggcctgcccggcgtgggcctgacccccagcgccgcccagaccgccagacagcaccccaagatgcacctggcccacagcaccctgaagcccgccgcccacctgatcggcgaccccagcaagcagaacagcctgctgtggagagccaacaccgacagagccttcctgcaggacggcttcagcctgagcaacaacagcctgctggtgcccaccagcggcatctacttcgtgtacagccagggcagcagcccccccctgctgtggcccttccagcagctgaagagcagcctgatcaagagccccgagctgagcaagaagtag

SEQ ID NO: 87446 - DNA, 474 bp, synthetic construct
  misc_feature 1..474: note = Description of Artificial Sequence: Synthetic coding sequence
  source 1..474: mol_type = other DNA
atgaccccccccgagagactgttcctgcccagagtgtgcggcaccaccctgcacctgctgctgctgggcctgctgctggtgctgctgcccggcgcccagggcctgcccggcgtgggcctgacccccagcgccgcccagaccgccagacagcaccccaagatgcacctggcccacagcaacctgaagcccgccgcccacctgatcggcgaccccagcaagcagaacagcctgctgtggagagccaacaccgacagagccttcctgcaggacggcttcagcctgagcaacaacagcctgctggtgcccaccagcggcatctacttcgtgtacagccagctgcccgaggacggcgtgagcagagccgccggcaccctggccgccctggacgtgcccagaggctgcgtgcccgcccaccccggcagacccgccatccacccccacagatggcaccccccccccagcccccagccctag

SEQ ID NO: 87447 - DNA, 417 bp, synthetic construct; identical to SEQ ID NO: 87439
  misc_feature 1..417: note = Description of Artificial Sequence: Synthetic coding sequence
  source 1..417: mol_type = other DNA

SEQ ID NO: 87448 - DNA, 417 bp, synthetic construct; identical to SEQ ID NO: 87439
  misc_feature 1..417: note = Description of Artificial Sequence: Synthetic coding sequence
  source 1..417: mol_type = other DNA

SEQ ID NO: 87449 - DNA, 417 bp, synthetic construct; identical to SEQ ID NO: 87445
  misc_feature 1..417: note = Description of Artificial Sequence: Synthetic coding sequence
  source 1..417: mol_type = other DNA

SEQ ID NO: 87450 - DNA, 735 bp, synthetic construct
  misc_feature 1..735: note = Description of Artificial Sequence: Synthetic coding sequence
  source 1..735: mol_type = other DNA
atgggcgccctgggcctggagggcagaggcggcagactgcagggcagaggcagcctgctgctggccgtggccggcgccaccagcctggtgaccctgctgctggccgtgcccatcaccgtgctggccgtgctggccctggtgccccaggaccagggcggcctggtgaccgagaccgccgaccccggcgcccaggcccagcagggcctgggcttccagaagctgcccgaggaggagcccgagaccgacctgagccccggcctgcccgccgcccacctgatcggcgcccccctgaagggccagggcctgggctgggagaccaccaaggagcaggccttcctgaccagcggcacccagttcagcgacgccgagggcctggccctgccccaggacggcctgtactacctgtactgcctggtgggctacagaggcagagccccccccggcggcggcgacccccagggcagaagcgtgaccctgagaagcagcctgtacagagccggcggcgcctacggccccggcacccccgagctgctgctggagggcgccgagaccgtgacccccgtgctggaccccgccagaagacagggctacggccccctgtggtacaccagcgtgggcttcggcggcctggtgcagctgagaagaggcgagagagtgtacgtgaacatcagccaccccgacatggtggacttcgccagaggcaagaccttcttcggcgccgtgatggtgggctag

SEQ ID NO: 87451 - DNA, 735 bp, synthetic construct; identical to SEQ ID NO: 87450
  misc_feature 1..735: note = Description of Artificial Sequence: Synthetic coding sequence
  source 1..735: mol_type = other DNA

SEQ ID NO: 87452 - DNA, 735 bp, synthetic construct; identical to SEQ ID NO: 87450
  misc_feature 1..735: note = Description of Artificial Sequence: Synthetic coding sequence
  source 1..735: mol_type = other DNA

SEQ ID NO: 87453 - DNA, 735 bp, synthetic construct; identical to SEQ ID NO: 87450
  misc_feature 1..735: note = Description of Artificial Sequence: Synthetic coding sequence
  source 1..735: mol_type = other DNA

SEQ ID NO: 87454 - DNA, 735 bp, synthetic construct; identical to SEQ ID NO: 87450
  misc_feature 1..735: note = Description of Artificial Sequence: Synthetic coding sequence
  source 1..735: mol_type = other DNA

SEQ ID NO: 87455 - DNA, 735 bp, synthetic construct; identical to SEQ ID NO: 87450
  misc_feature 1..735: note = Description of Artificial Sequence: Synthetic coding sequence
  source 1..735: mol_type = other DNA

SEQ ID NO: 87456 - DNA, 234 bp, synthetic construct
  misc_feature 1..234: note = Description of Artificial Sequence: Synthetic coding sequence
  source 1..234: mol_type = other DNA
atgggcgccctgggcctggagggcagaggcggcagactgcagggcagaggcagcctgctgctggccgtggccggcgccaccagcctggtgaccctgctgctggccgtgcccatcaccgtgctggccgtgctggccctggtgccccaggaccagggcggcctgggcttcagaagctgccagagaagaagccagaagcagatcagcgcccccggcagccagctgcccaccagctag

SEQ ID NO: 87457 - DNA, 735 bp, synthetic construct; identical to SEQ ID NO: 87450
  misc_feature 1..735: note = Description of Artificial Sequence: Synthetic coding sequence
  source 1..735: mol_type = other DNA

SEQ ID NO: 87458 - DNA, 735 bp, synthetic construct; identical to SEQ ID NO: 87450
  misc_feature 1..735: note = Description of Artificial Sequence: Synthetic coding sequence
  source 1..735: mol_type = other DNA

SEQ ID NO: 87459 - DNA, 276 bp, synthetic construct
  misc_feature 1..276: note = Description of Artificial Sequence: Synthetic coding sequence
  source 1..276: mol_type = other DNA
atggccgccagcagcagagcccaggtgctgagcctgtacagagccatgctgagagagagcaagagattcagcgcctacaactacagaacctacgccgtgagaagaatcagagacgccttcagagagaacaagaacgtgaaggaccccgtggagatccagaccctggtgaacaaggccaagagagacctgggcgtgatcagaagacaggtgcacatcggccagctgtacagcaccgacaagctgatcatcgagaacagagacatgcccagaacctag

SEQ ID NO: 87460 - DNA, 393 bp, synthetic construct
  misc_feature 1..393: note = Description of Artificial Sequence: Synthetic coding sequence
  source 1..393: mol_type = other DNA
atggccgccagcagcagagcccaggtgctgagcctgtacagagccatgctgagagagagcaagagattcagcgcctacaactacagaacctacgccgtgagaagaatcagagacgccttcagagagaacaagaacgtgaaggaccccgtggagatccagaccctggtgaacaaggccaagagagacctgggcgtgatcagaagacagatggacagccacagcgtggcccaggccggcgtgcactggaacgacctgagcagcctgcagcccctgcccccctggttcaagcagttcagctgcctgagcctgcccagcagctgggactacagaagaaccccccccagactggccaacttctgcatcctgagcagagacgtgatcagcctgtactag

SEQ ID NO: 87461 - DNA, 291 bp, synthetic construct
  misc_feature 1..291: note = Description of Artificial Sequence: Synthetic coding sequence
  source 1..291: mol_type = other DNA
atggccgccagcagcagagcccaggtgctgagcctgtacagagccatgctgagagagagcaagagattcagcgcctacaactacagaacctacgccgtgagaagaatcagagacgccttcagagagaacaagaacgtgaaggaccccgtggagatccagaccctggtgaacaaggccaagagagacctgggcgtgatcagaagacaggtggccgagcagggcaccgccgccagaagaaagagcggcaacagcagcagaagcctgggcaagccctgcaccagctggccctag

SEQ ID NO: 87462 - DNA, 2559 bp, synthetic construct
  misc_feature 1..2559: note = Description of Artificial Sequence: Synthetic coding sequence
  source 1..2559: mol_type = other DNA
atgctgagcggcaagaaggccgccgccgccgccgccgccgccgccgccgccgccaccggcaccgaggccggccccggcaccgccggcggcagcgagaacggcagcgaggtggccgcccagcccgccggcctgagcggccccgccgaggtgggccccggcgccgtgggcgagagaacccccagaaagaaggagccccccagagccagcccccccggcggcctggccgagccccccggcagcgccggcccccaggccggccccaccgtggtgcccggcagcgccacccccatggagaccggcatcgccgagacccccgagggcagaagaaccagcagaagaaagagagccaaggtggagtacagagagatggacgagagcctggccaacctgagcgaggacgagtactacagcgaggaggagagaaacgccaaggccgagaaggagaagaagctgccccccccccccccccaggccccccccgaggaggagaacgagagcgagcccgaggagcccagcggcgtggagggcgccgccttccagagcagactgccccacgacagaatgaccagccaggaggccgcctgcttccccgacatcatcagcggcccccagcagacccagaaggtgttcctgttcatcagaaacagaaccctgcagctgtggctggacaaccccaagatccagctgaccttcgaggccaccctgcagcagctggaggccccctacaacagcgacaccgtgctggtgcacagagtgcacagctacctggagagacacggcctgatcaacttcggcatctacaagagaatcaagcccctgcccaccaagaagaccggcaaggtgatcatcatcggcagcggcgtgagcggcctggccgccgccagacagctgcagagcttcggcatggacgtgaccctgctggaggccagagacagagtgggcggcagagtggccaccttcagaaagggcaactacgtggccgacctgggcgccatggtggtgaccggcctgggcggcaaccccatggccgtggtgagcaagcaggtgaacatggagctggccaagatcaagcagaagtgccccctgtacgaggccaacggccaggccgtgcccaaggagaaggacgagatggtggagcaggagttcaacagactgctggaggccaccagctacctgagccaccagctggacttcaacgtgctgaacaacaagcccgtgagcctgggccaggccctggaggtggtgatccagctgcaggagaagcacgtgaaggacgagcagatcgagcactggaagaagatcgtgaagacccaggaggagctgaaggagctgctgaacaagatggtgaacctgaaggagaagatcaaggagctgcaccagcagtacaaggaggccagcgaggtgaagccccccagagacatcaccgccgagttcctggtgaagagcaagcacagagacctgaccgccctgtgcaaggagtacgacgagctggccgagacccagggcaagctggaggagaagctgcaggagctggaggccaacccccccagcgacgtgtacctgagcagcagagacagacagatcctggactggcacttcgccaacctggagttcgccaacgccacccccctgagcaccctgagcctgaagcactgggaccaggacgacgacttcgagttcaccggcagccacctgaccgtgagaaacggctacagctgcgtgcccgtggccctggccgagggcctggacatcaagctgaacaccgccgtgagacaggtgagatacaccgccagcggctgcgaggtgatcgccgtgaacaccagaagcaccagccagaccttcatctacaagtgcgacgccgtgctgtgcaccctgcccctgggcgtgctgaagcagcagccccccgccgtgcagttcgtgccccccctgcccgagtggaagaccagcgccgtgcagagaatgggcttcggcaacctgaacaaggtggtgctgtgcttcgacagagtgttctgggaccccagcgtgaacctgttcggccacgtgggcagcaccaccgccagcagaggcgagctgttcctgttctggaacctgtacaaggcccccatcctgctggccctggtggccggcgaggccgccggcatcatggagaacatcagcgacgacgtgatcgtgggcagatgcctggccatcctgaagggcatcttcggcagcagcgccgtgccccagcccaaggagaccgtggtgagcagatggagagccgacccctgggccagaggcagctacagctacgtggccgccggcagcagcggcaacgactacgacctgatggcccagcccatcacccccggccccagcatccccggcgccccccagcccatccccagactgttcttcgccggcgagcacaccatcagaaactaccccgccaccgtgcacggcgccctgctgagcggcctgagagaggccggcagaatcgccgaccagttcctgggcgccatgtacaccctgcccagacaggccacccccggcgtgcccgcccagcagagccccagcatgtag

SEQ ID NO: 87463 - DNA, 2631 bp, synthetic construct
  misc_feature 1..2631: note = Description of Artificial Sequence: Synthetic coding sequence
  source 1..2631: mol_type = other DNA
atgctgagcggcaagaaggccgccgccgccgccgccgccgccgccgccgccgccaccggcaccgaggccggccccggcaccgccggcggcagcgagaacggcagcgaggtggccgcccagcccgccggcctgagcggccccgccgaggtgggccccggcgccgtgggcgagagaacccccagaaagaaggagccccccagagccagcccccccggcggcctggccgagccccccggcagcgccggcccccaggccggccccaccgtggtgcccggcagcgccacccccatggagaccggcatcgccgagacccccgagggcagaagaaccagcagaagaaagagagccaaggtggagtacagagagatggacgagagcctggccaacctgagcgaggacgagtactacagcgaggaggagagaaacgccaaggccgagaaggagaagaagctgccccccccccccccccaggccccccccgaggaggagaacgagagcgagcccgaggagcccagcggccaggccggcggcctgcaggacgacagcagcggcggctacggcgacggccaggccagcggcgtggagggcgccgccttccagagcagactgccccacgacagaatgaccagccaggaggccgcctgcttccccgacatcatcagcggcccccagcagacccagaaggtgttcctgttcatcagaaacagaaccctgcagctgtggctggacaaccccaagatccagctgaccttcgaggccaccctgcagcagctggaggccccctacaacagcgacaccgtgctggtgcacagagtgcacagctacctggagagacacggcctgatcaacttcggcatctacaagagaatcaagcccctgcccaccaagaagaccggcaaggtgatcatcatcggcagcggcgtgagcggcctggccgccgccagacagctgcagagcttcggcatggacgtgaccctgctggaggccagagacagagtgggcggcagagtggccaccttcagaaagggcaactacgtggccgacctgggcgccatggtggtgaccggcctgggcggcaaccccatggccgtggtgagcaagcaggtgaacatggagctggccaagatcaagcagaagtgccccctgtacgaggccaacggccaggccgagagaatcatcgtgcccaaggagaaggacgagatggtggagcaggagttcaacagactgctggaggccaccagctacctgagccaccagctggacttcaacgtgctgaacaacaagcccgtgagcctgggccaggccctggaggtggtgatccagctgcaggagaagcacgtgaaggacgagcagatcgagcactggaagaagatcgtgaagacccaggaggagctgaaggagctgctgaacaagatggtgaacctgaaggagaagatcaaggagctgcaccagcagtacaaggaggccagcgaggtgaagccccccagagacatcaccgccgagttcctggtgaagagcaagcacagagacctgaccgccctgtgcaaggagtacgacgagctggccgagacccagggcaagctggaggagaagctgcaggagctggaggccaacccccccagcgacgtgtacctgagcagcagagacagacagatcctggactggcacttcgccaacctggagttcgccaacgccacccccctgagcaccctgagcctgaagcactgggaccaggacgacgacttcgagttcaccggcagccacctgaccgtgagaaacggctacagctgcgtgcccgtggccctggccgagggcctggacatcaagctgaacaccgccgtgagacaggtgagatacaccgccagcggctgcgaggtgatcgccgtgaacaccagaagcaccagccagaccttcatctacaagtgcgacgccgtgctgtgcaccctgcccctgggcgtgctgaagcagcagccccccgccgtgcagttcgtgccccccctgcccgagtggaagaccagcgccgtgcagagaatgggcttcggcaacctgaacaaggtggtgctgtgcttcgacagagtgttctgggaccccagcgtgaacctgttcggccacgtgggcagcaccaccgccagcagaggcgagctgttcctgttctggaacctgtacaaggcccccatcctgctggccctggtggccggcgaggccgccggcatcatggagaacatcagcgacgacgtgatcgtgggcagatgcctggccatcctgaagggcatcttcggcagcagcgccgtgccccagcccaaggagaccgtggtgagcagatggagagccgacccctgggccagaggcagctacagctacgtggccgccggcagcagcggcaacgactacgacctgatggcccagcccatcacccccggccccagcatccccggcgccccccagcccatccccagactgttcttcgccggcgagcacaccatcagaaactaccccgccaccgtgcacggcgccctgctgagcggcctgagagaggccggcagaatcgccgaccagttcctgggcgccatgtacaccctgcccagacaggccacccccggcgtgcccgcccagcagagccccagcatgtag

SEQ ID NO: 87464 - DNA, 2631 bp, synthetic construct
  misc_feature 1..2631: note = Description of Artificial Sequence: Synthetic coding sequence
  source 1..2631: mol_type = other DNA
atgctgagcggcaagaaggccgccgccgccgccgccgccgccgccgccgccgccaccggcaccgaggccggccccggcaccgccggcggcagcgagaacggcagcgaggtggccgcccagcccgccggcctgagcggccccgccgaggtgggccccggcgccgtgggcgagagaacccccagaaagaaggagccccccagagccagcccccccggcggcctggccgagccccccggcagcgccggcccccaggccggccccaccgtggtgcccggcagcgccacccccatggagaccggcatcgccgagacccccgagggcagaagaaccagcagaagaaagagagccaaggtggagtacagagagatggacgagagcctggccaacctgagcgaggacgagtactacagcgaggaggagagaaacgccaaggccgagaaggagaagaagctgccccccccccccccccaggccccccccgaggaggagaacgagagcgagcccgaggagcccagcggccaggccggcggcctgcaggacgacagcagcggcggctacggcgacggccaggccagcggcgtggagggcgccgccttccagagcagactgccccacgacagaatgaccagccaggaggccgcctgcttccccgacatcatcagcggcccccagcagacccagaaggtgttcctgttcatcagaaacagaaccctgcagctgtggctggacaaccccaagatccagctgaccttcgaggccaccctgcagcagctggaggccccctacaacagcgacaccgtgctggtgcacagagtgcacagctacctggagagacacggcctgatcaacttcggcatctacaagagaatcaagcccctgcccaccaagaagaccggcaaggtgatcatcatcggcagcggcgtgagcggcctggccgccgccagacagctgcagagcttcggcatggacgtgaccctgctggaggccagagacagagtgggcggcagagtggccaccttcagaaagggcaactacgtggccgacctgggcgccatggtggtgaccggcctgggcggcaaccccatggccgtggtgagcaagcaggtgaacatggagctggccaagatcaagcagaagtgccccctgtacgaggccaacggccaggccgacaccgtgaaggtgcccaaggagaaggacgagatggtggagcaggagttcaacagactgctggaggccaccagctacctgagccaccagctggacttcaacgtgctgaacaacaagcccgtgagcctgggccaggccctggaggtggtgatccagctgcaggagaagcacgtgaaggacgagcagatcgagcactggaagaagatcgtgaagacccaggaggagctgaaggagctgctgaacaagatggtgaacctgaaggagaagatcaaggagctgcaccagcagtacaaggaggccagcgaggtgaagccccccagagacatcaccgccgagttcctggtgaagagcaagcacagagacctgaccgccctgtgcaaggagtacgacgagctggccgagacccagggcaagctggaggagaagctgcaggagctggaggccaacccccccagcgacgtgtacctgagcagcagagacagacagatcctggactggcacttcgccaacctggagttcgccaacgccacccccctgagcaccctgagcctgaagcactgggaccaggacgacgacttcgagttcaccggcagccacctgaccgtgagaaacggctacagctgcgtgcccgtggccctggccgagggcctggacatcaagctgaacaccgccgtgagacaggtgagatacaccgccagcggctgcgaggtgatcgccgtgaacaccagaagcaccagccagaccttcatctacaagtgcgacgccgtgctgtgcaccctgcccctgggcgtgctgaagcagcagccccccgccgtgcagttcgtgccccccctgcccgagtggaagaccagcgccgtgcagagaatgggcttcggcaacctgaacaaggtggtgctgtgcttcgacagagtgttctgggaccccagcgtgaacctgttcggccacgtgggcagcaccaccgccagcagaggcgagctgttcctgttctggaacctgtacaaggcccccatcctgctggccctggtggccggcgaggccgccggcatcatggagaacatcagcgacgacgtgatcgtgggcagatgcctggccatcctgaagggcatcttcggcagcagcgccgtgccccagcccaaggagaccgtggtgagcagatggagagccgacccctgggccagaggcagctacagctacgtggccgccggcagcagcggcaacgactacgacctgatggcccagcccatcacccccggccccagcatccccggcgccccccagcccatccccagactgttcttcgccggcgagcacaccatcagaaactaccccgccaccgtgcacggcgccctgctgagcggcctgagagaggccggcagaatcgccgaccagttcctgggcgccatgtacaccctgcccagacaggccacccccggcgtgcccgcccagcagagccccagcatgtag

SEQ ID NO: 87465 - DNA, 1773 bp, synthetic construct
  misc_feature 1..1773: note = Description of Artificial Sequence: Synthetic coding sequence
  source 1..1773: mol_type = other DNA
atggccacccccagaggcagaaccaagaagaaggccagcttcgaccacagccccgacagcctgcccctgagaagcagcggcagacaggccaagaagaaggccaccgagaccaccgacgaggacgaggacggcggcagcgagaagaagtacagaaagtgcgagaaggccggctgcaccgccacctgccccgtgtgcttcgccagcgccagcgagagatgcgccaagaacggctacaccagcagatggtaccacctgagctgcggcgagcacttctgcaacgagtgcttcgaccactactacagaagccacaaggacggctacgacaagtacaccacctggaagaagatctggaccagcaacggcaagaccgagcccagccccaaggccttcatggccgaccagcagctgccctactgggtgcagtgcaccaagcccgagtgcagaaagtggagacagctgaccaaggagatccagctgaccccccagatcgccaagacctacagatgcggcatgaagcccaacaccgccatcaagcccgagaccagcgaccactgcagcctgcccgaggacctggaggccctgaccccccagaagtgcatcccccacatcatcgtgagaggcctggtgagaatcagatgcgtgcaggaggtggagagaatcctgtacttcatgaccagaaagggcctgatcaacaccggcgtgctgagcgtgggcgccgaccagtacctgctgcccaaggactaccacaacaagagcgtgatcatcatcggcgccggccccgccggcctggccgccgccagacagctgcacaacttcggcatcaaggtgaccgtgctggaggccaaggacagaatcggcggcagagtgtgggacgacaagagcttcaagggcgtgaccgtgggcagaggcgcccagatcgtgaacggctgcatcaacaaccccgtggccctgatgtgcgagcaggtgagcgccagaagctgggaccacaacgagttcttcgcccagttcgccggcgaccacaccctgctgacccccggctacagcgtgatcatcgagaagctggccgagggcctggacatccagctgaagagccccgtgcagtgcatcgactacagcggcgacgaggtgcaggtgaccaccaccgacggcaccggctacagcgcccagaaggtgctggtgaccgtgcccctggccctgctgcagaagggcgccatccagttcaacccccccctgagcgagaagaagatgaaggccatcaacagcctgggcgccggcatcatcgagaagatcgccctgcagttcccctacagattctgggacagcaaggtgcagggcgccgacttcttcggccacgtgccccccagcgccagcaagagaggcctgttcgccgtgttctacgacatggacccccagaagaagcacagcgtgctgatgagcgtgatcgccggcgaggccgtggccagcgtgagaaccctggacgacaagcaggtgctgcagcagtgcatggccaccctgagagagctgttcaaggagcaggaggtgcccgaccccaccaagtacttcgtgaccagatggagcaccgacccctggatccagatggcctacagcttcgtgaagaccggcggcagcggcgaggcctacgacatcatcgccgaggacatccagggcaccgtgttcttcgccggcgaggccaccaacagacacttcccccagaccgtgaccggcgcctacctgagcggcgtgagagaggccagcaagatcgccgccttctag

SEQ ID NO: 87466 - DNA, 2463 bp, synthetic construct
  misc_feature 1..2463: note = Description of Artificial Sequence: Synthetic coding sequence
  source 1..2463: mol_type = other DNA
atggccacccccagaggcagaaccaagaagaaggccagcttcgaccacagccccgacagcctgcccctgagaagcagcggcagacaggccaagaagaaggccaccgagaccaccgacgaggacgaggacggcggcagcgagaagaagtacagaaagtgcgagaaggccggctgcaccgccacctgccccgtgtgcttcgccagcgccagcgagagatgcgccaagaacggctacaccagcagatggtaccacctgagctgcggcgagcacttctgcaacgagtgcttcgaccactactacagaagccacaaggacggctacgacaagtacaccacctggaagaagatctggaccagcaacggcaagaccgagcccagccccaaggccttcatggccgaccagcagctgccctactgggtgcagtgcaccaagcccgagtgcagaaagtggagacagctgaccaaggagatccagctgaccccccagatcgccaagacctacagatgcggcatgaagcccaacaccgccatcaagcccgagaccagcgaccactgcagcctgcccgaggacctgagagtgctggaggtgagcaaccactggtggtacagcatgctgatcctgccccccctgctgaaggacagcgtggccgcccccctgctgagcgcctactaccccgactgcgtgggcatgagccccagctgcaccagcaccaacagagccgccgccaccggcaacgccagccccggcaagctggagcacagcaaggccgccctgagcgtgcacgtgcccggcatgaacagatacttccagcccttctaccagcccaacgagtgcggcaaggccctgtgcgtgagacccgacgtgatggagctggacgagctgtacgagttccccgagtacagcagagaccccaccatgtacctggccctgagaaacctgatcctggccctgtggtacaccaactgcaaggaggccctgaccccccagaagtgcatcccccacatcatcgtgagaggcctggtgagaatcagatgcgtgcaggaggtggagagaatcctgtacttcatgaccagaaagggcctgatcaacaccggcgtgctgagcgtgggcgccgaccagtacctgctgcccaaggactaccacaacaagagcgtgatcatcatcggcgccggccccgccggcctggccgccgccagacagctgcacaacttcggcatcaaggtgaccgtgctggaggccaaggacagaatcggcggcagagtgtgggacgacaagagcttcaagggcgtgaccgtgggcagaggcgcccagatcgtgaacggctgcatcaacaaccccgtggccctgatgtgcgagcagctgggcatcagcatgcacaagttcggcgagagatgcgacctgatccaggagggcggcagaatcaccgaccccaccatcgacaagagaatggacttccacttcaacgccctgctggacgtggtgagcgagtggagaaaggacaagacccagctgcaggacgtgcccctgggcgagaagatcgaggagatctacaaggccttcatcaaggagagcggcatccagttcagcgagctggagggccaggtgctgcagttccacctgagcaacctggagtacgcctgcggcagcaacctgcaccaggtgagcgccagaagctgggaccacaacgagttcttcgcccagttcgccggcgaccacaccctgctgacccccggctacagcgtgatcatcgagaagctggccgagggcctggacatccagctgaagagccccgtgcagtgcatcgactacagcggcgacgaggtgcaggtgaccaccaccgacggcaccggctacagcgcccagaaggtgctggtgaccgtgcccctggccctgctgcagaagggcgccatccagttcaacccccccctgagcgagaagaagatgaaggccatcaacagcctgggcgccggcatcatcgagaagatcgccctgcagttcccctacagattctgggacagcaaggtgcagggcgccgacttcttcggccacgtgccccccagcgccagcaagagaggcctgttcgccgtgttctacgacatggacccccagcacagcgtgctgatgagcgtgatcgccggcgaggccgtggccagcgtgagaaccctggacgacaagcaggtgctgcagcagtgcatggccaccctgagagagctgttcaaggagcaggaggtgcccgaccccaccaagtacttcgtgaccagatggagcaccgacccctggatccagatggcctacagcttcgtgaagaccggcggcagcggcgaggcctacgacatcatcgccgaggacatccagggcaccgtgttcttcgccggcgaggccaccaacagacacttcccccagaccgtgaccggcgcctacctgagcggcgtgagagaggccagcaagatcgccgccttctag

SEQ ID NO: 87467 - DNA, 2472 bp, synthetic construct
  misc_feature 1..2472: note = Description of Artificial Sequence: Synthetic coding sequence
  source 1..2472: mol_type = other DNA
atggccacccccagaggcagaaccaagaagaaggccagcttcgaccacagccccgacagcctgcccctgagaagcagcggcagacaggccaagaagaaggccaccgagaccaccgacgaggacgaggacggcggcagcgagaagaagtacagaaagtgcgagaaggccggctgcaccgccacctgccccgtgtgcttcgccagcgccagcgagagatgcgccaagaacggctacaccagcagatggtaccacctgagctgcggcgagcacttctgcaacgagtgcttcgaccactactacagaagccacaaggacggctacgacaagtacaccacctggaagaagatctggaccagcaacggcaagaccgagcccagccccaaggccttcatggccgaccagcagctgccctactgggtgcagtgcaccaagcccgagtgcagaaagtggagacagctgaccaaggagatccagctgaccccccagatcgccaagacctacagatgcggcatgaagcccaacaccgccatcaagcccgagaccagcgaccactgcagcctgcccgaggacctgagagtgctggaggtgagcaaccactggtggtacagcatgctgatcctgccccccctgctgaaggacagcgtggccgcccccctgctgagcgcctactaccccgactgcgtgggcatgagccccagctgcaccagcaccaacagagccgccgccaccggcaacgccagccccggcaagctggagcacagcaaggccgccctgagcgtgcacgtgcccggcatgaacagatacttccagcccttctaccagcccaacgagtgcggcaaggccctgtgcgtgagacccgacgtgatggagctggacgagctgtacgagttccccgagtacagcagagaccccaccatgtacctggccctgagaaacctgatcctggccctgtggtacaccaactgcaaggaggccctgaccccccagaagtgcatcccccacatcatcgtgagaggcctggtgagaatcagatgcgtgcaggaggtggagagaatcctgtacttcatgaccagaaagggcctgatcaacaccggcgtgctgagcgtgggcgccgaccagtacctgctgcccaaggactaccacaacaagagcgtgatcatcatcggcgccggccccgccggcctggccgccgccagacagctgcacaacttcggcatcaaggtgaccgtgctggaggccaaggacagaatcggcggcagagtgtgggacgacaagagcttcaagggcgtgaccgtgggcagaggcgcccagatcgtgaacggctgcatcaacaaccccgtggccctgatgtgcgagcagctgggcatcagcatgcacaagttcggcgagagatgcgacctgatccaggagggcggcagaatcaccgaccccaccatcgacaagagaatggacttccacttcaacgccctgctggacgtggtgagcgagtggagaaaggacaagacccagctgcaggacgtgcccctgggcgagaagatcgaggagatctacaaggccttcatcaaggagagcggcatccagttcagcgagctggagggccaggtgctgcagttccacctgagcaacctggagtacgcctgcggcagcaacctgcaccaggtgagcgccagaagctgggaccacaacgagttcttcgcccagttcgccggcgaccacaccctgctgacccccggctacagcgtgatcatcgagaagctggccgagggcctggacatccagctgaagagcccccaggtgcagtgcatcgactacagcggcgacgaggtgcaggtgaccaccaccgacggcaccggctacagcgcccagaaggtgctggtgaccgtgcccctggccctgctgcagaagggcgccatccagttcaacccccccctgagcgagaagaagatgaaggccatcaacagcctgggcgccggcatcatcgagaagatcgccctgcagttcccctacagattctgggacagcaaggtgcagggcgccgacttcttcggccacgtgccccccagcgccagcaagagaggcctgttcgccgtgttctacgacatggacccccagaagaagcacagcgtgctgatgagcgtgatcgccggcgaggccgtggccagcgtgagaaccctggacgacaagcaggtgctgcagcagtgcatggccaccctgagagagctgttcaaggagcaggaggtgcccgaccccaccaagtacttcgtgaccagatggagcaccgacccctggatccagatggcctacagcttcgtgaagaccggcggcagcggcgaggcctacgacatcatcgccgaggacatccagggcaccgtgttcttcgccggcgaggccaccaacagacacttcccccagaccgtgaccggcgcctacctgagcggcgtgagagaggccagcaagatcgccgccttctag

SEQ ID NO: 87468 - DNA, 1776 bp, synthetic construct
  misc_feature 1..1776: note = Description of Artificial Sequence: Synthetic coding sequence
  source 1..1776: mol_type = other DNA
atggccacccccagaggcagaaccaagaagaaggccagcttcgaccacagccccgacagcctgcccctgagaagcagcggcagacaggccaagaagaaggccaccgagaccaccgacgaggacgaggacggcggcagcgagaagaagtacagaaagtgcgagaaggccggctgcaccgccacctgccccgtgtgcttcgccagcgccagcgagagatgcgccaagaacggctacaccagcagatggtaccacctgagctgcggcgagcacttctgcaacgagtgcttcgaccactactacagaagccacaaggacggctacgacaagtacaccacctggaagaagatctggaccagcaacggcaagaccgagcccagccccaaggccttcatggccgaccagcagctgccctactgggtgcagtgcaccaagcccgagtgcagaaagtggagacagctgaccaaggagatccagctgaccccccagatcgccaagacctacagatgcggcatgaagcccaacaccgccatcaagcccgagaccagcgaccactgcagcctgcccgaggacctggaggccctgaccccccagaagtgcatcccccacatcatcgtgagaggcctggtgagaatcagatgcgtgcaggaggtggagagaatcctgtacttcatgaccagaaagggcctgatcaacaccggcgtgctgagcgtgggcgccgaccagtacctgctgcccaaggactaccacaacaagagcgtgatcatcatcggcgccggccccgccggcctggccgccgccagacagctgcacaacttcggcatcaaggtgaccgtgctggaggccaaggacagaatcggcggcagagtgtgggacgacaagagcttcaagggcgtgaccgtgggcagaggcgcccagatcgtgaacggctgcatcaacaaccccgtggccctgatgtgcgagcaggtgagcgccagaagctgggaccacaacgagttcttcgcccagttcgccggcgaccacaccctgctgacccccggctacagcgtgatcatcgagaagctggccgagggcctggacatccagctgaagagcccccaggtgcagtgcatcgactacagcggcgacgaggtgcaggtgaccaccaccgacggcaccggctacagcgcccagaaggtgctggtgaccgtgcccctggccctgctgcagaagggcgccatccagttcaacccccccctgagcgagaagaagatgaaggccatcaacagcctgggcgccggcatcatcgagaagatcgccctgcagttcccctacagattctgggacagcaaggtgcagggcgccgacttcttcggccacgtgccccccagcgccagcaagagaggcctgttcgccgtgttctacgacatggacccccagaagaagcacagcgtgctgatgagcgtgatcgccggcgaggccgtggccagcgtgagaaccctggacgacaagcaggtgctgcagcagtgcatggccaccctgagagagctgttcaaggagcaggaggtgcccgaccccaccaagtacttcgtgaccagatggagcaccgacccctggatccagatggcctacagcttcgtgaagaccggcggcagcggcgaggcctacgacatcatcgccgaggacatccagggcaccgtgttcttcgccggcgaggccaccaacagacacttcccccagaccgtgaccggcgcctacctgagcggcgtgagagaggccagcaagatcgccgccttctag

SEQ ID NO: 87469 - DNA, 1923 bp, synthetic construct
  misc_feature 1..1923: note = Description of Artificial Sequence: Synthetic coding sequence
  source 1..1923: mol_type = other DNA
tgatgcagcctgcccgaggacctgagagtgctggaggtgagcaaccactggtggtacagcatgctgatcctgccccccctgctgaaggacagcgtggccgcccccctgctgagcgcctactaccccgactgcgtgggcatgagccccagctgcaccagcaccaacagagccgccgccaccggcaacgccagccccggcaagctggagcacagcaaggccgccctgagcgtgcacgtgcccggcatgaacagatacttccagcccttctaccagcccaacgagtgcggcaaggccctgtgcgtgagacccgacgtgatggagctggacgagctgtacgagttccccgagtacagcagagaccccaccatgtacctggccctgagaaacctgatcctggccctgtggtacaccaactgcaaggaggccctgaccccccagaagtgcatcccccacatcatcgtgagaggcctggtgagaatcagatgcgtgcaggaggtggagagaatcctgtacttcatgaccagaaagggcctgatcaacaccggcgtgctgagcgtgggcgccgaccagtacctgctgcccaaggactaccacaacaagagcgtgatcatcatcggcgccggccccgccggcctggccgccgccagacagctgcacaacttcggcatcaaggtgaccgtgctggaggccaaggacagaatcggcggcagagtgtgggacgacaagagcttcaagggcgtgaccgtgggcagaggcgcccagatcgtgaacggctgcatcaacaaccccgtggccctgatgtgcgagcagctgggcatcagcatgcacaagttcggcgagagatgcgacctgatccaggagggcggcagaatcaccgaccccaccatcgacaagagaatggacttccacttcaacgccctgctggacgtggtgagcgagtggagaaaggacaagacccagctgcaggacgtgcccctgggcgagaagatcgaggagatctacaaggccttcatcaaggagagcggcatccagttcagcgagctggagggccaggtgctgcagttccacctgagcaacctggagtacgcctgcggcagcaacctgcaccaggtgagcgccagaagctgggaccacaacgagttcttcgcccagttcgccggcgaccacaccctgctgacccccggctacagcgtgatcatcgagaagctggccgagggcctggacatccagctgaagagcccccaggtgcagtgcatcgactacagcggcgacgaggtgcaggtgaccaccaccgacggcaccggctacagcgcccagaaggtgctggtgaccgtgcccctggccctgctgcagaagggcgccatccagttcaacccccccctgagcgagaagaagatgaaggccatcaacagcctgggcgccggcatcatcgagaagatcgccctgcagttcccctacagattctgggacagcaaggtgcagggcgccgacttcttcggccacgtgccccccagcgccagcaagagaggcctgttcgccgtgttctacgacatggacccccagaagaagcacagcgtgctgatgagcgtgatcgccggcgaggccgtggccagcgtgagaaccctggacgacaagcaggtgctgcagcagtgcatggccaccctgagagagctgttcaaggagcaggaggtgcccgaccccaccaagtacttcgtgaccagatggagcaccgacccctggatccagatggcctacagcttcgtgaagaccggcggcagcggcgaggcctacgacatcatcgccgaggacatccagggcaccgtgttcttcgccggcgaggccaccaacagacacttcccccagaccgtgaccggcgcctacctgagcggcgtgagagaggccagcaagatcgccgccttctag

SEQ ID NO: 87470 - DNA, 342 bp, synthetic construct
  misc_feature 1..342: note = Description of Artificial Sequence: Synthetic coding sequence
  source 1..342: mol_type = other DNA
atgagcgtgatcgccggcgaggccgtggccagcgtgagaaccctggacgacaagcaggtgctgcagcagtgcatggccaccctgagagagctgttcaaggagcaggaggtgcccgaccccaccaagtacttcgtgaccagatggagcaccgacccctggatccagatggcctacagcttcgtgaagaccggcggcagcggcgaggcctacgacatcatcgccgaggacatccagggcaccgtgttcttcgccggcgaggccaccaacagacacttcccccagaccgtgaccggcgcctacctgagcggcgtgagagaggccagcaagatcgccgccttctag

SEQ ID NO: 87471 - DNA, 3966 bp, synthetic construct
  misc_feature 1..3966: note = Description of Artificial Sequence: Synthetic coding sequence
  source 1..3966: mol_type = other DNA
atggtgctgaccctgggcgagagctggcccgtgctggtgggcagaagattcctgagcctgagcgccgccgacggcagcgacggcagccacgacagctgggacgtggagagagtggccgagtggccctggctgagcggcaccatcagagccgtgagccacaccgacgtgaccaagaaggacctgaaggtgtgcgtggagttcgacggcgagagctggagaaagagaagatggatcgaggtgtacagcctgctgagaagagccttcctggtggagcacaacctggtgctggccgagagaaagagccccgagatcagcgagagaatcgtgcagtggcccgccatcacctacaagcccctgctggacaaggccggcctgggcagcatcaccagcgtgagattcctgggcgaccagcagagagtgttcctgagcaaggacctgctgaagcccatccaggacgtgaacagcctgagactgagcctgaccgacaaccagatcgtgagcaaggagttccaggccctgatcgtgaagcacctggacgagagccacctgctgaagggcgacaagaacctggtgggcagcgaggtgaagatctacagcctggaccccagcacccagtggttcagcgccaccgtgatcaacggcaaccccgccagcaagaccctgcaggtgaactgcgaggagatccccgccctgaagatcgtggaccccagcctgatccacgtggaggtggtgcacgacaacctggtgacctgcggcaacagcgccagaatcggcgccgtgaagagaaagagcagcgagaacaacggcaccctggtgagcaagcaggccaagagctgcagcgaggccagccccagcatgtgccccgtgcagagcgtgcccaccaccgtgttcaaggagatcctgctgggctgcaccgccgccaccccccccagcaaggaccccagacagcagagcaccccccaggccgccaacagcccccccaacctgggcgccaagatcccccagggctgccacaagcagagcctgcccgaggagatcagcagctgcctgaacaccaagagcgaggccctgagaaccaagcccgacgtgtgcaaggccggcctgctgagcaagagcagccagatcggcaccggcgacctgaagatcctgaccgagcccaagggcagctgcacccagcccaagaccaacaccgaccaggagaacagactggagagcgtgccccaggccctgaccggcctgcccaaggagtgcctgcccaccaaggccagcagcaaggccgagctggagatcgccaacccccccgagctgcagaagcacctggagcacgcccccagccccagcgacgtgagcaacgcccccgaggtgaaggccggcgtgaacagcgacagccccaacaactgcagcggcaagaaggtggagcccagcgccctggcctgcagaagccagaacctgaaggagagcagcgtgaaggtggacaacgagagctgctgcagcagaagcaacaacaagatccagaacgcccccagcagaaagagcgtgctgaccgaccccgccaagctgaagaagctgcagcagagcggcgaggccttcgtgcaggacgacagctgcgtgaacatcgtggcccagctgcccaagtgcagagagtgcagactggacagcctgagaaaggacaaggagcagcagaaggacagccccgtgttctgcagattcttccacttcagaagactgcagttcaacaagcacggcgtgctgagagtggagggcttcctgacccccaacaagtacgacaacgaggccatcggcctgtggctgcccctgaccaagaacgtggtgggcatcgacctggacaccgccaagtacatcctggccaacatcggcgaccacttctgccagatggtgatcagcgagaaggaggccatgagcaccatcgagccccacagacaggtggcctggaagagagccgtgaagggcgtgagagagatgtgcgacgtgtgcgacaccaccatcttcaacctgcactgggtgtgccccagatgcggcttcggcgtgtgcgtggactgctacagaatgaagagaaagaactgccagcagggcgccgcctacaagaccttcagctggctgaagtgcgtgaagagccagatccacgagcccgagaacctgatgcccacccagatcatccccggcaaggccctgtacgacgtgggcgacatcgtgcacagcgtgagagccaagtggggcatcaaggccaactgcccctgcagcaacagacagttcaagctgttcagcaagcccgccagcaaggaggacctgaagcagaccagcctggccggcgagaagcccaccctgggcgccgtgctgcagcagaaccccagcgtgctggagcccgccgccgtgggcggcgaggccgccagcaagcccgccggcagcatgaagcccgcctgccccgccagcaccagccccctgaactggctggccgacctgaccagcggcaacgtgaacaaggagaacaaggagaagcagcccaccatgcccatcctgaagaacgagatcaagtgcctgccccccctgccccccctgagcaagagcagcaccgtgctgcacaccttcaacagcaccatcctgacccccgtgagcaacaacaacagcggcttcctgagaaacctgctgaacagcagcaccggcaagaccgagaacggcctgaagaacacccccaagatcctggacgacatcttcgccagcctggtgcagaacaagaccaccagcgacctgagcaagagaccccagggcctgaccatcaagcccagcatcctgggcttcgacaccccccactactggctgtgcgacaacagactgctgtgcctgcaggaccccaacaacaagagcaactggaacgtgttcagagagtgctggaagcagggccagcccgtgatggtgagcggcgtgcaccacaagctgaacagcgagctgtggaagcccgagagcttcagaaaggagttcggcgagcaggaggtggacctggtgaactgcagaaccaacgagatcatcaccggcgccaccgtgggcgacttctgggacggcttcgaggacgtgcccaacagactgaagaacgagaaggagcccatggtgctgaagctgaaggactggccccccggcgaggacttcagagacatgatgcccagcagattcgacgacctgatggccaacatccccctgcccgagtacaccagaagagacggcaagctgaacctggccagcagactgcccaactacttcgtgagacccgacctgggccccaagatgtacaacgcctacggcctgatcacccccgaggacagaaagtacggcaccaccaacctgcacctggacgtgagcgacgccgccaacgtgatggtgtacgtgggcatccccaagggccagtgcgagcaggaggaggaggtgctgaagaccatccaggacggcgacagcgacgagctgaccatcaagagattcatcgagggcaaggagaagcccggcgccctgtggcacatctacgccgccaaggacaccgagaagatcagagagttcctgaagaaggtgagcgaggagcagggccaggagaaccccgccgaccacgaccccatccacgaccagagctggtacctggacagaagcctgagaaagagactgcaccaggagtacggcgtgcagggctgggccatcgtgcagttcctgggcgacgtggtgttcatccccgccggcgccccccaccaggtgcacaacctgtacagctgcatcaaggtggccgaggacttcgtgagccccgagcacgtgaagcactgcttctggctgacccaggagttcagatacctgagccagacccacaccaaccacgaggacaagctgcaggtgaagaacgtgatctaccacgccgtgaaggacgccgtggccatgctgaaggccagcgagagcagcttcggcaagccctag

SEQ ID NO: 87472 - DNA, 3966 bp, synthetic construct; identical to SEQ ID NO: 87471
  misc_feature 1..3966: note = Description of Artificial Sequence: Synthetic coding sequence
  source 1..3966: mol_type = other DNA

SEQ ID NO: 87473 - DNA, 3966 bp, synthetic construct; identical to SEQ ID NO: 87471
  misc_feature 1..3966: note = Description of Artificial Sequence: Synthetic coding sequence
  source 1..3966: mol_type = other DNA

SEQ ID NO: 87474 - DNA, 513 bp, synthetic construct
  misc_feature 1..513: note = Description of Artificial Sequence: Synthetic coding sequence
  source 1..513: mol_type = other DNA
atggtgctgaccctgggcgagagctggcccgtgctggtgggcagaagattcctgagcctgagcgccgccgacggcagcgacggcagccacgacagctgggacgtggagagagtggccgagtggccctggctgagcggcaccatcagagccgtgagccacaccgacgtgaccaagaaggacctgaaggtgtgcgtggagttcgacggcgagagctggagaaagagaagatggatcgaggtgtacagcctgctgagaagagccttcctggtggagcacaacctggtgctggccgagagaaagagccccgagatcagcgagagaatcgtgcagtggcccgccatcacctacaagcccctgctggacaaggccggcctgggcagcatcaccagcgtgagattcctgggcgaccagcagagagtgttcctgagcaaggacctgctgaagcccatccaggacgtgaacagcctgagactgagcctgaccgacaaccagatcgtgagcaaggagttctag

SEQ ID NO: 87475 - DNA, 2136 bp, synthetic construct
  misc_feature 1..2136: note = Description of Artificial Sequence: Synthetic coding sequence
  source 1..2136: mol_type = other DNA
atggtgctgaccctgggcgagagctggcccgtgctggtgggcagaagattcctgagcctgagcgccgccgacggcagcgacggcagccacgacagctgggacgtggagagagtggccgagtggccctggctgagcggcaccatcagagccgtgagccacaccgacgtgaccaagaaggacctgaaggtgtgcgtggagttcgacggcgagagctggagaaagagaagatggatcgaggtgtacagcctgctgagaagagccttcctggtggagcacaacctggtgctggccgagagaaagagccccgagatcagcgagagaatcgtgcagtggcccgccatcacctacaagcccctgctggacaaggccggcctgggcagcatcaccagcgtgagattcctgggcgaccagcagagagtgttcctgagcaaggacctgctgaagcccatccaggacgtgaacagcctgagactgagcctgaccgacaaccagatcgtgagcaaggagttccaggccctgatcgtgaagcacctggacgagagccacctgctgaagggcgacaagaacctggtgggcagcgaggtgaagatctacagcctggaccccagcacccagtggttcagcgccaccgtgatcaacggcaaccccgccagcaagaccctgcaggtgaactgcgaggagatccccgccctgaagatcgtggaccccagcctgatccacgtggaggtggtgcacgacaacctggtgacctgcggcaacagcgccagaatcggcgccgtgaagagaaagagcagcgagaacaacggcaccctggtgagcaagcaggccaagagctgcagcgaggccagccccagcatgtgccccgtgcagagcgtgcccaccaccgtgttcaaggagatcctgctgggctgcaccgccgccaccccccccagcaaggaccccagacagcagagcaccccccaggccgccaacagcccccccaacctgggcgccaagatcccccagggctgccacaagcagagcctgcccgaggagatcagcagctgcctgaacaccaagagcgaggccctgagaaccaagcccgacgtgtgcaaggccggcctgctgagcaagagcagccagatcggcaccggcgacctgaagatcctgaccgagcccaagggcagctgcacccagcccaagaccaacaccgaccaggagaacagactggagagcgtgccccaggccctgaccggcctgcccaaggagtgcctgcccaccaaggccagcagcaaggccgagctggagatcgccaacccccccgagctgcagaagcacctggagcacgcccccagccccagcgacgtgagcaacgcccccgaggtgaaggccggcgtgaacagcgacagccccaacaactgcagcggcaagaaggtggagcccagcgccctggcctgcagaagccagaacctgaaggagagcagcgtgaaggtggacaacgagagctgctgcagcagaagcaacaacaagatccagaacgcccccagcagaaagagcgtgctgaccgaccccgccaagctgaagaagctgcagcagagcggcgaggccttcgtgcaggacgacagctgcgtgaacatcgtggcccagctgcccaagtgcagagagtgcagactggacagcctgagaaaggacaaggagcagcagaaggacagccccgtgttctgcagattcttccacttcagaagactgcagttcaacaagcacggcgtgctgagagtggagggcttcctgacccccaacaagtacgacaacgaggccatcggcctgtggctgcccctgaccaagaacgtggtgggcatcgacctggacaccgccaagtacatcctggccaacatcggcgaccacttctgccagatggtgatcagcgagaaggaggccatgagcaccatcgagccccacagacaggtggcctggaagagagccgtgaagggcgtgagagagatgtgcgacgtgtgcgacaccaccatcttcaacctgcactgggtgtgccccagatgcggcttcggcgtgtgcgtggactgctacagaatgaagagaaagaactgccagcagggcgagaacagattcgacagcccccccgcccccctgcacagctag

SEQ ID NO: 87476 - DNA, 366 bp, synthetic construct
  misc_feature 1..366: note = Description of Artificial Sequence: Synthetic coding sequence
  source 1..366: mol_type = other DNA
atggtgctgaccctgggcgagagctggcccgtgctggtgggcagaagattcctgagcctgagcgccgccgacggcagcgacggcagccacgacagctgggacgtggagagagtggccgagtggccctggctgagcggcaccatcagagccgtgagccacaccgacgtgaccaagaaggacctgaaggtgtgcgtggagttcgacggcgagagctggagaaagagaagatggatcgaggtgtacagcctgctgagaagagccttcctggtggagcacaacctggtgctggccgagagaaagagccccgagatcagcgagagaatcgtgcagtggcccgccatcacctacaagcccctgctggactag

SEQ ID NO: 87477 - DNA, 3984 bp, synthetic construct
  misc_feature 1..3984: note = Description of Artificial Sequence: Synthetic coding sequence
  source 1..3984: mol_type = other DNA
atggtgctgaccctgggcgagagctggcccgtgctggtgggcagaagattcctgagcctgagcgccgccgacggcagcgacggcagccacgacagctgggacgtggagagagtggccgagtggccctggctgagcggcaccatcagagccgtgagccacaccgacgtgaccaagaaggacctgaaggtgtgcgtggagttcgacggcgagagctggagaaagagaagatggatcgaggtgtacagcctgctgagaagagccttcctggtggagcacaacctggtgctggccgagagaaagagccccgagatcagcgagagaatcgtgcagtggcccgccatcacctacaagcccctgctggacaaggccggcctgggcagcatcaccagcgtgagattcctgggcgaccagcagagagtgttcctgagcaaggacctgctgaagcccatccaggacgtgaacagcctgagactgagcctgaccgacaaccagatcgtgagcaaggagttccaggccctgatcgtgaagcacctggacgagagccacctgctgaagggcgacaagaacctggtgggcagcgaggtgaagatctacagcctggaccccagcacccagtggttcagcgccaccgtgatcaacggcaaccccgccagcaagaccctgcaggtgaactgcgaggagatccccgccctgaagatcgtggaccccagcctgatccacgtggaggtggtgcacgacaacctggtgacctgcggcaacagcgccagaatcggcgccgtgaagagaaagagcagcgagaacaacggcaccctggtgagcaagcaggccaagagctgcagcgaggccagccccagcatgtgccccgtgcagagcgtgcccaccaccgtgttcaaggagatcctgctgggctgcaccgccgccaccccccccagcaaggaccccagacagcagagcaccccccaggccgccaacagcccccccaacctgggcgccaagatcccccagggctgccacaagcagagcctgcccgaggagatcagcagctgcctgaacaccaagagcgaggccctgagaaccaagcccgacgtgtgcaaggccggcctgctgagcaagagcagccagatcggcaccggcgacctgaagatcctgaccgagcccaagggcagctgcacccagcccaagaccaacaccgaccaggagaacagactggagagcgtgccccaggccctgaccggcctgcccaaggagtgcctgcccaccaaggccagcagcaaggccgagctggagatcgccaacccccccgagctgcagaagcacctggagcacgcccccagccccagcgacgtgagcaacgcccccgaggtgaaggccggcgtgaacagcgacagccccaacaactgcagcggcaagaaggtggagcccagcgccctggcctgcagaagccagaacctgaaggagagcagcgtgaaggtggacaacgagagctgctgcagcagaagcaacaacaagatccagaacgcccccagcagaaagagcgtgctgaccgaccccgccaagctgaagaagctgcagcagagcggcgaggccttcgtgcaggacgacagctgcgtgaacatcgtggcccagctgcccaagtgcagagagtgcagactggacagcctgagaaaggacaaggagcagcagaaggacagccccgtgttctgcagattcttccacttcagaagactgcagttcaacaagcacggcgtgctgagagtggagggcttcctgacccccaacaagtacgacaacgaggccatcggcctgtggctgcccctgaccaagaacgtggtgggcatcgacctggacaccgccaagtacatcctggccaacatcggcgaccacttctgccagatggtgatcagcgagaaggaggccatgagcaccatcgagccccacagacaggtggcctggaagagagccgtgaagggcgtgagagagatgtgcgacgtgtgcgacaccaccatcttcaacctgcactgggtgtgccccagatgcggcttcggcgtgtgcgtggactgctacagaatgaagagaaagaactgccagcagggcgccgcctacaagaccttcagctggctgaagtgcgtgaagagccagatccacgagcccgagaacctgatgcccacccagatcatccccggcaaggccctgtacgacgtgggcgacatcgtgcacagcgtgagagccaagtggggcatcaaggccaactgcccctgcagcaacagacagttcaagctgttcagcaagcccgccagcaaggaggacctgaagcagaccagcctggccggcgagaagcccaccctgggcgccgtgctgcagcagaaccccagcgtgctggagcccgccgccgtgggcggcgaggccgccagcaagcccgccggcagcatgaagcccgcctgccccgccagcaccagccccctgaactggctggccgacctgaccagcggcaacgtgaacaaggagaacaaggagaagcagcccaccatgcccatcctgaagaacgagatcaagtgcctgccccccctgccccccctgagcaagagcagcaccgtgctgcacaccttcaacagcaccatcctgacccccgtgagcaacaacaacagcggcttcctgagaaacctgctgaacagcagcaccggcaagaccgagaacggcctgaagaacacccccaagatcctggacgacatcttcgccagcctggtgcagaacaagaccaccagcgacctgagcaagagaccccagggcctgaccatcaagcccagcatcctgggcttcgacaccccccactactggctgtgcgacaacagactgctgtgcctgcaggaccccaacaacaagagcaactggaacgtgttcagagagtgctggaagcagggccagcccgtgatggtgagcggcgtgcaccacaagctgaacagcgagctgtggaagcccgagagcttcagaaaggagttcggcgagcaggaggtggacctggtgaactgcagaaccaacgagatcatcaccggcgccaccgtgggcgacttctgggacggcttcgaggacgtgcccaacagactgaagaacgagaaggagcccatggtgctgaagctgaaggactggccccccggcgaggacttcagagacatgatgcccagcagattcgacgacctgatggccaacatccccctgcccgagtacaccagaagagacggcaagctgaacctggccagcagactgcccaactacttcgtgagacccgacctgggccccaagatgtacaacgcctacggcctgatcacccccgaggacagaaagtacggcaccaccaacctgcacctggacgtgagcgacgccgccaacgtgatggtgtacgtgggcatccccaagggccagtgcgagcaggaggaggaggtgctgaagaccatccaggacggcgacagcgacgagctgaccatcaagagattcatcgagggcaaggagaagcccggcgccctgtggcacatctacgccgccaaggacaccgagaagatcagagagttcctgaagaaggtgagcgaggagcagggccaggagaaccccgccgaccacgaccccatccacgaccagagctggtacctggacagaagcctgagaaagagactgcaccaggagtacggcgtgcagggctgggccatcgtgcagttcctgggcgacgtggtgttcatccccgccggcgccccccaccaggtgcacaacctgtacagctgcatcaaggtggccgaggacttcgtgagccccgagcacgtgaagcactgcttctggctgacccaggagttcagatacctgagccagacccacaccaaccacgaggacaagctgcaggtgaagaacgtgatctaccacgccgtgaaggacgccgtggccatgctgaaggtgaaccccgtgctggccaacctgaacctgcccgcccactggaagtag

SEQ ID NO: 87478 - DNA, 3810 bp, synthetic construct
  misc_feature 1..3810: note = Description of Artificial Sequence: Synthetic coding sequence
  source 1..3810: mol_type = other DNA
atggtgctgaccctgggcgagagctggcccgtgctggtgggcagaagattcctgagcctgagcgccgccgacggcagcgacggcagccacgacagctgggacgtggagagagtggccgagtggccctggctgagcggcaccatcagagccgtgagccacaccgacgtgaccaagaaggacctgaagacctacaagcccctgctggacaaggccggcctgggcagcatcaccagcgtgagattcctgggcgaccagcagagagtgttcctgagcaaggacctgctgaagcccatccaggacgtgaacagcctgagactgagcctgaccgacaaccagatcgtgagcaaggagttccaggccctgatcgtgaagcacctggacgagagccacctgctgaagggcgacaagaacctggtgggcagcgaggtgaagatctacagcctggaccccagcacccagtggttcagcgccaccgtgatcaacggcaaccccgccagcaagaccctgcaggtgaactgcgaggagatccccgccctgaagatcgtggaccccagcctgatccacgtggaggtggtgcacgacaacctggtgacctgcggcaacagcgccagaatcggcgccgtgaagagaaagagcagcgagaacaacggcaccctggtgagcaagcaggccaagagctgcagcgaggccagccccagcatgtgccccgtgcagagcgtgcccaccaccgtgttcaaggagatcctgctgggctgcaccgccgccaccccccccagcaaggaccccagacagcagagcaccccccaggccgccaacagcccccccaacctgggcgccaagatcccccagggctgccacaagcagagcctgcccgaggagatcagcagctgcctgaacaccaagagcgaggccctgagaaccaagcccgacgtgtgcaaggccggcctgctgagcaagagcagccagatcggcaccggcgacctgaagatcctgaccgagcccaagggcagctgcacccagcccaagaccaacaccgaccaggagaacagactggagagcgtgccccaggccctgaccggcctgcccaaggagtgcctgcccaccaaggccagcagcaaggccgagctggagatcgccaacccccccgagctgcagaagcacctggagcacgcccccagccccagcgacgtgagcaacgcccccgaggtgaaggccggcgtgaacagcgacagccccaacaactgcagcggcaagaaggtggagcccagcgccctggcctgcagaagccagaacctgaaggagagcagcgtgaaggtggacaacgagagctgctgcagcagaagcaacaacaagatccagaacgcccccagcagaaagagcgtgctgaccgaccccgccaagctgaagaagctgcagcagagcggcgaggccttcgtgcaggacgacagctgcgtgaacatcgtggcccagctgcccaagtgcagagagtgcagactggacagcctgagaaaggacaaggagcagcagaaggacagccccgtgttctgcagattcttccacttcagaagactgcagttcaacaagcacggcgtgctgagagtggagggcttcctgacccccaacaagtacgacaacgaggccatcggcctgtggctgcccctgaccaagaacgtggtgggcatcgacctggacaccgccaagtacatcctggccaacatcggcgaccacttctgccagatggtgatcagcgagaaggaggccatgagcaccatcgagccccacagacaggtggcctggaagagagccgtgaagggcgtgagagagatgtgcgacgtgtgcgacaccaccatcttcaacctgcactgggtgtgccccagatgcggcttcggcgtgtgcgtggactgctacagaatgaagagaaagaactgccagcagggcgccgcctacaagaccttcagctggctgaagtgcgtgaagagccagatccacgagcccgagaacctgatgcccacccagatcatccccggcaaggccctgtacgacgtgggcgacatcgtgcacagcgtgagagccaagtggggcatcaaggccaactgcccctgcagcaacagacagttcaagctgttcagcaagcccgccagcaaggaggacctgaagcagaccagcctggccggcgagaagcccaccctgggcgccgtgctgcagcagaaccccagcgtgctggagcccgccgccgtgggcggcgaggccgccagcaagcccgccggcagcatgaagcccgcctgccccgccagcaccagccccctgaactggctggccgacctgaccagcggcaacgtgaacaaggagaacaaggagaagcagcccaccatgcccatcctgaagaacgagatcaagtgcctgccccccctgccccccctgagcaagagcagcaccgtgctgcacaccttcaacagcaccatcctgacccccgtgagcaacaacaacagcggcttcctgagaaacctgctgaacagcagcaccggcaagaccgagaacggcctgaagaacacccccaagatcctggacgacatcttcgccagcctggtgcagaacaagaccaccagcgacctgagcaagagaccccagggcctgaccatcaagcccagcatcctgggcttcgacaccccccactactggctgtgcgacaacagactgctgtgcctgcaggaccccaacaacaagagcaactggaacgtgttcagagagtgctggaagcagggccagcccgtgatggtgagcggcgtgcaccacaagctgaacagcgagctgtggaagcccgagagcttcagaaaggagttcggcgagcaggaggtggacctggtgaactgcagaaccaacgagatcatcaccggcgccaccgtgggcgacttctgggacggcttcgaggacgtgcccaacagactgaagaacgagaaggagcccatggtgctgaagctgaaggactggccccccggcgaggacttcagagacatgatgcccagcagattcgacgacctgatggccaacatccccctgcccgagtacaccagaagagacggcaagctgaacctggccagcagactgcccaactacttcgtgagacccgacctgggccccaagatgtacaacgcctacggcctgatcacccccgaggacagaaagtacggcaccaccaacctgcacctggacgtgagcgacgccgccaacgtgatggtgtacgtgggcatccccaagggccagtgcgagcaggaggaggaggtgctgaagaccatccaggacggcgacagcgacgagctgaccatcaagagattcatcgagggcaaggagaagcccggcgccctgtggcacatctacgccgccaaggacaccgagaagatcagagagttcctgaagaaggtgagcgaggagcagggccaggagaaccccgccgaccacgaccccatccacgaccagagctggtacctggacagaagcctgagaaagagactgcaccaggagtacggcgtgcagggctgggccatcgtgcagttcctgggcgacgtggtgttcatccccgccggcgccccccaccaggtgcacaacctgtacagctgcatcaaggtggccgaggacttcgtgagccccgagcacgtgaagcactgcttctggctgacccaggagttcagatacctgagccagacccacaccaaccacgaggacaagctgcaggtgaagaacgtgatctaccacgccgtgaaggacgccgtggccatgctgaaggccagcgagagcagcttcggcaagccctag

SEQ ID NO: 87479 - DNA, 5286 bp, synthetic construct
  misc_feature 1..5286: note = Description of Artificial Sequence: Synthetic coding sequence
  source 1..5286: mol_type = other DNA
atggccgacgccgccgccagccccgtgggcaagagactgctgctgctgttcgccgacaccgccgccagcgccagcgccagcgcccccgccgccgccgccgccagcggcgaccccggccccgccctgagaaccagagcctggagagccggcaccgtgagagccatgagcggcgccgtgccccaggacctggccatcttcgtggagttcgacggctgcaactggaagcagcacagctgggtgaaggtgcacgccgaggaggtgatcgtgctgctgctggagggcagcctggtgtgggcccccagagaggaccccgtgctgctgcagggcatcagagtgagcatcgcccagtggcccgccctgaccttcacccccctggtggacaagctgggcctgggcagcgtggtgcccgtggagtacctgctggacagagagctgagattcctgagcgacgccaacggcctgcacctgttccagatgggcaccgacagccagaaccagatcctgctggagcacgccgccctgagagagaccgtgaacgccctgatcagcgaccagaagctgcaggagatcttcagcagaggcccctacagcgtgcagggccacagagtgaagatctaccagcccgagggcgaggagggctggctgtacggcgtggtgagccaccaggacagcatcaccagactgatggaggtgagcgtgaccgagagcggcgagatcaagagcgtggaccccagactgatccacgtgatgctgatggacaacagcgccccccagagcgagggcggcaccctgaaggccgtgaagagcagcaagggcaagaagaagagagagagcatcgagggcaaggacggcagaagaagaaagagcgccagcgacagcggctgcgaccccgccagcaagaagctgaagggcgacagaggcgaggtggacagcaacggcagcgacggcggcgaggccagcagaggcccctggaagggcggcaacgccagcggcgagcccggcctggaccagagagccaagcagccccccagcaccttcgtgccccagatcaacagaaacatcagattcgccacctacaccaaggagaacggcagaaccctggtggtgcaggacgagcccgtgggcggcgacacccccgccagcttcaccccctacagcaccgccaccggccagacccccctggcccccgaggtgggcggcgccgagaacaaggaggccggcaagaccctggagcaggtgggccagggcatcgtggccagcgccgccgtggtgaccaccgccagcagcacccccaacaccgtgagaatcagcgacaccggcctggccgccggcaccgtgcccgagaagcagaagggcagcagaagccaggccagcggcgagaacagcagaaacagcatcctggccagcagcggcttcggcgcccccctgcccagcagcagccagcccctgaccttcggcagcggcagaagccagagcaacggcgtgctggccaccgagaacaagcccctgggcttcagcttcggctgcagcagcgcccaggaggcccagaaggacaccgacctgagcaagaacctgttcttccagtgcatgagccagaccctgcccaccagcaactacttcaccaccgtgagcgagagcctggccgacgacagcagcagcagagacagcttcaagcagagcctggagagcctgagcagcggcctgtgcaagggcagaagcgtgctgggcaccgacaccaagcccggcagcaaggccggcagcagcgtggacagaaaggtgcccgccgagagcatgcccaccctgacccccgccttccccagaagcctgctgaacgccagaacccccgagaaccacgagaacctgttcctgcagccccccaagctgagcagagaggagcccagcaaccccttcctggccttcgtggagaaggtggagcacagccccttcagcagcttcgccagccaggccagcggcagcagcagcagcgccaccaccgtgaccagcaaggtggcccccagctggcccgagagccacagcagcgccgacagcgccagcctggccaagaagaagcccctgttcatcaccaccgacagcagcaagctggtgagcggcgtgctgggcagcgccctgaccagcggcggccccagcctgagcgccatgggcaacggcagaagcagcagccccaccagcagcctgacccagcccatcgagatgcccaccctgagcagcagccccaccgaggagagacccaccgtgggccccggccagcaggacaaccccctgctgaagaccttcagcaacgtgttcggcagacacagcggcggcttcctgagcagccccgccgacttcagccaggagaacaaggcccccttcgaggccgtgaagagattcagcctggacgagagaagcctggcctgcagacaggacagcgacagcagcaccaacagcgacctgagcgacctgagcgacagcgaggagcagctgcaggccaagaccggcctgaagggcatccccgagcacctgatgggcaagctgggccccaacggcgagagaagcgccgagctgctgctgggcaagagcaagggcaagcaggcccccaagggcagacccagaaccgcccccctgaaggtgggccagagcgtgctgaaggacgtgagcaaggtgaagaagctgaagcagagcggcgagcccttcctgcaggacggcagctgcatcaacgtggccccccacctgcacaagtgcagagagtgcagactggagagatacagaaagttcaaggagcaggagcaggacgacagcaccgtggcctgcagattcttccacttcagaagactgatcttcaccagaaagggcgtgctgagagtggagggcttcctgagcccccagcagagcgaccccgacgccatgaacctgtggatccccagcagcagcctggccgagggcatcgacctggagaccagcaagtacatcctggccaacgtgggcgaccagttctgccagctggtgatgagcgagaaggaggccatgatgatggtggagccccaccagaaggtggcctggaagagagccgtgagaggcgtgagagagatgtgcgacgtgtgcgagaccaccctgttcaacatccactgggtgtgcagaaagtgcggcttcggcgtgtgcctggactgctacagactgagaaagagcagacccagaagcgagaccgaggagatgggcgacgaggaggtgttcagctggctgaagtgcgccaagggccagagccacgagcccgagaacctgatgcccacccagatcatccccggcaccgccctgtacaacatcggcgacatggtgcacgccgccagaggcaagtggggcatcaaggccaactgcccctgcatcagcagacagaacaagagcgtgctgagacccgccgtgaccaacggcatgagccagctgcccagcatcaaccccagcgccagcagcggcaacgagaccaccttcagcggcggcggcggccccgcccccgtgaccacccccgagcccgaccacgtgcccaaggccgacagcaccgacatcagaagcgaggagcccctgaagaccgacagcagcgccagcaacagcaacagcgagctgaaggccatcagacccccctgccccgacaccgccccccccagcagcgccctgcactggctggccgacctggccacccagaaggccaaggaggagaccaaggaggccggcagcctgagaagcgtgctgaacaaggagagccacagccccttcggcctggacagcttcaacagcaccgccaaggtgagccccctgacccccaagctgttcaacagcctgctgctgggccccaccgccagcaacaacaagaccgagggcagcagcctgagagacctgctgcacagcggccccggcaagctgccccagacccccctggacaccggcatccccttcccccccgtgttcagcaccagcagcgccggcgtgaagagcaaggccagcctgcccaacttcctggaccacatcatcgccagcgtggtggagaacaagaagaccagcgacgccagcaagagagcctgcaacctgaccgacacccagaaggaggtgaaggagatggtgatgggcctgaacgtgctggacccccacaccagccacagctggctgtgcgacggcagactgctgtgcctgcacgaccccagcaacaagaacaactggaagatcttcagagagtgctggaagcagggccagcccgtgctggtgagcggcgtgcacaagaagctgaagagcgagctgtggaagcccgaggccttcagccaggagttcggcgaccaggacgtggacctggtgaactgcagaaactgcgccatcatcagcgacgtgaaggtgagagacttctgggacggcttcgagatcatctgcaagagactgagaagcgaggacggccagcccatggtgctgaagctgaaggactggccccccggcgaggacttcagagacatgatgcccaccagattcgaggacctgatggagaacctgcccctgcccgagtacaccaagagagacggcagactgaacctggccagcagactgcccagctacttcgtgagacccgacctgggccccaagatgtacaacgcctacggcctgatcaccgccgaggacagaagagtgggcaccaccaacctgcacctggacgtgagcgacgccgtgaacgtgatggtgtacgtgggcatccccatcggcgagggcgcccacgacgaggaggtgctgaagaccatcgacgagggcgacgccgacgaggtgaccaagcagagaatccacgacggcaaggagaagcccggcgccctgtggcacatctacgccgccaaggacgccgagaagatcagagagctgctgagaaaggtgggcgaggagcagggccaggagaacccccccgaccacgaccccatccacgaccagagctggtacctggaccagaccctgagaaagagactgtacgaggagtacggcgtgcagggctgggccatcgtgcagttcctgggcgacgccgtgttcatccccgccggcgccccccaccaggtgcacaacctgtacagctgcatcaaggtggccgaggacttcgtgagccccgagcacgtgaagcactgcttcagactgacccaggagttcagacacctgagcaacacccacaccaaccacgaggacaagctgcaggtgaagaacatcatctaccacgccgtgaaggacgccgtgggcaccctgaaggcccacgagagcaagctggccagaagctag

SEQ ID NO: 87480 - DNA, 4254 bp, synthetic construct
  misc_feature 1..4254: note = Description of Artificial Sequence: Synthetic coding sequence
  source 1..4254: mol_type = other DNA
atgggcgccatggagatcaacagaaacatcagattcgccacctacaccaaggagaacggcagaaccctggtggtgcaggacgagcccgtgggcggcgacacccccgccagcttcaccccctacagcaccgccaccggccagacccccctggcccccgaggtgggcggcgccgagaacaaggaggccggcaagaccctggagcaggtgggccagggcatcgtggccagcgccgccgtggtgaccaccgccagcagcacccccaacaccgtgagaatcagcgacaccggcctggccgccggcaccgtgcccgagaagcagaagggcagcagaagccaggccagcggcgagaacagcagaaacagcatcctggccagcagcggcttcggcgcccccctgcccagcagcagccagcccctgaccttcggcagcggcagaagccagagcaacggcgtgctggccaccgagaacaagcccctgggcttcagcttcggctgcagcagcgcccaggaggcccagaaggacaccgacctgagcaagaacctgttcttccagtgcatgagccagaccctgcccaccagcaactacttcaccaccgtgagcgagagcctggccgacgacagcagcagcagagacagcttcaagcagagcctggagagcctgagcagcggcctgtgcaagggcagaagcgtgctgggcaccgacaccaagcccggcagcaaggccggcagcagcgtggacagaaaggtgcccgccgagagcatgcccaccctgacccccgccttccccagaagcctgctgaacgccagaacccccgagaaccacgagaacctgttcctgcagccccccaagctgagcagagaggagcccagcaaccccttcctggccttcgtggagaaggtggagcacagccccttcagcagcttcgccagccaggccagcggcagcagcagcagcgccaccaccgtgaccagcaaggtggcccccagctggcccgagagccacagcagcgccgacagcgccagcctggccaagaagaagcccctgttcatcaccaccgacagcagcaagctggtgagcggcgtgctgggcagcgccctgaccagcggcggccccagcctgagcgccatgggcaacggcagaagcagcagccccaccagcagcctgacccagcccatcgagatgcccaccctgagcagcagccccaccgaggagagacccaccgtgggccccggccagcaggacaaccccctgctgaagaccttcagcaacgtgttcggcagacacagcggcggcttcctgagcagccccgccgacttcagccaggagaacaaggcccccttcgaggccgtgaagagattcagcctggacgagagaagcctggcctgcagacaggacagcgacagcagcaccaacagcgacctgagcgacctgagcgacagcgaggagcagctgcaggccaagaccggcctgaagggcatccccgagcacctgatgggcaagctgggccccaacggcgagagaagcgccgagctgctgctgggcaagagcaagggcaagcaggcccccaagggcagacccagaaccgcccccctgaaggtgggccagagcgtgctgaaggacgtgagcaaggtgaagaagctgaagcagagcggcgagcccttcctgcaggacggcagctgcatcaacgtggccccccacctgcacaagtgcagagagtgcagactggagagatacagaaagttcaaggagcaggagcaggacgacagcaccgtggcctgcagattcttccacttcagaagactgatcttcaccagaaagggcgtgctgagagtggagggcttcctgagcccccagcagagcgaccccgacgccatgaacctgtggatccccagcagcagcctggccgagggcatcgacctggagaccagcaagtacatcctggccaacgtgggcgaccagttctgccagctggtgatgagcgagaaggaggccatgatgatggtggagccccaccagaaggtggcctggaagagagccgtgagaggcgtgagagagatgtgcgacgtgtgcgagaccaccctgttcaacatccactgggtgtgcagaaagtgcggcttcggcgtgtgcctggactgctacagactgagaaagagcagacccagaagcgagaccgaggagatgggcgacgaggaggtgttcagctggctgaagtgcgccaagggccagagccacgagcccgagaacctgatgcccacccagatcatccccggcaccgccctgtacaacatcggcgacatggtgcacgccgccagaggcaagtggggcatcaaggccaactgcccctgcatcagcagacagaacaagagcgtgctgagacccgccgtgaccaacggcatgagccagctgcccagcatcaaccccagcgccagcagcggcaacgagaccaccttcagcggcggcggcggccccgcccccgtgaccacccccgagcccgaccacgtgcccaaggccgacagcaccgacatcagaagcgaggagcccctgaagaccgacagcagcgccagcaacagcaacagcgagctgaaggccatcagacccccctgccccgacaccgccccccccagcagcgccctgcactggctggccgacctggccacccagaaggccaaggaggagaccaaggaggccggcagcctgagaagcgtgctgaacaaggagagccacagccccttcggcctggacagcttcaacagcaccgccaaggtgagccccctgacccccaagctgttcaacagcctgctgctgggccccaccgccagcaacaacaagaccgagggcagcagcctgagagacctgctgcacagcggccccggcaagctgccccagacccccctggacaccggcatccccttcccccccgtgttcagcaccagcagcgccggcgtgaagagcaaggccagcctgcccaacttcctggaccacatcatcgccagcgtggtggagaacaagaagaccagcgacgccagcaagagagcctgcaacctgaccgacacccagaaggaggtgaaggagatggtgatgggcctgaacgtgctggacccccacaccagccacagctggctgtgcgacggcagactgctgtgcctgcacgaccccagcaacaagaacaactggaagatcttcagagagtgctggaagcagggccagcccgtgctggtgagcggcgtgcacaagaagctgaagagcgagctgtggaagcccgaggccttcagccaggagttcggcgaccaggacgtggacctggtgaactgcagaaactgcgccatcatcagcgacgtgaaggtgagagacttctgggacggcttcgagatcatctgcaagagactgagaagcgaggacggccagcccatggtgctgaagctgaaggactggccccccggcgaggacttcagagacatgatgcccaccagattcgaggacctgatggagaacctgcccctgcccgagtacaccaagagagacggcagactgaacctggccagcagactgcccagctacttcgtgagacccgacctgggccccaagatgtacaacgcctacggcctgatcaccgccgaggacagaagagtgggcaccaccaacctgcacctggacgtgagcgacgccgtgaacgtgatggtgtacgtgggcatccccatcggcgagggcgcccacgacgaggaggtgctgaagaccatcgacgagggcgacgccgacgaggtgaccaagcagagaatccacgacggcaaggagaagcccggcgccctgtggcacatctacgccgccaaggacgccgagaagatcagagagctgctgagaaaggtgggcgaggagcagggccaggagaacccccccgaccacgaccccatccacgaccagagctggtacctggaccagaccctgagaaagagactgtacgaggagtacggcgtgcagggctgggccatcgtgcagttcctgggcgacgccgtgttcatccccgccggcgccccccaccaggtgcacaacctgtacagctgcatcaaggtggccgaggacttcgtgagccccgagcacgtgaagcactgcttcagactgacccaggagttcagacacctgagcaacacccacaccaaccacgaggacaagctgcaggtgaagaacatcatctaccacgccgtgaaggacgccgtgggcaccctgaaggcccacgagagcaagctggccagaagctag

SEQ ID NO: 87481 - DNA, 2382 bp, synthetic construct
  misc_feature 1..2382: note = Description of Artificial Sequence: Synthetic coding sequence
  source 1..2382: mol_type = other DNA
atgaacctgtggatccccagcagcagcctggccgagggcatcgacctggagaccagcaagtacatcctggccaacgtgggcgaccagttctgccagctggtgatgagcgagaaggaggccatgatgatggtggagccccaccagaaggtggcctggaagagagccgtgagaggcgtgagagagatgtgcgacgtgtgcgagaccaccctgttcaacatccactgggtgtgcagaaagtgcggcttcggcgtgtgcctggactgctacagactgagaaagagcagacccagaagcgagaccgaggagatgggcgacgaggaggtgttcagctggctgaagtgcgccaagggccagagccacgagcccgagaacctgatgcccacccagatcatccccggcaccgccctgtacaacatcggcgacatggtgcacgccgccagaggcaagtggggcatcaaggccaactgcccctgcatcagcagacagaacaagagcgtgctgagacccgccgtgaccaacggcatgagccagctgcccagcatcaaccccagcgccagcagcggcaacgagaccaccttcagcggcggcggcggccccgcccccgtgaccacccccgagcccgaccacgtgcccaaggccgacagcaccgacatcagaagcgaggagcccctgaagaccgacagcagcgccagcaacagcaacagcgagctgaaggccatcagacccccctgccccgacaccgccccccccagcagcgccctgcactggctggccgacctggccacccagaaggccaaggaggagaccaaggaggccggcagcctgagaagcgtgctgaacaaggagagccacagccccttcggcctggacagcttcaacagcaccgccaaggtgagccccctgacccccaagctgttcaacagcctgctgctgggccccaccgccagcaacaacaagaccgagggcagcagcctgagagacctgctgcacagcggccccggcaagctgccccagacccccctggacaccggcatccccttcccccccgtgttcagcaccagcagcgccggcgtgaagagcaaggccagcctgcccaacttcctggaccacatcatcgccagcgtggtggagaacaagaagaccagcgacgccagcaagagagcctgcaacctgaccgacacccagaaggaggtgaaggagatggtgatgggcctgaacgtgctggacccccacaccagccacagctggctgtgcgacggcagactgctgtgcctgcacgaccccagcaacaagaacaactggaagatcttcagagagtgctggaagcagggccagcccgtgctggtgagcggcgtgcacaagaagctgaagagcgagctgtggaagcccgaggccttcagccaggagttcggcgaccaggacgtggacctggtgaactgcagaaactgcgccatcatcagcgacgtgaaggtgagagacttctgggacggcttcgagatcatctgcaagagactgagaagcgaggacggccagcccatggtgctgaagctgaaggactggccccccggcgaggacttcagagacatgatgcccaccagattcgaggacctgatggagaacctgcccctgcccgagtacaccaagagagacggcagactgaacctggccagcagactgcccagctacttcgtgagacccgacctgggccccaagatgtacaacgcctacggcctgatcaccgccgaggacagaagagtgggcaccaccaacctgcacctggacgtgagcgacgccgtgaacgtgatggtgtacgtgggcatccccatcggcgagggcgcccacgacgaggaggtgctgaagaccatcgacgagggcgacgccgacgaggtgaccaagcagagaatccacgacggcaaggagaagcccggcgccctgtggcacatctacgccgccaaggacgccgagaagatcagagagctgctgagaaaggtgggcgaggagcagggccaggagaacccccccgaccacgaccccatccacgaccagagctggtacctggaccagaccctgagaaagagactgtacgaggagtacggcgtgcagggctgggccatcgtgcagttcctgggcgacgccgtgttcatccccgccggcgccccccaccaggtgcacaacctgtacagctgcatcaaggtggccgaggacttcgtgagccccgagcacgtgaagcactgcttcagactgacccaggagttcagacacctgagcaacacccacaccaaccacgaggacaagctgcaggtgaagaacatcatctaccacgccgtgaaggacgccgtgggcaccctgaaggcccacgagagcaagctggccagaagctag

SEQ ID NO: 87482 - DNA, 4656 bp, synthetic construct
  misc_feature 1..4656: note = Description of Artificial Sequence: Synthetic coding sequence
  source 1..4656: mol_type = other DNA
ggctggagatggctgtacggcgtggtgagccaccaggacagcatcaccagactgatggaggtgagcgtgaccgagagcggcgagatcaagagcgtggaccccagactgatccacgtgatgctgatggacaacagcgccccccagagcgagggcggcaccctgaaggccgtgaagagcagcaagggcaagaagaagagagagagcatcgagggcaaggacggcagaagaagaaagagcgccagcgacagcggctgcgaccccgccagcaagaagctgaagggcgacagaggcgaggtggacagcaacggcagcgacggcggcgaggccagcagaggcccctggaagggcggcaacgccagcggcgagcccggcctggaccagagagccaagcagccccccagcaccttcgtgccccagatcaacagaaacatcagattcgccacctacaccaaggagaacggcagaaccctggtggtgcaggacgagcccgtgggcggcgacacccccgccagcttcaccccctacagcaccgccaccggccagacccccctggcccccgaggtgggcggcgccgagaacaaggaggccggcaagaccctggagcaggtgggccagggcatcgtggccagcgccgccgtggtgaccaccgccagcagcacccccaacaccgtgagaatcagcgacaccggcctggccgccggcaccgtgcccgagaagcagaagggcagcagaagccaggccagcggcgagaacagcagaaacagcatcctggccagcagcggcttcggcgcccccctgcccagcagcagccagcccctgaccttcggcagcggcagaagccagagcaacggcgtgctggccaccgagaacaagcccctgggcttcagcttcggctgcagcagcgcccaggaggcccagaaggacaccgacctgagcaagaacctgttcttccagtgcatgagccagaccctgcccaccagcaactacttcaccaccgtgagcgagagcctggccgacgacagcagcagcagagacagcttcaagcagagcctggagagcctgagcagcggcctgtgcaagggcagaagcgtgctgggcaccgacaccaagcccggcagcaaggccggcagcagcgtggacagaaaggtgcccgccgagagcatgcccaccctgacccccgccttccccagaagcctgctgaacgccagaacccccgagaaccacgagaacctgttcctgcagccccccaagctgagcagagaggagcccagcaaccccttcctggccttcgtggagaaggtggagcacagccccttcagcagcttcgccagccaggccagcggcagcagcagcagcgccaccaccgtgaccagcaaggtggcccccagctggcccgagagccacagcagcgccgacagcgccagcctggccaagaagaagcccctgttcatcaccaccgacagcagcaagctggtgagcggcgtgctgggcagcgccctgaccagcggcggccccagcctgagcgccatgggcaacggcagaagcagcagccccaccagcagcctgacccagcccatcgagatgcccaccctgagcagcagccccaccgaggagagacccaccgtgggccccggccagcaggacaaccccctgctgaagaccttcagcaacgtgttcggcagacacagcggcggcttcctgagcagccccgccgacttcagccaggagaacaaggcccccttcgaggccgtgaagagattcagcctggacgagagaagcctggcctgcagacaggacagcgacagcagcaccaacagcgacctgagcgacctgagcgacagcgaggagcagctgcaggccaagaccggcctgaagggcatccccgagcacctgatgggcaagctgggccccaacggcgagagaagcgccgagctgctgctgggcaagagcaagggcaagcaggcccccaagggcagacccagaaccgcccccctgaaggtgggccagagcgtgctgaaggacgtgagcaaggtgaagaagctgaagcagagcggcgagcccttcctgcaggacggcagctgcatcaacgtggccccccacctgcacaagtgcagagagtgcagactggagagatacagaaagttcaaggagcaggagcaggacgacagcaccgtggcctgcagattcttccacttcagaagactgatcttcaccagaaagggcgtgctgagagtggagggcttcctgagcccccagcagagcgaccccgacgccatgaacctgtggatccccagcagcagcctggccgagggcatcgacctggagaccagcaagtacatcctggccaacgtgggcgaccagttctgccagctggtgatgagcgagaaggaggccatgatgatggtggagccccaccagaaggtggcctggaagagagccgtgagaggcgtgagagagatgtgcgacgtgtgcgagaccaccctgttcaacatccactgggtgtgcagaaagtgcggcttcggcgtgtgcctggactgctacagactgagaaagagcagacccagaagcgagaccgaggagatgggcgacgaggaggtgttcagctggctgaagtgcgccaagggccagagccacgagcccgagaacctgatgcccacccagatcatccccggcaccgccctgtacaacatcggcgacatggtgcacgccgccagaggcaagtggggcatcaaggccaactgcccctgcatcagcagacagaacaagagcgtgctgagacccgccgtgaccaacggcatgagccagctgcccagcatcaaccccagcgccagcagcggcaacgagaccaccttcagcggcggcggcggccccgcccccgtgaccacccccgagcccgaccacgtgcccaaggccgacagcaccgacatcagaagcgaggagcccctgaagaccgacagcagcgccagcaacagcaacagcgagctgaaggccatcagacccccctgccccgacaccgccccccccagcagcgccctgcactggctggccgacctggccacccagaaggccaaggaggagaccaaggaggccggcagcctgagaagcgtgctgaacaaggagagccacagccccttcggcctggacagcttcaacagcaccgccaaggtgagccccctgacccccaagctgttcaacagcctgctgctgggccccaccgccagcaacaacaagaccgagggcagcagcctgagagacctgctgcacagcggccccggcaagctgccccagacccccctggacaccggcatccccttcccccccgtgttcagcaccagcagcgccggcgtgaagagcaaggccagcctgcccaacttcctggaccacatcatcgccagcgtggtggagaacaagaagaccagcgacgccagcaagagagcctgcaacctgaccgacacccagaaggaggtgaaggagatggtgatgggcctgaacgtgctggacccccacaccagccacagctggctgtgcgacggcagactgctgtgcctgcacgaccccagcaacaagaacaactggaagatcttcagagagtgctggaagcagggccagcccgtgctggtgagcggcgtgcacaagaagctgaagagcgagctgtggaagcccgaggccttcagccaggagttcggcgaccaggacgtggacctggtgaactgcagaaactgcgccatcatcagcgacgtgaaggtgagagacttctgggacggcttcgagatcatctgcaagagactgagaagcgaggacggccagcccatggtgctgaagctgaaggactggccccccggcgaggacttcagagacatgatgcccaccagattcgaggacctgatggagaacctgcccctgcccgagtacaccaagagagacggcagactgaacctggccagcagactgcccagctacttcgtgagacccgacctgggccccaagatgtacaacgcctacggcctgatcaccgccgaggacagaagagtgggcaccaccaacctgcacctggacgtgagcgacgccgtgaacgtgatggtgtacgtgggcatccccatcggcgagggcgcccacgacgaggaggtgctgaagaccatcgacgagggcgacgccgacgaggtgaccaagcagagaatccacgacggcaaggagaagcccggcgccctgtggcacatctacgccgccaaggacgccgagaagatcagagagctgctgagaaaggtgggcgaggagcagggccaggagaacccccccgaccacgaccccatccacgaccagagctggtacctggaccagaccctgagaaagagactgtacgaggagtacggcgtgcagggctgggccatcgtgcagttcctgggcgacgccgtgttcatccccgccggcgccccccaccaggtgcacaacctgtacagctgcatcaaggtggccgaggacttcgtgagccccgagcacgtgaagcactgcttcagactgacccaggagttcagacacctgagcaacacccacaccaaccacgaggacaagctgcaggtgaagaacatcatctaccacgccgtgaaggacgccgtgggcaccctgaaggcccacgagagcaagctggccagaagctag

SEQ ID NO: 87483 - DNA, 2148 bp, synthetic construct
  misc_feature 1..2148: note = Description of Artificial Sequence: Synthetic coding sequence
  source 1..2148: mol_type = other DNA
atggccggcgtgggccccggcggctacgccgccgagttcgtgcccccccccgagtgccccgtgttcgagcccagctgggaggagttcaccgaccccctgagcttcatcggcagaatcagacccctggccgagaagaccggcatctgcaagatcagaccccccaaggagtacgccctgagcggctggaacctgaacaacatgcccgtgctggagcagagcgtgctggcccacatcaacgtggacatcagcggcatgaaggtgccctggctgtacgtgggcatgtgcttcagcagcttctgctggcacatcgaggaccactggagctacagcatcaactacctgcactggggcgagcccaagacctggtacggcgtgcccagccacgccgccgagcagctggaggaggtgatgagagagctggcccccgagctgttcgagagccagcccgacctgctgcaccagctggtgaccatcatgaaccccaacgtgctgatggagcacggcgtgcccgtgtacagaaccaaccagtgcgccggcgagttcgtggtgaccttccccagagcctaccacagcggcttcaaccagggctacaacttcgccgaggccgtgaacttctgcaccgccgactggctgcccatcggcagacagtgcgtgaaccactacagaagactgagaagacactgcgtgttcagccacgaggagctgatcttcaagatggccgccgaccccgagtgcctggacgtgggcctggccgccatggtgtgcaaggagctgaccctgatgaccgaggaggagaccagactgagagagagcgtggtgcagatgggcgtgctgatgagcgaggaggaggtgttcgagctggtgcccgacgacgagagacagtgcagcgcctgcagaaccacctgcttcctgagcgccctgacctgcagctgcaaccccgagagactggtgtgcctgtaccaccccaccgacctgtgcccctgccccatgcagaagaagtgcctgagatacagataccccctggaggacctgcccagcctgctgtacggcgtgaaggtgagagcccagagctacgacacctgggtgagcagagtgaccgaggccctgagcgccaacttcaaccacaagaaggacctgatcgagctgagagtgatgctggaggacgccgaggacagaaagtaccccgagaacgacctgttcagaaagctgagagacgccgtgaaggaggccgagacctgcgccagcgtggcccagctgctgctgagcaagaagcagaagcacagacagagccccgacagcggcagaaccagaaccaagctgaccgtggaggagctgaaggccttcgtgcagcagctgttcagcctgccctgcgtgatcagccaggccagacaggtgaagaacctgctggacgacgtggaggagttccacgagagagcccaggaggccatgatggacgagacccccgacagcagcaagctgcagatgctgatcgacatgggcagcagcctgtacgtggagctgcccgagctgcccagactgaagcaggagctgcagcaggccagatggctggacgaggtgagactgaccctgagcgacccccagcaggtgaccctggacgtgatgaagaagctgatcgacagcggcgtgggcctggccccccaccacgccgtggagaaggccatggccgagctgcaggagctgctgaccgtgagcgagagatgggaggagaaggccaaggtgtgcctgcaggccagacccagacacagcgtggccagcctggagagcatcgtgaacgaggccaagaacatccccgccttcctgcccaacgtgctgagcctgaaggaggccctgcagaaggccagagagtggaccgccaaggtggaggccatccagagcggcagcaactacgcctacctggagcagctggagagcctgagcgccaagggcagacccatccccgtgagactggaggccctgccccaggtggagagccaggtggccgccgccagagcctggagagagagaaccggcagaaccttcctgaagaagaacagcagccacaccctgctgcaggtgctgagccccagaaccgacatcggcgtgtacggcagcggcaagaacagaagaaagaaggtgaaggagctgtag

SEQ ID NO: 87484 - DNA, 4911 bp, synthetic construct
  misc_feature 1..4911: note = Description of Artificial Sequence: Synthetic coding sequence
  source 1..4911: mol_type = other DNA
atggccggcgtgggccccggcggctacgccgccgagttcgtgcccccccccgagtgccccgtgttcgagcccagctgggaggagttcaccgaccccctgagcttcatcggcagaatcagacccctggccgagaagaccggcatctgcaagatcagaccccccaaggactggcagccccccttcgcctgcgaggtgaagagcttcagattcacccccagagtgcagagactgaacgagctggaggccatgaccagagtgagactggacttcctggaccagctggccaagttctgggagctgcagggcagcaccctgaagatccccgtggtggagagaaagatcctggacctgtacgccctgagcaagatcgtggccagcaagggcggcttcgagatggtgaccaaggagaagaagtggagcaaggtgggcagcagactgggctacctgcccggcaagggcaccggcagcctgctgaagagccactacgagagaatcctgtacccctacgagctgttccagagcggcgtgagcctgatgggcgtgcagatgcccaacctggacctgaaggagaaggtggagcccgaggtgctgagcaccgacacccagaccagccccgagcccggcaccagaatgaacatcctgcccaagagaaccagaagagtgaagacccagagcgagagcggcgacgtgagcagaaacaccgagctgaagaagctgcagatcttcggcgccggccccaaggtggtgggcctggccatgggcaccaaggacaaggaggacgaggtgaccagaagaagaaaggtgaccaacagaagcgacgccttcaacatgcagatgagacagagaaagggcaccctgagcgtgaacttcgtggacctgtacgtgtgcatgttctgcggcagaggcaacaacgaggacaagctgctgctgtgcgacggctgcgacgacagctaccacaccttctgcctgatcccccccctgcccgacgtgcccaagggcgactggagatgccccaagtgcgtggccgaggagtgcagcaagcccagagaggccttcggcttcgagcaggccgtgagagagtacaccctgcagagcttcggcgagatggccgacaacttcaagagcgactacttcaacatgcccgtgcacatggtgcccaccgagctggtggagaaggagttctggagactggtgagcagcatcgaggaggacgtgatcgtggagtacggcgccgacatcagcagcaaggacttcggcagcggcttccccgtgaaggacggcagaagaaagatcctgcccgaggaggaggagtacgccctgagcggctggaacctgaacaacatgcccgtgctggagcagagcgtgctggcccacatcaacgtggacatcagcggcatgaaggtgccctggctgtacgtgggcatgtgcttcagcagcttctgctggcacatcgaggaccactggagctacagcatcaactacctgcactggggcgagcccaagacctggtacggcgtgcccagccacgccgccgagcagctggaggaggtgatgagagagctggcccccgagctgttcgagagccagcccgacctgctgcaccagctggtgaccatcatgaaccccaacgtgctgatggagcacggcgtgcccgtgtacagaaccaaccagtgcgccggcgagttcgtggtgaccttccccagagcctaccacagcggcttcaaccagggctacaacttcgccgaggccgtgaacttctgcaccgccgactggctgcccatcggcagacagtgcgtgaaccactacagaagactgagaagacactgcgtgttcagccacgaggagctgatcttcaagatggccgccgaccccgagtgcctggacgtgggcctggccgccatggtgtgcaaggagctgaccctgatgaccgaggaggagaccagactgagagagagcgtggtgcagatgggcgtgctgatgagcgaggaggaggtgttcgagctggtgcccgacgacgagagacagtgcagcgcctgcagaaccacctgcttcctgagcgccctgacctgcagctgcaaccccgagagactggtgtgcctgtaccaccccaccgacctgtgcccctgccccatgcagaagaagtgcctgagatacagataccccctggaggacctgcccagcctgctgtacggcgtgaaggtgagagcccagagctacgacacctgggtgagcagagtgaccgaggccctgagcgccaacttcaaccacaagaaggacctgatcgagctgagagtgatgctggaggacgccgaggacagaaagtaccccgagaacgacctgttcagaaagctgagagacgccgtgaaggaggccgagacctgcgccagcgtggcccagctgctgctgagcaagaagcagaagcacagacagagccccgacagcggcagaaccagaaccaagctgaccgtggaggagctgaaggccttcgtgcagcagctgttcagcctgccctgcgtgatcagccaggccagacaggtgaagaacctgctggacgacgtggaggagttccacgagagagcccaggaggccatgatggacgagacccccgacagcagcaagctgcagatgctgatcgacatgggcagcagcctgtacgtggagctgcccgagctgcccagactgaagcaggagctgcagcaggccagatggctggacgaggtgagactgaccctgagcgacccccagcaggtgaccctggacgtgatgaagaagctgatcgacagcggcgtgggcctggccccccaccacgccgtggagaaggccatggccgagctgcaggagctgctgaccgtgagcgagagatgggaggagaaggccaaggtgtgcctgcaggccagacccagacacagcgtggccagcctggagagcatcgtgaacgaggccaagaacatccccgccttcctgcccaacgtgctgagcctgaaggaggccctgcagaaggccagagagtggaccgccaaggtggaggccatccagagcggcagcaactacgcctacctggagcagctggagagcctgagcgccaagggcagacccatccccgtgagactggaggccctgccccaggtggagagccaggtggccgccgccagagcctggagagagagaaccggcagaaccttcctgaagaagaacagcagccacaccctgctgcaggtgctgagccccagaaccgacatcggcgtgtacggcagcggcaagaacagaagaaagaaggtgaaggagctgatcgagaaggagaaggagaaggacctggacctggagcccctgagcgacctggaggagggcctggaggagaccagagacaccgccatggtggtggccgtgttcaaggagagagagcagaaggagatcgaggccatgcacagcctgagagccgccaacctggccaagatgaccatggtggacagaatcgaggaggtgaagttctgcatctgcagaaagaccgccagcggcttcatgctgcagtgcgagctgtgcaaggactggttccacaacagctgcgtgcccctgcccaagagcagcagccagaagaagggcagcagctggcaggccaaggaggtgaagttcctgtgccccctgtgcatgagaagcagaagacccagactggagaccatcctgagcctgctggtgagcctgcagaagctgcccgtgagactgcccgagggcgaggccctgcagtgcctgaccgagagagccatgagctggcaggacagagccagacaggccctggccaccgacgagctgagcagcgccctggccaagctgagcgtgctgagccagagaatggtggagcaggccgccagagagaagaccgagaagatcatcagcgccgagctgcagaaggccgccgccaaccccgacctgcagggccacctgcccagcttccagcagagcgccttcaacagagtggtgagcagcgtgagcagcagccccagacagaccatggactacgacgacgaggagaccgacagcgacgaggacatcagagagacctacggctacgacatgaaggacaccgccagcgtgaagagcagcagcagcctggagcccaacctgttctgcgacgaggagatccccatcaagagcgaggaggtggtgacccacatgtggaccgcccccagcttctgcgccgagcacgcctacagcagcgccagcaagagctgcagccagggcagcagcacccccagaaagcagcccagaaagagccccctggtgcccagaagcctggagccccccgtgctggagctgagccccggcgccaaggcccagctggaggagctgatgatggtgggcgacctgctggaggtgagcctggacgagacccagcacatctggagaatcctgcaggccacccacccccccagcgaggacagattcctgcacatcatggaggacgacagcatggaggagaagcccctgaaggtgaagggcaaggacagcagcgagaagaagagaaagagaaagctggagaaggtggagcagctgttcggcgagggcaagcagaagagcaaggagctgaagaagatggacaagcccagaaagaagaagctgaagctgggcgccgacaagagcaaggagctgaacaagctggccaagaagctggccaaggaggaggagagaaagaagaagaaggagaaggccgccgccgccaaggtggagctggtgaaggagagcaccgagaagaagagagagaagaaggtgctggacatccccagcaagtacgactggagcggcgccgaggagagcgacgacgagaacgccgtgtgcgccgcccagaactgccagagaccctgcaaggacaagggcgtggtgttcgtgaccgaggaggagaagaacaagaagtactag

SEQ ID NO: 87485 - DNA, 3150 bp, synthetic construct
  misc_feature 1..3150: note = Description of Artificial Sequence: Synthetic coding sequence
  source 1..3150: mol_type = other DNA
atggccggcgtgggccccggcggctacgccgccgagttcgtgcccccccccgagtgccccgtgttcgagcccagctgggaggagttcaccgaccccctgagcttcatcggcagaatcagacccctggccgagaagaccggcatctgcaagatcagaccccccaaggactggcagccccccttcgcctgcgaggtgaagagcttcagattcacccccagagtgcagagactgaacgagctggagatcgtggccagcaagggcggcttcgagatggtgaccaaggagaagaagtggagcaaggtgggcagcagactgggctacctgcccggcaagggcaccggcagcctgctgaagagccactacgagagaatcctgtacccctacgagctgttccagagcggcgtgagcctgatgggcgtgcagatgcccaacctggacctgaaggagaaggtggagcccgaggtgctgagcaccgacacccagaccagccccgagcccggcaccagaatgaacatcctgcccaagagaaccagaagagtgaagacccagagcgagagcggcgacgtgagcagaaacaccgagctgaagaagctgcagatcttcggcgccggccccaaggtggtgggcctggccatgggcaccaaggacaaggaggacgaggtgaccagaagaagaaaggtgaccaacagaagcgacgccttcaacatgcagatgagacagagaaagggcaccctgagcgtgaacttcgtggacctgtacgtgtgcatgttctgcggcagaggcaacaacgaggacaagctgctgctgtgcgacggctgcgacgacagctaccacaccttctgcctgatcccccccctgcccgacgtgcccaagggcgactggagatgccccaagtgcgtggccgaggagtgcagcaagcccagagaggccttcggcttcgagcaggccgtgagagagtacaccctgcagagcttcggcgagatggccgacaacttcaagagcgactacttcaacatgcccgtgcacatggtgcccaccgagctggtggagaaggagttctggagactggtgagcagcatcgaggaggacgtgatcgtggagtacggcgccgacatcagcagcaaggacttcggcagcggcttccccgtgaaggacggcagaagaaagatcctgcccgaggaggaggagtacgccctgagcggctggaacctgaacaacatgcccgtgctggagcagagcgtgctggcccacatcaacgtggacatcagcggcatgaaggtgccctggctgtacgtgggcatgtgcttcagcagcttctgctggcacatcgaggaccactggagctacagcatcaactacctgcactggggcgagcccaagacctggtacggcgtgcccagccacgccgccgagcagctggaggaggtgatgagagagctggcccccgagctgttcgagagccagcccgacctgctgcaccagctggtgaccatcatgaaccccaacgtgctgatggagcacggcgtgcccgtgtacagaaccaaccagtgcgccggcgagttcgtggtgaccttccccagagcctaccacagcggcttcaaccagggctacaacttcgccgaggccgtgaacttctgcaccgccgactggctgcccatcggcagacagtgcgtgaaccactacagaagactgagaagacactgcgtgttcagccacgaggagctgatcttcaagatggccgccgaccccgagtgcctggacgtgggcctggccgccatggtgtgcaaggagctgaccctgatgaccgaggaggagaccagactgagagagagcgtggtgcagatgggcgtgctgatgagcgaggaggaggtgttcgagctggtgcccgacgacgagagacagtgcagcgcctgcagaaccacctgcttcctgagcgccctgacctgcagctgcaaccccgagagactggtgtgcctgtaccaccccaccgacctgtgcccctgccccatgcagaagaagtgcctgagatacagataccccctggaggacctgcccagcctgctgtacggcgtgaaggtgagagcccagagctacgacacctgggtgagcagagtgaccgaggccctgagcgccaacttcaaccacaagaaggacctgatcgagctgagagtgatgctggaggacgccgaggacagaaagtaccccgagaacgacctgttcagaaagctgagagacgccgtgaaggaggccgagacctgcgccagcgtggcccagctgctgctgagcaagaagcagaagcacagacagagccccgacagcggcagaaccagaaccaagctgaccgtggaggagctgaaggccttcgtgcagcagctgttcagcctgccctgcgtgatcagccaggccagacaggtgaagaacctgctggacgacgtggaggagttccacgagagagcccaggaggccatgatggacgagacccccgacagcagcaagctgcagatgctgatcgacatgggcagcagcctgtacgtggagctgcccgagctgcccagactgaagcaggagctgcagcaggccagatggctggacgaggtgagactgaccctgagcgacccccagcaggtgaccctggacgtgatgaagaagctgatcgacagcggcgtgggcctggccccccaccacgccgtggagaaggccatggccgagctgcaggagctgctgaccgtgagcgagagatgggaggagaaggccaaggtgtgcctgcaggccagacccagacacagcgtggccagcctggagagcatcgtgaacgaggccaagaacatccccgccttcctgcccaacgtgctgagcctgaaggaggccctgcagaaggccagagagtggaccgccaaggtggaggccatccagagcggcagcaactacgcctacctggagcagctggagagcctgagcgccaagggcagacccatccccgtgagactggaggccctgccccaggtggagagccaggtggccgccgccagagcctggagagagagaaccggcagaaccttcctgaagaagaacagcagccacaccctgctgcaggtgctgagccccagaaccgacatcggcgtgtacggcagcggcaagaacagaagatag

SEQ ID NO: 87486 - DNA, 5073 bp, synthetic construct
  misc_feature 1..5073: note = Description of Artificial Sequence: Synthetic coding sequence
  source 1..5073: mol_type = other DNA
atggccggcgtgggccccggcggctacgccgccgagttcgtgcccccccccgagtgccccgtgttcgagcccagctgggaggagttcaccgaccccctgagcttcatcggcagaatcagacccctggccgagaagaccggcatctgcaagatcagaccccccaaggactggcagccccccttcgcctgcgaggtgaagagcttcagattcacccccagagtgcagagactgaacgagctggaggccatgaccagagtgagactggacttcctggaccagctggccaagttctgggagctgcagggcagcaccctgaagatccccgtggtggagagaaagatcctggacctgtacgccctgagcaagatcgtggccagcaagggcggcttcgagatggtgaccaaggagaagaagtggagcaaggtgggcagcagactgggctacctgcccggcaagggcaccggcagcctgctgaagagccactacgagagaatcctgtacccctacgagctgttccagagcggcgtgagcctgatgggcgtgcagatgcccaacctggacctgaaggagaaggtggagcccgaggtgctgagcaccgacacccagaccagccccgagcccggcaccagaatgaacatcctgcccaagagaaccagaagagtgaagacccagagcgagagcggcgacgtgagcagaaacaccgagctgaagaagctgcagatcttcggcgccggccccaaggtggtgggcctggccatgggcaccaaggacaaggaggacgaggtgaccagaagaagaaaggtgaccaacagaagcgacgccttcaacatgcagatgagacagagaaagggcaccctgagcgtgaacttcgtggacctgtacgtgtgcatgttctgcggcagaggcaacaacgaggacaagctgctgctgtgcgacggctgcgacgacagctaccacaccttctgcctgatcccccccctgcccgacgtgcccaagggcgactggagatgccccaagtgcgtggccgaggagtgcagcaagcccagagaggccttcggcttcgagcaggccgtgagagagtacaccctgcagagcttcggcgagatggccgacaacttcaagagcgactacttcaacatgcccgtgcacatggtgcccaccgagctggtggagaaggagttctggagactggtgagcagcatcgaggaggacgtgatcgtggagtacggcgccgacatcagcagcaaggacttcggcagcggcttccccgtgaaggacggcagaagaaagatcctgcccgaggaggaggagtacgccctgagcggctggaacctgaacaacatgcccgtgctggagcagagcgtgctggcccacatcaacgtggacatcagcggcatgaaggtgccctggctgtacgtgggcatgtgcttcagcagcttctgctggcacatcgaggaccactggagctacagcatcaactacctgcactggggcgagcccaagacctggtacggcgtgcccagccacgccgccgagcagctggaggaggtgatgagagagctggcccccgagctgttcgagagccagcccgacctgctgcaccagctggtgaccatcatgaaccccaacgtgctgatggagcacggcgtgcccgtgtacagaaccaaccagtgcgccggcgagttcgtggtgaccttccccagagcctaccacagcggcttcaaccagggctacaacttcgccgaggccgtgaacttctgcaccgccgactggctgcccatcggcagacagtgcgtgaaccactacagaagactgagaagacactgcgtgttcagccacgaggagctgatcttcaagatggccgccgaccccgagtgcctggacgtgggcctggccgccatggtgtgcaaggagctgaccctgatgaccgaggaggagaccagactgagagagagcgtggtgcagatgggcgtgctgatgagcgaggaggaggtgttcgagctggtgcccgacgacgagagacagtgcagcgcctgcagaaccacctgcttcctgagcgccctgacctgcagctgcaaccccgagagactggtgtgcctgtaccaccccaccgacctgtgcccctgccccatgcagaagaagtgcctgagatacagataccccctggaggacctgcccagcctgctgtacggcgtgaaggtgagagcccagagctacgacacctgggtgagcagagtgaccgaggccctgagcgccaacttcaaccacaagaaggacctgatcgagctgagagtgatgctggaggacgccgaggacagaaagtaccccgagaacgacctgttcagaaagctgagagacgccgtgaaggaggccgagacctgcgccagcgtggcccagctgctgctgagcaagaagcagaagcacagacagagccccgacagcggcagaaccagaaccaagctgaccgtggaggagctgaaggccttcgtgcagcagctgttcagcctgccctgcgtgatcagccaggccagacaggtgaagaacctgctggacgacgtggaggagttccacgagagagcccaggaggccatgatggacgagacccccgacagcagcaagctgcagatgctgatcgacatgggcagcagcctgtacgtggagctgcccgagctgcccagactgaagcaggagctgcagcaggccagatggctggacgaggtgagactgaccctgagcgacccccagcaggtgaccctggacgtgatgaagaagctgatcgacagcggcgtgggcctggccccccaccacgccgtggagaaggccatggccgagctgcaggagctgctgaccgtgagcgagagatgggaggagaaggccaaggtgtgcctgcaggccagacccagacacagcgtggccagcctggagagcatcgtgaacgaggccaagaacatccccgccttcctgcccaacgtgctgagcctgaaggaggccctgcagaaggccagagagtggaccgccaaggtggaggccatccagagcggcagcaactacgcctacctggagcagctggagagcctgagcgccaagggcagacccatccccgtgagactggaggccctgccccaggtggagagccaggtggccgccgccagagcctggagagagagaaccggcagaaccttcctgaagaagaacagcagccacaccctgctgcaggtgctgagccccagaaccgacatcggcgtgtacggcagcggcaagaacagaagaaagaaggtgaaggagctgatcgagaaggagaaggagaaggacctggacctggagcccctgagcgacctggaggagggcctggaggagaccagagacaccgccatggtggtggccgtgttcaaggagagagagcagaaggagatcgaggccatgcacagcctgagagccgccaacctggccaagatgaccatggtggacagaatcgaggaggtgaagttctgcatctgcagaaagaccgccagcggcttcatgctgcagtgcgagctgtgcaaggactggttccacaacagctgcgtgcccctgcccaagagcagcagccagaagaagggcagcagctggcaggccaaggaggtgaagttcctgtgccccctgtgcatgagaagcagaagacccagactggagaccatcctgagcctgctggtgagcctgcagaagctgcccgtgagactgcccgagggcgaggccctgcagtgcctgaccgagagagccatgagctggcaggacagagccagacaggccctggccaccgacgagctgagcagcgccctggccaagctgagcgtgctgagccagagaatggtggagcaggccgccagagagaagaccgagaagatcatcagcgccgagctgcagaaggccgccgccaaccccgacctgcagggccacctgcccagcttccagcagagcgccttcaacagagtggtgagcagcgtgagcagcagccccagacagaccatggactacgacgacgaggagaccgacagcgacgaggacatcagagagacctacggctacgacatgaaggacaccgccagcgtgaagagcagcagcagcctggagcccaacctgttctgcgacgaggagatccccatcaagagcgaggaggtggtgacccacatgtggaccgcccccagcttctgcgccgagcacgcctacagcagcgccagcaagagctgcagccagggcagcagcacccccagaaagcagcccagaaagagccccctggtgcccagaagcctggagccccccgtgctggagctgagccccggcgccaaggcccagctggaggagctgatgatggtgggcgacctgctggaggtgagcctggacgagacccagcacatctggagaatcctgcaggccacccacccccccagcgaggacagattcctgcacatcatggaggacgacagcatggaggagaagcccctgaaggtgaagggcaaggacagcagcgagaagaagagaaagagaaagctggagaaggtggagcagctgttcggcgagggcaagcagaagagcaaggagctgaagaagatggacaagcccagaaagaagaagctgaagctgggcgccgacaagagcaaggagctgaacaagctggccaagaagctggccaaggaggaggagagaaagaagaagaaggagaaggccgccgccgccaaggtggagctggtgaaggagagcaccgagaagaagagagagaagaaggtgctggacatccccagcaagtacgactggagcggcgccgaggagagcgacgacgagaacgccgtgtgcgccgcccagaactgccagagaccctgcaaggacaaggtggactgggtgcagtgcgacggcggctgcgacgagtggttccaccaggtgtgcgtgggcgtgagccccgagatggccgagaacgaggactacatctgcatcaactgcgccaagaagcagggccccgtgagccccggccccgcccccccccccagcttcatcatgagctacaagctgcccatggaggacctgaaggagaccagctag

SEQ ID NO: 87487 - DNA, 3828 bp, synthetic construct
  misc_feature 1..3828: note = Description of Artificial Sequence: Synthetic coding sequence
  source 1..3828: mol_type = other DNA
atgggcttcgcccccggcaaggccgtgggcagccacatcagaggccactacgagagaatcctgaacccctacaacctgttcctgagcggcgacagcctgagatgcctgcagaagcccaacctgaccaccgacaccaaggacaaggagtacaagccccacgacatcccccagagacagagcgtgcagcccagcgagacctgcccccccgccagaagagccaagagaatgagagccgaggccatgaacatcaagatcgagcccgaggagaccaccgaggccagaacccacaacctgagaagaagaatgggctgccccacccccaagtgcgagaacgagaaggagatgaagagcagcatcaagcaggagcccatcgagagaaaggactacatcgtggagaacgagaaggagaagcccaagagcagaagcaagaaggccaccaacgccgtggacctgtacgtgtgcctgctgtgcggcagcggcaacgacgaggacagactgctgctgtgcgacggctgcgacgacagctaccacaccttctgcctgatcccccccctgcacgacgtgcccaagggcgactggagatgccccaagtgcctggcccaggagtgcagcaagccccaggaggccttcggcttcgagcaggccgccagagactacaccctgagaaccttcggcgagatggccgacgccttcaagagcgactacttcaacatgcccgtgcacatggtgcccaccgagctggtggagaaggagttctggagactggtgagcaccatcgaggaggacgtgaccgtggagtacggcgccgacatcgccagcaaggagttcggcagcggcttccccgtgagagacggcaagatcaagctgagccccgaggaggaggagtacctggacagcggctggaacctgaacaacatgcccgtgatggagcagagcgtgctggcccacatcaccgccgacatctgcggcatgaagctgccctggctgtacgtgggcatgtgcttcagcagcttctgctggcacatcgaggaccactggagctacagcatcaactacctgcactggggcgagcccaagacctggtacggcgtgcccggctacgccgccgagcagctggagaacgtgatgaagaagctggcccccgagctgttcgtgagccagcccgacctgctgcaccagctggtgaccatcatgaaccccaacaccctgatgacccacgaggtgcccgtgtacagaaccaaccagtgcgccggcgagttcgtgatcaccttccccagagcctaccacagcggcttcaaccagggcttcaacttcgccgaggccgtgaacttctgcaccgtggactggctgcccctgggcagacagtgcgtggagcactacagactgctgcacagatactgcgtgttcagccacgacgagatgatctgcaagatggccagcaaggccgacgtgctggacgtggtggtggccagcaccgtgcagaaggacatggccatcatgatcgaggacgagaaggccctgagagagaccgtgagaaagctgggcgtgatcgacagcgagagaatggacttcgagctgctgcccgacgacgagagacagtgcgtgaagtgcaagaccacctgcttcatgagcgccatcagctgcagctgcaagcccggcctgctggtgtgcctgcaccacgtgaaggagctgtgcagctgccccccctacaagtacaagctgagatacagatacaccctggacgacctgtaccccatgatgaacgccctgaagctgagagccgagagctacaacgagtgggccctgaacgtgaacgaggccctggaggccaagatcaacaagaagaagagcctggtgagcttcaaggccctgatcgaggagagcgagatgaagaagttccccgacaacgacctgctgagacacctgagactggtgacccaggacgccgagaagtgcgccagcgtggcccagcagctgctgaacggcaagagacagaccagatacagaagcggcggcggcaagagccagaaccagctgaccgtgaacgagctgagacagttcgtgacccagctgtacgccctgccctgcgtgctgagccagacccccctgctgaaggacctgctgaacagagtggaggacttccagcagcacagccagaagctgctgagcgaggagacccccagcgccgccgagctgcaggacctgctggacgtgagcttcgagttcgacgtggagctgccccagctggccgagatgagaatcagactggagcaggccagatggctggaggaggtgcagcaggcctgcctggaccccagcagcctgaccctggacgacatgagaagactgatcgacctgggcgtgggcctggccccctacagcgccgtggagaaggccatggccagactgcaggagctgctgaccgtgagcgagcactgggacgacaaggccaagagcctgctgaaggccagacccagacacagcctgaacagcctggccaccgccgtgaaggagatcgaggagatccccgcctacctgcccaacggcgccgccctgaaggacagcgtgcagagagccagagactggctgcaggacgtggagggcctgcaggccggcggcagagtgcccgtgctggacaccctgatcgagctggtgaccagaggcagaagcatccccgtgcacctgaacagcctgcccagactggagaccctggtggccgaggtgcaggcctggaaggagtgcgccgtgaacaccttcctgaccgagaacagcccctacagcctgctggaggtgctgtgccccagatgcgacatcggcctgctgggcctgaagagaaagcagagaaagctgaaggagcccctgcccaacggcaagaagaagagcaccaagctggagagcctgagcgacctggagagagccctgaccgagagcaaggagaccgccagcgccatggccaccctgggcgaggccagactgagagagatggaggccctgcagagcctgagactggccaacgagggcaagctgctgagccccctgcaggacgtggacatcaagatctgcctgtgccagaaggcccccgccgcccccatgatccagtgcgagctgtgcagagacgccttccacaccagctgcgtggccgtgcccagcatcagccagggcctgagaatctggctgtgcccccactgcagaagaagcgagaagccccccctggagaagatcctgcccctgctggccagcctgcagagaatcagagtgagactgcccgagggcgacgccctgagatacatgatcgagagaaccgtgaactggcagcacagagcccagcagctgctgagcagcggcaacctgaagttcgtgcaggacagagtgggcagcggcctgctgtacagcagatggcaggccagcgccggccaggtgagcgacaccaacaaggtgagccagccccccggcaccaccagcttcagcctgcccgacgactgggacaacagaaccagctacctgcacagccccttcagcaccggcagaagctgcatccccctgcacggcgtgagccccgaggtgaacgagctgctgatggaggcccagctgctgcaggtgagcctgcccgagatccaggagctgtaccagaccctgctggccaagcccagccccgcccagcagaccgacagaagcagccccgtgagacccagcagcgagaagaacgactgctgcagaggcaagagagacggcatcaacagcctggagagaaagctgaagagaagactggagagagagggcctgagcagcgagagatgggagagagtgaagaagatgagaaccccctag

SEQ ID NO: 87488 - DNA, 4743 bp, synthetic construct
  misc_feature 1..4743: note = Description of Artificial Sequence: Synthetic coding sequence
  source 1..4743: mol_type = other DNA
atggaggccgccaccaccctgcaccccggccccagacccgccctgcccctgggcggccccggccccctgggcgagttcctgcccccccccgagtgccccgtgttcgagcccagctgggaggagttcgccgaccccttcgccttcatccacaagatcagacccatcgccgagcagaccggcatctgcaaggtgagacccccccccgactggcagccccccttcgcctgcgacgtggacaagctgcacttcacccccagaatccagagactgaacgagctggaggcccagaccagagtgaagctgaacttcctggaccagatcgccaagtactgggagctgcagggcagcaccctgaagatcccccacgtggagagaaagatcctggacctgttccagctgaacaagctggtggccgaggagggcggcttcgccgtggtgtgcaaggacagaaagtggaccaagatcgccaccaagatgggcttcgcccccggcaaggccgtgggcagccacatcagaggccactacgagagaatcctgaacccctacaacctgttcctgagcggcgacagcctgagatgcctgcagaagcccaacctgaccaccgacaccaaggacaaggagtacaagccccacgacatcccccagagacagagcgtgcagcccagcgagacctgcccccccgccagaagagccaagagaatgagagccgagagacagagcctggccgtgctgcccagactggagtgcagcggcgccatcctggcccactgcaacctgagactgctggacagcagcaacagcagcgccagcgccagccaggccatgaacatcaagatcgagcccgaggagaccaccgaggccagaacccacaacctgagaagaagaatgggctgccccacccccaagtgcgagaacgagaaggagatgaagagcagcatcaagcaggagcccatcgagagaaaggactacatcgtggagaacgagaaggagaagcccaagagcagaagcaagaaggccaccaacgccgtggacctgtacgtgtgcctgctgtgcggcagcggcaacgacgaggacagactgctgctgtgcgacggctgcgacgacagctaccacaccttctgcctgatcccccccctgcacgacgtgcccaagggcgactggagatgccccaagtgcctggcccaggagtgcagcaagccccaggaggccttcggcttcgagcaggccgccagagactacaccctgagaaccttcggcgagatggccgacgccttcaagagcgactacttcaacatgcccgtgcacatggtgcccaccgagctggtggagaaggagttctggagactggtgagcaccatcgaggaggacgtgaccgtggagtacggcgccgacatcgccagcaaggagttcggcagcggcttccccgtgagagacggcaagatcaagctgagccccgaggaggaggagtacctggacagcggctggaacctgaacaacatgcccgtgatggagcagagcgtgctggcccacatcaccgccgacatctgcggcatgaagctgccctggctgtacgtgggcatgtgcttcagcagcttctgctggcacatcgaggaccactggagctacagcatcaactacctgcactggggcgagcccaagacctggtacggcgtgcccggctacgccgccgagcagctggagaacgtgatgaagaagctggcccccgagctgttcgtgagccagcccgacctgctgcaccagctggtgaccatcatgaaccccaacaccctgatgacccacgaggtgcccgtgtacagaaccaaccagtgcgccggcgagttcgtgatcaccttccccagagcctaccacagcggcttcaaccagggcttcaacttcgccgaggccgtgaacttctgcaccgtggactggctgcccctgggcagacagtgcgtggagcactacagactgctgcacagatactgcgtgttcagccacgacgagatgatctgcaagatggccagcaaggccgacgtgctggacgtggtggtggccagcaccgtgcagaaggacatggccatcatgatcgaggacgagaaggccctgagagagaccgtgagaaagctgggcgtgatcgacagcgagagaatggacttcgagctgctgcccgacgacgagagacagtgcgtgaagtgcaagaccacctgcttcatgagcgccatcagctgcagctgcaagcccggcctgctggtgtgcctgcaccacgtgaaggagctgtgcagctgccccccctacaagtacaagctgagatacagatacaccctggacgacctgtaccccatgatgaacgccctgaagctgagagccgagagctacaacgagtgggccctgaacgtgaacgaggccctggaggccaagatcaacaagaagaagagcctggtgagcttcaaggccctgatcgaggagagcgagatgaagaagttccccgacaacgacctgctgagacacctgagactggtgacccaggacgccgagaagtgcgccagcgtggcccagcagctgctgaacggcaagagacagaccagatacagaagcggcggcggcaagagccagaaccagctgaccgtgaacgagctgagacagttcgtgacccagctgtacgccctgccctgcgtgctgagccagacccccctgctgaaggacctgctgaacagagtggaggacttccagcagcacagccagaagctgctgagcgaggagacccccagcgccgccgagctgcaggacctgctggacgtgagcttcgagttcgacgtggagctgccccagctggccgagatgagaatcagactggagcaggccagatggctggaggaggtgcagcaggcctgcctggaccccagcagcctgaccctggacgacatgagaagactgatcgacctgggcgtgggcctggccccctacagcgccgtggagaaggccatggccagactgcaggagctgctgaccgtgagcgagcactgggacgacaaggccaagagcctgctgaaggccagacccagacacagcctgaacagcctggccaccgccgtgaaggagatcgaggagatccccgcctacctgcccaacggcgccgccctgaaggacagcgtgcagagagccagagactggctgcaggacgtggagggcctgcaggccggcggcagagtgcccgtgctggacaccctgatcgagctggtgaccagaggcagaagcatccccgtgcacctgaacagcctgcccagactggagaccctggtggccgaggtgcaggcctggaaggagtgcgccgtgaacaccttcctgaccgagaacagcccctacagcctgctggaggtgctgtgccccagatgcgacatcggcctgctgggcctgaagagaaagcagagaaagctgaaggagcccctgcccaacggcaagaagaagagcaccaagctggagagcctgagcgacctggagagagccctgaccgagagcaaggagaccgccagcgccatggccaccctgggcgaggccagactgagagagatggaggccctgcagagcctgagactggccaacgagggcaagctgctgagccccctgcaggacgtggacatcaagatctgcctgtgccagaaggcccccgccgcccccatgatccagtgcgagctgtgcagagacgccttccacaccagctgcgtggccgtgcccagcatcagccagggcctgagaatctggctgtgcccccactgcagaagaagcgagaagccccccctggagaagatcctgcccctgctggccagcctgcagagaatcagagtgagactgcccgagggcgacgccctgagatacatgatcgagagaaccgtgaactggcagcacagagcccagcagctgctgagcagcggcaacctgaagttcgtgcaggacagagtgggcagcggcctgctgtacagcagatggcaggccagcgccggccaggtgagcgacaccaacaaggtgagccagccccccggcaccaccagcttcagcctgcccgacgactgggacaacagaaccagctacctgcacagccccttcagcaccggcagaagctgcatccccctgcacggcgtgagccccgaggtgaacgagctgctgatggaggcccagctgctgcaggtgagcctgcccgagatccaggagctgtaccagaccctgctggccaagcccagccccgcccagcagaccgacagaagcagccccgtgagacccagcagcgagaagaacgactgctgcagaggcaagagagacggcatcaacagcctggagagaaagctgaagagaagactggagagagagggcctgagcagcgagagatgggagagagtgaagaagatgagaacccccaagaagaagaagatcaagctgagccaccccaaggacatgaacaacttcaagctggagagagagagaagctacgagctggtgagaagcgccgagacccacagcctgcccagcgacaccagctacagcgagcaggaggacagcgaggacgaggacgccatctgccccgccgtgagctgcctgcagcccgagggcgacgaggtggactgggtgcagtgcgacggcagctgcaaccagtggttccaccaggtgtgcgtgggcgtgagccccgagatggccgagaaggaggactacatctgcgtgagatgcaccgtgaaggacgcccccagcagaaagtag

SEQ ID NO: 87489 - DNA, 4635 bp, synthetic construct
  misc_feature 1..4635: note = Description of Artificial Sequence: Synthetic coding sequence
  source 1..4635: mol_type = other DNA
atggaggccgccaccaccctgcaccccggccccagacccgccctgcccctgggcggccccggccccctgggcgagttcctgcccccccccgagtgccccgtgttcgagcccagctgggaggagttcgccgaccccttcgccttcatccacaagatcagacccatcgccgagcagaccggcatctgcaaggtgagacccccccccgactggcagccccccttcgcctgcgacgtggacaagctgcacttcacccccagaatccagagactgaacgagctggaggcccagaccagagtgaagctgaacttcctggaccagatcgccaagtactgggagctgcagggcagcaccctgaagatcccccacgtggagagaaagatcctggacctgttccagctgaacaagctggtggccgaggagggcggcttcgccgtggtgtgcaaggacagaaagtggaccaagatcgccaccaagatgggcttcgcccccggcaaggccgtgggcagccacatcagaggccactacgagagaatcctgaacccctacaacctgttcctgagcggcgacagcctgagatgcctgcagaagcccaacctgaccaccgacaccaaggacaaggagtacaagccccacgacatcccccagagacagagcgtgcagcccagcgagacctgcccccccgccagaagagccaagagaatgagagccgaggccatgaacatcaagatcgagcccgaggagaccaccgaggccagaacccacaacctgagaagaagaatgggctgccccacccccaagtgcgagaacgagaaggagatgaagagcagcatcaagcaggagcccatcgagagaaaggactacatcgtggagaacgagaaggagaagcccaagagcagaagcaagaaggccaccaacgccgtggacctgtacgtgtgcctgctgtgcggcagcggcaacgacgaggacagactgctgctgtgcgacggctgcgacgacagctaccacaccttctgcctgatcccccccctgcacgacgtgcccaagggcgactggagatgccccaagtgcctggcccaggagtgcagcaagccccaggaggccttcggcttcgagcaggccgccagagactacaccctgagaaccttcggcgagatggccgacgccttcaagagcgactacttcaacatgcccgtgcacatggtgcccaccgagctggtggagaaggagttctggagactggtgagcaccatcgaggaggacgtgaccgtggagtacggcgccgacatcgccagcaaggagttcggcagcggcttccccgtgagagacggcaagatcaagctgagccccgaggaggaggagtacctggacagcggctggaacctgaacaacatgcccgtgatggagcagagcgtgctggcccacatcaccgccgacatctgcggcatgaagctgccctggctgtacgtgggcatgtgcttcagcagcttctgctggcacatcgaggaccactggagctacagcatcaactacctgcactggggcgagcccaagacctggtacggcgtgcccggctacgccgccgagcagctggagaacgtgatgaagaagctggcccccgagctgttcgtgagccagcccgacctgctgcaccagctggtgaccatcatgaaccccaacaccctgatgacccacgaggtgcccgtgtacagaaccaaccagtgcgccggcgagttcgtgatcaccttccccagagcctaccacagcggcttcaaccagggcttcaacttcgccgaggccgtgaacttctgcaccgtggactggctgcccctgggcagacagtgcgtggagcactacagactgctgcacagatactgcgtgttcagccacgacgagatgatctgcaagatggccagcaaggccgacgtgctggacgtggtggtggccagcaccgtgcagaaggacatggccatcatgatcgaggacgagaaggccctgagagagaccgtgagaaagctgggcgtgatcgacagcgagagaatggacttcgagctgctgcccgacgacgagagacagtgcgtgaagtgcaagaccacctgcttcatgagcgccatcagctgcagctgcaagcccggcctgctggtgtgcctgcaccacgtgaaggagctgtgcagctgccccccctacaagtacaagctgagatacagatacaccctggacgacctgtaccccatgatgaacgccctgaagctgagagccgagagctacaacgagtgggccctgaacgtgaacgaggccctggaggccaagatcaacaagaagaagagcctggtgagcttcaaggccctgatcgaggagagcgagatgaagaagttccccgacaacgacctgctgagacacctgagactggtgacccaggacgccgagaagtgcgccagcgtggcccagcagctgctgaacggcaagagacagaccagatacagaagcggcggcggcaagagccagaaccagctgaccgtgaacgagctgagacagttcgtgacccagctgtacgccctgccctgcgtgctgagccagacccccctgctgaaggacctgctgaacagagtggaggacttccagcagcacagccagaagctgctgagcgaggagacccccagcgccgccgagctgcaggacctgctggacgtgagcttcgagttcgacgtggagctgccccagctggccgagatgagaatcagactggagcaggccagatggctggaggaggtgcagcaggcctgcctggaccccagcagcctgaccctggacgacatgagaagactgatcgacctgggcgtgggcctggccccctacagcgccgtggagaaggccatggccagactgcaggagctgctgaccgtgagcgagcactgggacgacaaggccaagagcctgctgaaggccagacccagacacagcctgaacagcctggccaccgccgtgaaggagatcgaggagatccccgcctacctgcccaacggcgccgccctgaaggacagcgtgcagagagccagagactggctgcaggacgtggagggcctgcaggccggcggcagagtgcccgtgctggacaccctgatcgagctggtgaccagaggcagaagcatccccgtgcacctgaacagcctgcccagactggagaccctggtggccgaggtgcaggcctggaaggagtgcgccgtgaacaccttcctgaccgagaacagcccctacagcctgctggaggtgctgtgccccagatgcgacatcggcctgctgggcctgaagagaaagcagagaaagctgaaggagcccctgcccaacggcaagaagaagagcaccaagctggagagcctgagcgacctggagagagccctgaccgagagcaaggagaccgccagcgccatggccaccctgggcgaggccagactgagagagatggaggccctgcagagcctgagactggccaacgagggcaagctgctgagccccctgcaggacgtggacatcaagatctgcctgtgccagaaggcccccgccgcccccatgatccagtgcgagctgtgcagagacgccttccacaccagctgcgtggccgtgcccagcatcagccagggcctgagaatctggctgtgcccccactgcagaagaagcgagaagccccccctggagaagatcctgcccctgctggccagcctgcagagaatcagagtgagactgcccgagggcgacgccctgagatacatgatcgagagaaccgtgaactggcagcacagagcccagcagctgctgagcagcggcaacctgaagttcgtgcaggacagagtgggcagcggcctgctgtacagcagatggcaggccagcgccggccaggtgagcgacaccaacaaggtgagccagccccccggcaccaccagcttcagcctgcccgacgactgggacaacagaaccagctacctgcacagccccttcagcaccggcagaagctgcatccccctgcacggcgtgagccccgaggtgaacgagctgctgatggaggcccagctgctgcaggtgagcctgcccgagatccaggagctgtaccagaccctgctggccaagcccagccccgcccagcagaccgacagaagcagccccgtgagacccagcagcgagaagaacgactgctgcagaggcaagagagacggcatcaacagcctggagagaaagctgaagagaagactggagagagagggcctgagcagcgagagatgggagagagtgaagaagatgagaacccccaagaagaagaagatcaagctgagccaccccaaggacatgaacaacttcaagctggagagagagagaagctacgagctggtgagaagcgccgagacccacagcctgcccagcgacaccagctacagcgagcaggaggacagcgaggacgaggacgccatctgccccgccgtgagctgcctgcagcccgagggcgacgaggtggactgggtgcagtgcgacggcagctgcaaccagtggttccaccaggtgtgcgtgggcgtgagccccgagatggccgagaaggaggactacatctgcgtgagatgcaccgtgaaggacgcccccagcagaaagtag

SEQ ID NO: 87490 - DNA, 4161 bp, synthetic construct
  misc_feature 1..4161: note = Description of Artificial Sequence: Synthetic coding sequence
  source 1..4161: mol_type = other DNA
atgggcttcgcccccggcaaggccgtgggcagccacatcagaggccactacgagagaatcctgaacccctacaacctgttcctgagcggcgacagcctgagatgcctgcagaagcccaacctgaccaccgacaccaaggacaaggagtacaagccccacgacatcccccagagacagagcgtgcagcccagcgagacctgcccccccgccagaagagccaagagaatgagagccgaggccatgaacatcaagatcgagcccgaggagaccaccgaggccagaacccacaacctgagaagaagaatgggctgccccacccccaagtgcgagaacgagaaggagatgaagagcagcatcaagcaggagcccatcgagagaaaggactacatcgtggagaacgagaaggagaagcccaagagcagaagcaagaaggccaccaacgccgtggacctgtacgtgtgcctgctgtgcggcagcggcaacgacgaggacagactgctgctgtgcgacggctgcgacgacagctaccacaccttctgcctgatcccccccctgcacgacgtgcccaagggcgactggagatgccccaagtgcctggcccaggagtgcagcaagccccaggaggccttcggcttcgagcaggccgccagagactacaccctgagaaccttcggcgagatggccgacgccttcaagagcgactacttcaacatgcccgtgcacatggtgcccaccgagctggtggagaaggagttctggagactggtgagcaccatcgaggaggacgtgaccgtggagtacggcgccgacatcgccagcaaggagttcggcagcggcttccccgtgagagacggcaagatcaagctgagccccgaggaggaggagtacctggacagcggctggaacctgaacaacatgcccgtgatggagcagagcgtgctggcccacatcaccgccgacatctgcggcatgaagctgccctggctgtacgtgggcatgtgcttcagcagcttctgctggcacatcgaggaccactggagctacagcatcaactacctgcactggggcgagcccaagacctggtacggcgtgcccggctacgccgccgagcagctggagaacgtgatgaagaagctggcccccgagctgttcgtgagccagcccgacctgctgcaccagctggtgaccatcatgaaccccaacaccctgatgacccacgaggtgcccgtgtacagaaccaaccagtgcgccggcgagttcgtgatcaccttccccagagcctaccacagcggcttcaaccagggcttcaacttcgccgaggccgtgaacttctgcaccgtggactggctgcccctgggcagacagtgcgtggagcactacagactgctgcacagatactgcgtgttcagccacgacgagatgatctgcaagatggccagcaaggccgacgtgctggacgtggtggtggccagcaccgtgcagaaggacatggccatcatgatcgaggacgagaaggccctgagagagaccgtgagaaagctgggcgtgatcgacagcgagagaatggacttcgagctgctgcccgacgacgagagacagtgcgtgaagtgcaagaccacctgcttcatgagcgccatcagctgcagctgcaagcccggcctgctggtgtgcctgcaccacgtgaaggagctgtgcagctgccccccctacaagtacaagctgagatacagatacaccctggacgacctgtaccccatgatgaacgccctgaagctgagagccgagagctacaacgagtgggccctgaacgtgaacgaggccctggaggccaagatcaacaagaagaagagcctggtgagcttcaaggccctgatcgaggagagcgagatgaagaagttccccgacaacgacctgctgagacacctgagactggtgacccaggacgccgagaagtgcgccagcgtggcccagcagctgctgaacggcaagagacagaccagatacagaagcggcggcggcaagagccagaaccagctgaccgtgaacgagctgagacagttcgtgacccagctgtacgccctgccctgcgtgctgagccagacccccctgctgaaggacctgctgaacagagtggaggacttccagcagcacagccagaagctgctgagcgaggagacccccagcgccgccgagctgcaggacctgctggacgtgagcttcgagttcgacgtggagctgccccagctggccgagatgagaatcagactggagcaggccagatggctggaggaggtgcagcaggcctgcctggaccccagcagcctgaccctggacgacatgagaagactgatcgacctgggcgtgggcctggccccctacagcgccgtggagaaggccatggccagactgcaggagctgctgaccgtgagcgagcactgggacgacaaggccaagagcctgctgaaggccagacccagacacagcctgaacagcctggccaccgccgtgaaggagatcgaggagatccccgcctacctgcccaacggcgccgccctgaaggacagcgtgcagagagccagagactggctgcaggacgtggagggcctgcaggccggcggcagagtgcccgtgctggacaccctgatcgagctggtgaccagaggcagaagcatccccgtgcacctgaacagcctgcccagactggagaccctggtggccgaggtgcaggcctggaaggagtgcgccgtgaacaccttcctgaccgagaacagcccctacagcctgctggaggtgctgtgccccagatgcgacatcggcctgctgggcctgaagagaaagcagagaaagctgaaggagcccctgcccaacggcaagaagaagagcaccaagctggagagcctgagcgacctggagagagccctgaccgagagcaaggagaccgccagcgccatggccaccctgggcgaggccagactgagagagatggaggccctgcagagcctgagactggccaacgagggcaagctgctgagccccctgcaggacgtggacatcaagatctgcctgtgccagaaggcccccgccgcccccatgatccagtgcgagctgtgcagagacgccttccacaccagctgcgtggccgtgcccagcatcagccagggcctgagaatctggctgtgcccccactgcagaagaagcgagaagccccccctggagaagatcctgcccctgctggccagcctgcagagaatcagagtgagactgcccgagggcgacgccctgagatacatgatcgagagaaccgtgaactggcagcacagagcccagcagctgctgagcagcggcaacctgaagttcgtgcaggacagagtgggcagcggcctgctgtacagcagatggcaggccagcgccggccaggtgagcgacaccaacaaggtgagccagccccccggcaccaccagcttcagcctgcccgacgactgggacaacagaaccagctacctgcacagccccttcagcaccggcagaagctgcatccccctgcacggcgtgagccccgaggtgaacgagctgctgatggaggcccagctgctgcaggtgagcctgcccgagatccaggagctgtaccagaccctgctggccaagcccagccccgcccagcagaccgacagaagcagccccgtgagacccagcagcgagaagaacgactgctgcagaggcaagagagacggcatcaacagcctggagagaaagctgaagagaagactggagagagagggcctgagcagcgagagatgggagagagtgaagaagatgagaacccccaagaagaagaagatcaagctgagccaccccaaggacatgaacaacttcaagctggagagagagagaagctacgagctggtgagaagcgccgagacccacagcctgcccagcgacaccagctacagcgagcaggaggacagcgaggacgaggacgccatctgccccgccgtgagctgcctgcagcccgagggcgacgaggtggactgggtgcagtgcgacggcagctgcaaccagtggttccaccaggtgtgcgtgggcgtgagccccgagatggccgagaaggaggactacatctgcgtgagatgcaccgtgaaggacgcccccagcagaaagtag

SEQ ID NO: 87491 - DNA, 933 bp, synthetic construct
  misc_feature 1..933: note = Description of Artificial Sequence: Synthetic coding sequence
  source 1..933: mol_type = other DNA
atgatctgcaagatggccagcaaggccgacgtgctggacgtggtggtggccagcaccgtgcagaaggacatggccatcatgatcgaggacgagaaggccctgagagagaccgtgagaaagctgggcgtgatcgacagcgagagaatggacttcgagctgctgcccgacgacgagagacagtgcgtgaagtgcaagaccacctgcttcatgagcgccatcagctgcagctgcaagcccggcctgctggtgtgcctgcaccacgtgaaggagctgtgcagctgccccccctacaagtacaagctgagatacagatacaccctggacgacctgtaccccatgatgaacgccctgaagctgagagccgagagctacaacgagtgggccctgaacgtgaacgaggccctggaggccaagatcaacaagaagaagagcctggtgagcttcaaggccctgatcgaggagagcgagatgaagaagttccccgacaacgacctgctgagacacctgagactggtgacccaggacgccgagaagtgcgccagcgtggcccagcagctgctgaacggcaagagacagaccagatacagaagcggcggcggcaagagccagaaccagctgaccgtgaacgagctgagacagttcgtgacccagctgtacgccctgccctgcgtgctgagccagacccccctgctgaaggacctgctgaacagagtggaggacttccagcagcacagccagaagctgctgagcgaggagacccccagcgccgccgagctgcaggacctgctggacgtgagcttcgagttcgacgtggagctgccccagctggccgagatgagaatcagactggagcaggccagatggctggaggaggtgcagcaggcctgcctggaccccagcagcctgaccctggacgacatgagagtgagctag

SEQ ID NO: 87492 - DNA, 4674 bp, synthetic construct
  misc_feature 1..4674: note = Description of Artificial Sequence: Synthetic coding sequence
  source 1..4674: mol_type = other DNA
atggagcccggcagcgacgacttcctgcccccccccgagtgccccgtgttcgagcccagctgggccgagttcagagaccccctgggctacatcgccaagatcagacccatcgccgagaagagcggcatctgcaagatcagaccccccgccgactggcagccccccttcgccgtggaggtggacaacttcagattcacccccagaatccagagactgaacgagctggaggcccagaccagagtgaagctgaactacctggaccagatcgccaagttctgggagatccagggcagcagcctgaagatccccaacgtggagagaagaatcctggacctgtacagcctgagcaagatcgtggtggaggagggcggctacgaggccatctgcaaggacagaagatgggccagagtggcccagagactgaactacccccccggcaagaacatcggcagcctgctgagaagccactacgagagaatcgtgtacccctacgagatgtaccagagcggcgccaacctggtgcagtgcaacaccagacccttcgacaacgaggagaaggacaaggagtacaagccccacagcatccccctgagacagagcgtgcagcccagcaagttcaacagctacggcagaagagccaagagactgcagcccgaccccgagcccaccgaggaggacatcgagaagaaccccgagctgaagaagctgcagatctacggcgccggccccaagatgatgggcctgggcctgatggccaaggacaagaccctgagaaagaaggacaaggagggccccgagtgcccccccaccgtggtggtgaaggaggagctgggcggcgacgtgaaggtggagagcaccagccccaagaccttcctggagagcaaggaggagctgagccacagccccgagccctgcaccaagatgaccatgagactgagaagaaaccacagcaacgcccagttcatcgagagctacgtgtgcagaatgtgcagcagaggcgacgaggacgacaagctgctgctgtgcgacggctgcgacgacaactaccacatcttctgcctgctgccccccctgcccgagatccccaagggcgtgtggagatgccccaagtgcgtgatggccgagtgcaagagaccccccgaggccttcggcttcgagcaggccaccagagagtacaccctgcagagcttcggcgagatggccgacagcttcaaggccgactacttcaacatgcccgtgcacatggtgcccaccgagctggtggagaaggagttctggagactggtgaacagcatcgaggaggacgtgaccgtggagtacggcgccgacatccacagcaaggagttcggcagcggcttccccgtgagcgacagcaagagacacctgacccccgaggaggaggagtacgccaccagcggctggaacctgaacgtgatgcccgtgctggagcagagcgtgctgtgccacatcaacgccgacatcagcggcatgaaggtgccctggctgtacgtgggcatggtgttcagcgccttctgctggcacatcgaggaccactggagctacagcatcaactacctgcactggggcgagcccaagacctggtacggcgtgcccagcctggccgccgagcacctggaggaggtgatgaagaagctgacccccgagctgttcgacagccagcccgacctgctgcaccagctggtgaccctgatgaaccccaacaccctgatgagccacggcgtgcccgtggtgagaaccaaccagtgcgccggcgagttcgtgatcaccttccccagagcctaccacagcggcttcaaccagggctacaacttcgccgaggccgtgaacttctgcaccgccgactggctgcccgccggcagacagtgcatcgagcactacagaagactgagaagatactgcgtgttcagccacgaggagctgatctgcaagatggccgcctgccccgagaagctggacctgaacctggccgccgccgtgcacaaggagatgttcatcatggtgcaggaggagagaagactgagaaaggccctgctggagaagggcatcaccgaggccgagagagaggccttcgagctgctgcccgacgacgagagacagtgcatcaagtgcaagaccacctgcttcctgagcgccctggcctgctacgactgccccgacggcctggtgtgcctgagccacatcaacgacctgtgcaagtgcagcagcagcagacagtacctgagatacagatacaccctggacgagctgcccgccatgctgcacaagctgaaggtgagagccgagagcttcgacacctgggccaacaaggtgagagtggccctggaggtggaggacggcagaaagagaagcctggaggagctgagagccctggagagcgaggccagagagagaagattccccaacagcgagctgctgcagcagctgaagaactgcctgagcgaggccgaggcctgcgtgagcagagccctgggcctggtgagcggccaggaggccggcccccacagagtggccggcctgcagatgaccctgaccgagctgagagccttcctggaccagatgaacaacctgccctgcgccatgcaccagatcggcgacgtgaagggcgtgctggagcaggtggaggcctaccaggccgaggccagagaggccctggccagcctgcccagcagccccggcctgctgcagagcctgctggagagaggcagacagctgggcgtggaggtgcccgaggcccagcagctgcagagacaggtggagcaggccagatggctggacgaggtgaagagaaccctggcccccagcgccagaagaggcaccctggccgtgatgagaggcctgctggtggccggcgccagcgtggcccccagccccgccgtggacaaggcccaggccgagctgcaggagctgctgaccatcgccgagagatgggaggagaaggcccacctgtgcctggaggccagacagaagcacccccccgccaccctggaggccatcatcagagaggccgagaacatccccgtgcacctgcccaacatccaggccctgaaggaggccctggccaaggccagagcctggatcgccgacgtggacgagatccagaacggcgaccactacccctgcctggacgacctggagggcctggtggccgtgggcagagacctgcccgtgggcctggaggagctgagacagctggagctgcaggtgctgaccgcccacagctggagagagaaggccagcaagaccttcctgaagaagaacagctgctacaccctgctggaggtgctgtgcccctgcgccgacgccggcagcgacagcaccaagagaagcagatggatggagaaggagctgggcctgtacaagagcgacaccgagctgctgggcctgagcgcccaggacctgagagaccccggcagcgtgatcgtggccttcaaggagggcgagcagaaggagaaggagggcatcctgcagctgagaagaaccaacagcgccaagcccagccccctggccagcagcagcaccgccagcagcaccaccagcatctgcgtgtgcggccaggtgctggccggcgccggcgccctgcagtgcgacctgtgccaggactggttccacggcagatgcgtgagcgtgcccagactgctgagcagccccagacccaaccccaccagcagccccctgctggcctggtgggagtgggacaccaagttcctgtgccccctgtgcatgagaagcagaagacccagactggagaccatcctggccctgctggtggccctgcagagactgcccgtgagactgcccgagggcgaggccctgcagtgcctgaccgagagagccatcagctggcagggcagagccagacaggccctggccagcgaggacgtgaccgccctgctgggcagactggccgagctgagacagagactgcaggccgagcccagacccgaggagccccccaactaccccgccgcccccgccagcgaccccctgagagagggcagcggcaaggacatgcccaaggtgcagggcctgctggagaacggcgacagcgtgaccagccccgagaaggtggcccccgaggagggcagcgacctggagctgctgagcagcctgctgccccagctgaccggccccgtgctggagctgcccgaggccaccagagcccccctggaggagctgatgatggagggcgacctgctggaggtgaccctggacgagaaccacagcatctggcagctgctgcaggccggccagccccccgacctggagagaatcagaaccctgctggagctggagaaggccgagagacacggcagcagagccagaggcagagccctggagagaagaagaagaagaaaggtggacagaggcggcgagggcgacgaccccgccagagaggagctggagcccaagagagtgagaagcagcggccccgaggccgaggaggtgcaggaggaggaggagctggaggaggagaccggcggcgagggcccccccgcccccatccccaccaccggcagccccagcacccaggagaaccagaacggcctggagcccgccgagggcaccaccagcggccccagcgcccccttcagcaccctgacccccagactgcacctgccctgcccccagcagcccccccagcagcagctgtag

SEQ ID NO: 87493 - DNA, 4551 bp, synthetic construct
  misc_feature 1..4551: note = Description of Artificial Sequence: Synthetic coding sequence
  source 1..4551: mol_type = other DNA
atggagcccggcagcgacgacttcctgcccccccccgagtgccccgtgttcgagcccagctgggccgagttcagagaccccctgggctacatcgccaagatcagacccatcgccgagaagagcggcatctgcaagatcagaccccccgccgactggcagccccccttcgccgtggaggtggacaacttcagattcacccccagaatccagagactgaacgagctggagatcgtggtggaggagggcggctacgaggccatctgcaaggacagaagatgggccagagtggcccagagactgaactacccccccggcaagaacatcggcagcctgctgagaagccactacgagagaatcgtgtacccctacgagatgtaccagagcggcgccaacctggtgcagtgcaacaccagacccttcgacaacgaggagaaggacaaggagtacaagccccacagcatccccctgagacagagcgtgcagcccagcaagttcaacagctacggcagaagagccaagagactgcagcccgaccccgagcccaccgaggaggacatcgagaagaaccccgagctgaagaagctgcagatctacggcgccggccccaagatgatgggcctgggcctgatggccaaggacaagaccctgagaaagaaggacaaggagggccccgagtgcccccccaccgtggtggtgaaggaggagctgggcggcgacgtgaaggtggagagcaccagccccaagaccttcctggagagcaaggaggagctgagccacagccccgagccctgcaccaagatgaccatgagactgagaagaaaccacagcaacgcccagttcatcgagagctacgtgtgcagaatgtgcagcagaggcgacgaggacgacaagctgctgctgtgcgacggctgcgacgacaactaccacatcttctgcctgctgccccccctgcccgagatccccaagggcgtgtggagatgccccaagtgcgtgatggccgagtgcaagagaccccccgaggccttcggcttcgagcaggccaccagagagtacaccctgcagagcttcggcgagatggccgacagcttcaaggccgactacttcaacatgcccgtgcacatggtgcccaccgagctggtggagaaggagttctggagactggtgaacagcatcgaggaggacgtgaccgtggagtacggcgccgacatccacagcaaggagttcggcagcggcttccccgtgagcgacagcaagagacacctgacccccgaggaggaggagtacgccaccagcggctggaacctgaacgtgatgcccgtgctggagcagagcgtgctgtgccacatcaacgccgacatcagcggcatgaaggtgccctggctgtacgtgggcatggtgttcagcgccttctgctggcacatcgaggaccactggagctacagcatcaactacctgcactggggcgagcccaagacctggtacggcgtgcccagcctggccgccgagcacctggaggaggtgatgaagaagctgacccccgagctgttcgacagccagcccgacctgctgcaccagctggtgaccctgatgaaccccaacaccctgatgagccacggcgtgcccgtggtgagaaccaaccagtgcgccggcgagttcgtgatcaccttccccagagcctaccacagcggcttcaaccagggctacaacttcgccgaggccgtgaacttctgcaccgccgactggctgcccgccggcagacagtgcatcgagcactacagaagactgagaagatactgcgtgttcagccacgaggagctgatctgcaagatggccgcctgccccgagaagctggacctgaacctggccgccgccgtgcacaaggagatgttcatcatggtgcaggaggagagaagactgagaaaggccctgctggagaagggcatcaccgaggccgagagagaggccttcgagctgctgcccgacgacgagagacagtgcatcaagtgcaagaccacctgcttcctgagcgccctggcctgctacgactgccccgacggcctggtgtgcctgagccacatcaacgacctgtgcaagtgcagcagcagcagacagtacctgagatacagatacaccctggacgagctgcccgccatgctgcacaagctgaaggtgagagccgagagcttcgacacctgggccaacaaggtgagagtggccctggaggtggaggacggcagaaagagaagcctggaggagctgagagccctggagagcgaggccagagagagaagattccccaacagcgagctgctgcagcagctgaagaactgcctgagcgaggccgaggcctgcgtgagcagagccctgggcctggtgagcggccaggaggccggcccccacagagtggccggcctgcagatgaccctgaccgagctgagagccttcctggaccagatgaacaacctgccctgcgccatgcaccagatcggcgacgtgaagggcgtgctggagcaggtggaggcctaccaggccgaggccagagaggccctggccagcctgcccagcagccccggcctgctgcagagcctgctggagagaggcagacagctgggcgtggaggtgcccgaggcccagcagctgcagagacaggtggagcaggccagatggctggacgaggtgaagagaaccctggcccccagcgccagaagaggcaccctggccgtgatgagaggcctgctggtggccggcgccagcgtggcccccagccccgccgtggacaaggcccaggccgagctgcaggagctgctgaccatcgccgagagatgggaggagaaggcccacctgtgcctggaggccagacagaagcacccccccgccaccctggaggccatcatcagagaggccgagaacatccccgtgcacctgcccaacatccaggccctgaaggaggccctggccaaggccagagcctggatcgccgacgtggacgagatccagaacggcgaccactacccctgcctggacgacctggagggcctggtggccgtgggcagagacctgcccgtgggcctggaggagctgagacagctggagctgcaggtgctgaccgcccacagctggagagagaaggccagcaagaccttcctgaagaagaacagctgctacaccctgctggaggtgctgtgcccctgcgccgacgccggcagcgacagcaccaagagaagcagatggatggagaaggagctgggcctgtacaagagcgacaccgagctgctgggcctgagcgcccaggacctgagagaccccggcagcgtgatcgtggccttcaaggagggcgagcagaaggagaaggagggcatcctgcagctgagaagaaccaacagcgccaagcccagccccctggccagcagcagcaccgccagcagcaccaccagcatctgcgtgtgcggccaggtgctggccggcgccggcgccctgcagtgcgacctgtgccaggactggttccacggcagatgcgtgagcgtgcccagactgctgagcagccccagacccaaccccaccagcagccccctgctggcctggtgggagtgggacaccaagttcctgtgccccctgtgcatgagaagcagaagacccagactggagaccatcctggccctgctggtggccctgcagagactgcccgtgagactgcccgagggcgaggccctgcagtgcctgaccgagagagccatcagctggcagggcagagccagacaggccctggccagcgaggacgtgaccgccctgctgggcagactggccgagctgagacagagactgcaggccgagcccagacccgaggagccccccaactaccccgccgcccccgccagcgaccccctgagagagggcagcggcaaggacatgcccaaggtgcagggcctgctggagaacggcgacagcgtgaccagccccgagaaggtggcccccgaggagggcagcgacctggagctgctgagcagcctgctgccccagctgaccggccccgtgctggagctgcccgaggccaccagagcccccctggaggagctgatgatggagggcgacctgctggaggtgaccctggacgagaaccacagcatctggcagctgctgcaggccggccagccccccgacctggagagaatcagaaccctgctggagctggagaaggccgagagacacggcagcagagccagaggcagagccctggagagaagaagaagaagaaaggtggacagaggcggcgagggcgacgaccccgccagagaggagctggagcccaagagagtgagaagcagcggccccgaggccgaggaggtgcaggaggaggaggagctggaggaggagaccggcggcgagggcccccccgcccccatccccaccaccggcagccccagcacccaggagaaccagaacggcctggagcccgccgagggcaccaccagcggccccagcgcccccttcagcaccctgacccccagactgcacctgccctgcccccagcagcccccccagcagcagctgtag

SEQ ID NO: 87494 - DNA, 4683 bp, synthetic construct
  misc_feature 1..4683: note = Description of Artificial Sequence: Synthetic coding sequence
  source 1..4683: mol_type = other DNA
atggagcccggcagcgacgacttcctgcccccccccgagtgccccgtgttcgagcccagctgggccgagttcagagaccccctgggctacatcgccaagatcagacccatcgccgagaagagcggcatctgcaagatcagaccccccgccgactggcagccccccttcgccgtggaggtggacaacttcagattcacccccagaatccagagactgaacgagctggaggcccagaccagagtgaagctgaactacctggaccagatcgccaagttctgggagatccagggcagcagcctgaagatccccaacgtggagagaagaatcctggacctgtacagcctgagcaagatcgtggtggaggagggcggctacgaggccatctgcaaggacagaagatgggccagagtggcccagagactgaactacccccccggcaagaacatcggcagcctgctgagaagccactacgagagaatcgtgtacccctacgagatgtaccagagcggcgccaacctggtgcagtgcaacaccagacccttcgacaacgaggagaaggacaaggagtacaagccccacagcatccccctgagacagagcgtgcagcccagcaagttcaacagctacggcagaagagccaagagactgcagcccgaccccgagcccaccgaggaggacatcgagaagaaccccgagctgaagaagctgcagatctacggcgccggccccaagatgatgggcctgggcctgatggccaaggacaagaccctgagaaagaaggacaaggagggccccgagtgcccccccaccgtggtggtgaaggaggagctgggcggcgacgtgaaggtggagagcaccagccccaagaccttcctggagagcaaggaggagctgagccacagccccgagccctgcaccaagatgaccatgagactgagaagaaaccacagcaacgcccagttcatcgagagctacgtgtgcagaatgtgcagcagaggcgacgaggacgacaagctgctgctgtgcgacggctgcgacgacaactaccacatcttctgcctgctgccccccctgcccgagatccccaagggcgtgtggagatgccccaagtgcgtgatggccgagtgcaagagaccccccgaggccttcggcttcgagcaggccaccagagagtacaccctgcagagcttcggcgagatggccgacagcttcaaggccgactacttcaacatgcccgtgcacatggtgcccaccgagctggtggagaaggagttctggagactggtgaacagcatcgaggaggacgtgaccgtggagtacggcgccgacatccacagcaaggagttcggcagcggcttccccgtgagcgacagcaagagacacctgacccccgaggaggaggagtacgccaccagcggctggaacctgaacgtgatgcccgtgctggagcagagcgtgctgtgccacatcaacgccgacatcagcggcatgaaggtgccctggctgtacgtgggcatggtgttcagcgccttctgctggcacatcgaggaccactggagctacagcatcaactacctgcactggggcgagcccaagacctggtacggcgtgcccagcctggccgccgagcacctggaggaggtgatgaagaagctgacccccgagctgttcgacagccagcccgacctgctgcaccagctggtgaccctgatgaaccccaacaccctgatgagccacggcgtgcccgtggtgagaaccaaccagtgcgccggcgagttcgtgatcaccttccccagagcctaccacagcggcttcaaccagggctacaacttcgccgaggccgtgaacttctgcaccgccgactggctgcccgccggcagacagtgcatcgagcactacagaagactgagaagatactgcgtgttcagccacgaggagctgatctgcaagatggccgcctgccccgagaagctggacctgaacctggccgccgccgtgcacaaggagatgttcatcatggtgcaggaggagagaagactgagaaaggccctgctggagaagggcatcaccgaggccgagagagaggccttcgagctgctgcccgacgacgagagacagtgcatcaagtgcaagaccacctgcttcctgagcgccctggcctgctacgactgccccgacggcctggtgtgcctgagccacatcaacgacctgtgcaagtgcagcagcagcagacagtacctgagatacagatacaccctggacgagctgcccgccatgctgcacaagctgaaggtgagagccgagagcttcgacacctgggccaacaaggtgagagtggccctggaggtggaggacggcagaaagagaagcctggaggagctgagagccctggagagcgaggccagagagagaagattccccaacagcgagctgctgcagcagctgaagaactgcctgagcgaggccgaggcctgcgtgagcagagccctgggcctggtgagcggccaggaggccggcccccacagagtggccggcctgcagatgaccctgaccgagctgagagccttcctggaccagatgaacaacctgccctgcgccatgcaccagatcggcgacgtgaagggcgtgctggagcaggtggaggcctaccaggccgaggccagagaggccctggccagcctgcccagcagccccggcctgctgcagagcctgctggagagaggcagacagctgggcgtggaggtgcccgaggcccagcagctgcagagacaggtggagcaggccagatggctggacgaggtgaagagaaccctggcccccagcgccagaagaggcaccctggccgtgatgagaggcctgctggtggccggcgccagcgtggcccccagccccgccgtggacaaggcccaggccgagctgcaggagctgctgaccatcgccgagagatgggaggagaaggcccacctgtgcctggaggccagacagaagcacccccccgccaccctggaggccatcatcagagaggccgagaacatccccgtgcacctgcccaacatccaggccctgaaggaggccctggccaaggccagagcctggatcgccgacgtggacgagatccagaacggcgaccactacccctgcctggacgacctggagggcctggtggccgtgggcagagacctgcccgtgggcctggaggagctgagacagctggagctgcaggtgctgaccgcccacagctggagagagaaggccagcaagaccttcctgaagaagaacagctgctacaccctgctggaggtgctgtgcccctgcgccgacgccggcagcgacagcaccaagagaagcagatggatggagaaggagctgggcctgtacaagagcgacaccgagctgctgggcctgagcgcccaggacctgagagaccccggcagcgtgatcgtggccttcaaggagggcgagcagaaggagaaggagggcatcctgcagctgagaagaaccaacagcgccaagcccagccccctggccagcagcagcaccgccagcagcaccaccagcatctgcgtgtgcggccaggtgctggccggcgccggcgccctgcagtgcgacctgtgccaggactggttccacggcagatgcgtgagcgtgcccagactgctgagcagccccagacccaaccccaccagcagccccctgctggcctggtgggagtgggacaccaagttcctgtgccccctgtgcatgagaagcagaagacccagactggagaccatcctggccctgctggtggccctgcagagactgcccgtgagactgcccgagggcgaggccctgcagtgcctgaccgagagagccatcagctggcagggcagagccagacaggccctggccagcgaggacgtgaccgccctgctgggcagactggccgagctgagacagagactgcaggccgagcccagacccgaggagccccccaactaccccgccgcccccgccagcgaccccctgagagagggcagcggcaaggacatgcccaaggtgcagggcctgctggagaacggcgacagcgtgaccagccccgagaaggtggcccccgaggagggcagcggcaagagagacctggagctgctgagcagcctgctgccccagctgaccggccccgtgctggagctgcccgaggccaccagagcccccctggaggagctgatgatggagggcgacctgctggaggtgaccctggacgagaaccacagcatctggcagctgctgcaggccggccagccccccgacctggagagaatcagaaccctgctggagctggagaaggccgagagacacggcagcagagccagaggcagagccctggagagaagaagaagaagaaaggtggacagaggcggcgagggcgacgaccccgccagagaggagctggagcccaagagagtgagaagcagcggccccgaggccgaggaggtgcaggaggaggaggagctggaggaggagaccggcggcgagggcccccccgcccccatccccaccaccggcagccccagcacccaggagaaccagaacggcctggagcccgccgagggcaccaccagcggccccagcgcccccttcagcaccctgacccccagactgcacctgccctgcccccagcagcccccccagcagcagctgtag

SEQ ID NO: 87495 - DNA, 4680 bp, synthetic construct
  misc_feature 1..4680: note = Description of Artificial Sequence: Synthetic coding sequence
  source 1..4680: mol_type = other DNA
atggagcccggcagcgacgacttcctgcccccccccgagtgccccgtgttcgagcccagctgggccgagttcagagaccccctgggctacatcgccaagatcagacccatcgccgagaagagcggcatctgcaagatcagaccccccgccgactggcagccccccttcgccgtggaggtggacaacttcagattcacccccagaatccagagactgaacgagctggaggcccagaccagagtgaagctgaactacctggaccagatcgccaagttctgggagatccagggcagcagcctgaagatccccaacgtggagagaagaatcctggacctgtacagcctgagcaagatcgtggtggaggagggcggctacgaggccatctgcaaggacagaagatgggccagagtggcccagagactgaactacccccccggcaagaacatcggcagcctgctgagaagccactacgagagaatcgtgtacccctacgagatgtaccagagcggcgccaacctggtgtgcaacaccagacccttcgacaacgaggagaaggacaaggagtacaagccccacagcatccccctgagacagagcgtgcagcccagcaagttcaacagctacggcagaagagccaagagactgcagcccgaccccgagcccaccgaggaggacatcgagaagaaccccgagctgaagaagctgcagatctacggcgccggccccaagatgatgggcctgggcctgatggccaaggacaagaccctgagaaagaaggacaaggagggccccgagtgcccccccaccgtggtggtgaaggaggagctgggcggcgacgtgaaggtggagagcaccagccccaagaccttcctggagagcaaggaggagctgagccacagccccgagccctgcaccaagatgaccatgagactgagaagaaaccacagcaacgcccagttcatcgagagctacgtgtgcagaatgtgcagcagaggcgacgaggacgacaagctgctgctgtgcgacggctgcgacgacaactaccacatcttctgcctgctgccccccctgcccgagatccccaagggcgtgtggagatgccccaagtgcgtgatggccgagtgcaagagaccccccgaggccttcggcttcgagcaggccaccagagagtacaccctgcagagcttcggcgagatggccgacagcttcaaggccgactacttcaacatgcccgtgcacatggtgcccaccgagctggtggagaaggagttctggagactggtgaacagcatcgaggaggacgtgaccgtggagtacggcgccgacatccacagcaaggagttcggcagcggcttccccgtgagcgacagcaagagacacctgacccccgaggaggaggagtacgccaccagcggctggaacctgaacgtgatgcccgtgctggagcagagcgtgctgtgccacatcaacgccgacatcagcggcatgaaggtgccctggctgtacgtgggcatggtgttcagcgccttctgctggcacatcgaggaccactggagctacagcatcaactacctgcactggggcgagcccaagacctggtacggcgtgcccagcctggccgccgagcacctggaggaggtgatgaagaagctgacccccgagctgttcgacagccagcccgacctgctgcaccagctggtgaccctgatgaaccccaacaccctgatgagccacggcgtgcccgtggtgagaaccaaccagtgcgccggcgagttcgtgatcaccttccccagagcctaccacagcggcttcaaccagggctacaacttcgccgaggccgtgaacttctgcaccgccgactggctgcccgccggcagacagtgcatcgagcactacagaagactgagaagatactgcgtgttcagccacgaggagctgatctgcaagatggccgcctgccccgagaagctggacctgaacctggccgccgccgtgcacaaggagatgttcatcatggtgcaggaggagagaagactgagaaaggccctgctggagaagggcatcaccgaggccgagagagaggccttcgagctgctgcccgacgacgagagacagtgcatcaagtgcaagaccacctgcttcctgagcgccctggcctgctacgactgccccgacggcctggtgtgcctgagccacatcaacgacctgtgcaagtgcagcagcagcagacagtacctgagatacagatacaccctggacgagctgcccgccatgctgcacaagctgaaggtgagagccgagagcttcgacacctgggccaacaaggtgagagtggccctggaggtggaggacggcagaaagagaagcctggaggagctgagagccctggagagcgaggccagagagagaagattccccaacagcgagctgctgcagcagctgaagaactgcctgagcgaggccgaggcctgcgtgagcagagccctgggcctggtgagcggccaggaggccggcccccacagagtggccggcctgcagatgaccctgaccgagctgagagccttcctggaccagatgaacaacctgccctgcgccatgcaccagatcggcgacgtgaagggcgtgctggagcaggtggaggcctaccaggccgaggccagagaggccctggccagcctgcccagcagccccggcctgctgcagagcctgctggagagaggcagacagctgggcgtggaggtgcccgaggcccagcagctgcagagacaggtggagcaggccagatggctggacgaggtgaagagaaccctggcccccagcgccagaagaggcaccctggccgtgatgagaggcctgctggtggccggcgccagcgtggcccccagccccgccgtggacaaggcccaggccgagctgcaggagctgctgaccatcgccgagagatgggaggagaaggcccacctgtgcctggaggccagacagaagcacccccccgccaccctggaggccatcatcagagaggccgagaacatccccgtgcacctgcccaacatccaggccctgaaggaggccctggccaaggccagagcctggatcgccgacgtggacgagatccagaacggcgaccactacccctgcctggacgacctggagggcctggtggccgtgggcagagacctgcccgtgggcctggaggagctgagacagctggagctgcaggtgctgaccgcccacagctggagagagaaggccagcaagaccttcctgaagaagaacagctgctacaccctgctggaggtgctgtgcccctgcgccgacgccggcagcgacagcaccaagagaagcagatggatggagaaggagctgggcctgtacaagagcgacaccgagctgctgggcctgagcgcccaggacctgagagaccccggcagcgtgatcgtggccttcaaggagggcgagcagaaggagaaggagggcatcctgcagctgagaagaaccaacagcgccaagcccagccccctggccagcagcagcaccgccagcagcaccaccagcatctgcgtgtgcggccaggtgctggccggcgccggcgccctgcagtgcgacctgtgccaggactggttccacggcagatgcgtgagcgtgcccagactgctgagcagccccagacccaaccccaccagcagccccctgctggcctggtgggagtgggacaccaagttcctgtgccccctgtgcatgagaagcagaagacccagactggagaccatcctggccctgctggtggccctgcagagactgcccgtgagactgcccgagggcgaggccctgcagtgcctgaccgagagagccatcagctggcagggcagagccagacaggccctggccagcgaggacgtgaccgccctgctgggcagactggccgagctgagacagagactgcaggccgagcccagacccgaggagccccccaactaccccgccgcccccgccagcgaccccctgagagagggcagcggcaaggacatgcccaaggtgcagggcctgctggagaacggcgacagcgtgaccagccccgagaaggtggcccccgaggagggcagcggcaagagagacctggagctgctgagcagcctgctgccccagctgaccggccccgtgctggagctgcccgaggccaccagagcccccctggaggagctgatgatggagggcgacctgctggaggtgaccctggacgagaaccacagcatctggcagctgctgcaggccggccagccccccgacctggagagaatcagaaccctgctggagctggagaaggccgagagacacggcagcagagccagaggcagagccctggagagaagaagaagaagaaaggtggacagaggcggcgagggcgacgaccccgccagagaggagctggagcccaagagagtgagaagcagcggccccgaggccgaggaggtgcaggaggaggaggagctggaggaggagaccggcggcgagggcccccccgcccccatccccaccaccggcagccccagcacccaggagaaccagaacggcctggagcccgccgagggcaccaccagcggccccagcgcccccttcagcaccctgacccccagactgcacctgccctgcccccagcagcccccccagcagcagctgtag

SEQ ID NO: 87496 - DNA, 4140 bp, synthetic construct
  misc_feature 1..4140: note = Description of Artificial Sequence: Synthetic coding sequence
  source 1..4140: mol_type = other DNA
atggagcccggcagcgacgacttcctgcccccccccgagtgccccgtgttcgagcccagctgggccgagttcagagaccccctgggctacatcgccaagatcagacccatcgccgagaagagcggcatctgcaagatcagaccccccgccatcgtggtggaggagggcggctacgaggccatctgcaaggacagaagatgggccagagtggcccagagactgaactacccccccggcaagaacatcggcagcctgctgagaagccactacgagagaatcgtgtacccctacgagatgtaccagagcggcgccaacctggtgcagtgcaacaccagacccttcgacaacgaggagaaggacaaggagtacaagccccacagcatccccctgagacagagcgtgcagcccagcaagttcaacagctacggcagaagagccaagagactgcagcccgaccccgagcccaccgaggaggacatcgagaagaaccccgagctgaagaagctgcagatctacggcgccggccccaagatgatgggcctgggcctgatggccaaggacaagaccctgagaaagaaggacaaggagggccccgagtgcccccccaccgtggtggtgaaggaggagctgggcggcgacgtgaaggtggagagcaccagccccaagaccttcctggagagcaaggaggagctgagccacagccccgagccctgcaccaagatgaccatgagactgagaagaaaccacagcaacgcccagttcatcgagagctacgtgtgcagaatgtgcagcagaggcgacgaggacgacaagctgctgctgtgcgacggctgcgacgacaactaccacatcttctgcctgctgccccccctgcccgagatccccaagggcgtgtggagatgccccaagtgcgtgatggccgagtgcaagagaccccccgaggccttcggcttcgagcaggccaccagagagtacaccctgcagagcttcggcgagatggccgacagcttcaaggccgactacttcaacatgcccgtgcacatggtgcccaccgagctggtggagaaggagttctggagactggtgaacagcatcgaggaggacgtgaccgtggagtacggcgccgacatccacagcaaggagttcggcagcggcttccccgtgagcgacagcaagagacacctgacccccgaggaggaggagtacgccaccagcggctggaacctgaacgtgatgcccgtgctggagcagagcgtgctgtgccacatcaacgccgacatcagcggcatgaaggtgccctggctgtacgtgggcatggtgttcagcgccttctgctggcacatcgaggaccactggagctacagcatcaactacctgcactggggcgagcccaagacctggtacggcgtgcccagcctggccgccgagcacctggaggaggtgatgaagaagctgacccccgagctgttcgacagccagcccgacctgctgcaccagctggtgaccctgatgaaccccaacaccctgatgagccacggcgtgcccgtggtgagaaccaaccagtgcgccggcgagttcgtgatcaccttccccagagcctaccacagcggcttcaaccagggctacaacttcgccgaggccgtgaacttctgcaccgccgactggctgcccgccggcagacagtgcatcgagcactacagaagactgagaagatactgcgtgttcagccacgaggagctgatctgcaagatggccgcctgccccgagaagctggacctgaacctggccgccgccgtgcacaaggagatgttcatcatggtgcaggaggagagaagactgagaaaggccctgctggagaagggcatcaccgaggccgagagagaggccttcgagctgctgcccgacgacgagagacagtgcatcaagtgcaagaccacctgcttcctgagcgccctggcctgctacgactgccccgacggcctggtgtgcctgagccacatcaacgacctgtgcaagtgcagcagcagcagacagtacctgagatacagatacaccctggacgagctgcccgccatgctgcacaagctgaaggtgagagccgagagcttcgacacctgggccaacaaggtgagagtggccctggaggtggaggacggcagaaagagaagcctggaggagctgagagccctggagagcgaggccagagagagaagattccccaacagcgagctgctgcagcagctgaagaactgcctgagcgaggccgaggcctgcgtgagcagagccctgggcctggtgagcggccaggaggccggcccccacagagtggccggcctgcagatgaccctgaccgagctgagagccttcctggaccagatgaacaacctgccctgcgccatgcaccagatcggcgacgtgaagggcgtgctggagcaggtggaggcctaccaggccgaggccagagaggccctggccagcctgcccagcagccccggcctgctgcagagcctgctggagagaggcagacagctgggcgtggaggtgcccgaggcccagcagctgcagagacaggtggagcaggccagatggctggacgaggtgaagagaaccctggcccccagcgccagaagaggcaccctggccgtgatgagaggcctgctggtggccggcgccagcgtggcccccagccccgccgtggacaaggcccaggccgagctgcaggagctgctgaccatcgccgagagatgggaggagaaggcccacctgtgcctggaggccagacagaagcacccccccgccaccctggaggccatcatcagagaggccgagaacatccccgtgcacctgcccaacatccaggccctgaaggaggccctggccaaggccagagcctggatcgccgacgtggacgagatccagaacggcgaccactacccctgcctggacgacctggagggcctggtggccgtgggcagagacctgcccgtgggcctggaggagctgagacagctggagctgcaggtgctgaccgcccacagctggagagagaaggccagcaagaccttcctgaagaagaacagctgctacaccctgctggaggtgctgtgcccctgcgccgacgccggcagcgacagcaccaagagaagcagatggatggagaaggagctgggcctgtacaagagcgacaccgagctgctgggcctgagcgcccaggacctgagagaccccggcagcgtgatcgtggccttcaaggagggcgagcagaaggagaaggagggcatcctgcagctgagaagaaccaacagcgccaagcccagccccctggccagcagcagcaccgccagcagcaccaccagcatctgcgtgtgcggccaggtgctggccggcgccggcgccctgcagtgcgacctgtgccaggactggttccacggcagatgcgtgagcgtgcccagactgctgagcagccccagacccaaccccaccagcagccccctgctggcctggtgggagtgggacaccaagttcctgtgccccctgtgcatgagaagcagaagacccagactggagaccatcctggccctgctggtggccctgcagagactgcccgtgagactgcccgagggcgaggccctgcagtgcctgaccgagagagccatcagctggcagggcagagccagacaggccctggccagcgaggacgtgaccgccctgctgggcagactggccgagctgagacagagactgcaggccgagcccagacccgaggagccccccaactaccccgccgcccccgccagcgaccccctgagagagggcagcggcaaggacatgcccaaggtgcagggcctgctggagaacggcgacagcgtgaccagccccgagaaggtggcccccgaggagggcagcgacctggagctgctgagcagcctgctgccccagctgaccggccccgtgctggagctgcccgaggccaccagagcccccctggaggagctgatgatggagggcgacctgctggaggtgaccctggacgagaaccacagcatccccgagagcctggacttctgcatcctgacccccagatactgcagcgacctgagcagctggggccccgcccccggcgtgttccccccctggtag

SEQ ID NO: 87497 - DNA, 4620 bp, synthetic construct
  misc_feature 1..4620: note = Description of Artificial Sequence: Synthetic coding sequence
  source 1..4620: mol_type = other DNA
atggagcccggctgcgacgagttcctgcccccccccgagtgccccgtgttcgagcccagctgggccgagttccaggaccccctgggctacatcgccaagatcagacccatcgccgagaagagcggcatctgcaagatcagaccccccgccgactggcagccccccttcgccgtggaggtggacaacttcagattcacccccagagtgcagagactgaacgagctggaggcccagaccagagtgaagctgaactacctggaccagatcgccaagttctgggagatccagggcagcagcctgaagatccccaacgtggagagaaagatcctggacctgtacagcctgagcaagatcgtgatcgaggagggcggctacgaggccatctgcaaggacagaagatgggccagagtggcccagagactgcactacccccccggcaagaacatcggcagcctgctgagaagccactacgagagaatcatctacccctacgagatgttccagagcggcgccaaccacgtgcagtgcaacacccaccccttcgacaacgaggtgaaggacaaggagtacaagccccacagcatccccctgagacagagcgtgcagcccagcaagttcagcagctacagcagaagagccaagagactgcagcccgaccccgagcccaccgaggaggacatcgagaagcaccccgagctgaagaagctgcagatctacggccccggccccaagatgatgggcctgggcctgatggccaaggacaaggacaagaccgtgcacaagaaggtgacctgcccccccaccgtgaccgtgaaggacgagcagagcggcggcggcaacgtgagcagcaccctgctgaagcagcacctgagcctggagccctgcaccaagaccaccatgcagctgagaaagaaccacagcagcgcccagttcatcgacagctacatctgccaggtgtgcagcagaggcgacgaggacgacaagctgctgttctgcgacggctgcgacgacaactaccacatcttctgcctgctgccccccctgcccgagatccccagaggcatctggagatgccccaagtgcatcctggccgagtgcaagcagccccccgaggccttcggcttcgagcaggccacccaggagtacagcctgcagagcttcggcgagatggccgacagcttcaagagcgactacttcaacatgcccgtgcacatggtgcccaccgagctggtggagaaggagttctggagactggtgagcagcatcgaggaggacgtgaccgtggagtacggcgccgacatccacagcaaggagttcggcagcggcttccccgtgagcaacagcaagcagaacctgagccccgaggagaaggagtacgccaccagcggctggaacctgaacgtgatgcccgtgctggaccagagcgtgctgtgccacatcaacgccgacatcagcggcatgaaggtgccctggctgtacgtgggcatggtgttcagcgccttctgctggcacatcgaggaccactggagctacagcatcaactacctgcactggggcgagcccaagacctggtacggcgtgcccagcctggccgccgagcacctggaggaggtgatgaagatgctgacccccgagctgttcgacagccagcccgacctgctgcaccagctggtgaccctgatgaaccccaacaccctgatgagccacggcgtgcccgtggtgagaaccaaccagtgcgccggcgagttcgtgatcaccttccccagagcctaccacagcggcttcaaccagggctacaacttcgccgaggccgtgaacttctgcaccgccgactggctgcccgccggcagacagtgcatcgagcactacagaagactgagaagatactgcgtgttcagccacgaggagctgatctgcaagatggccgccttccccgagaccctggacctgaacctggccgtggccgtgcacaaggagatgttcatcatggtgcaggaggagagaagactgagaaaggccctgctggagaagggcgtgaccgaggccgagagagaggccttcgagctgctgcccgacgacgagagacagtgcatcaagtgcaagaccacctgcttcctgagcgccctggcctgctacgactgccccgacggcctggtgtgcctgagccacatcaacgacctgtgcaagtgcagcagcagcagacagtacctgagatacagatacaccctggacgagctgcccaccatgctgcacaagctgaagatcagagccgagagcttcgacacctgggccaacaaggtgagagtggccctggaggtggaggacggcagaaagagaagcttcgaggagctgagagccctggagagcgaggccagagagagaagattccccaacagcgagctgctgcagagactgaagaactgcctgagcgaggtggaggcctgcatcgcccaggtgctgggcctggtgagcggccaggtggccagaatggacaccccccagctgaccctgaccgagctgagagtgctgctggagcagatgggcagcctgccctgcgccatgcaccagatcggcgacgtgaaggacgtgctggagcaggtggaggcctaccaggccgaggccagagaggccctggccaccctgcccagcagccccggcctgctgagaagcctgctggagagaggccagcagctgggcgtggaggtgcccgaggcccaccagctgcagcagcaggtggagcaggcccagtggctggacgaggtgaagcaggccctggcccccagcgcccacagaggcagcctggtgatcatgcagggcctgctggtgatgggcgccaagatcgccagcagccccagcgtggacaaggccagagccgagctgcaggagctgctgaccatcgccgagagatgggaggagaaggcccacttctgcctggaggccagacagaagcacccccccgccaccctggaggccatcatcagagagaccgagaacatccccgtgcacctgcccaacatccaggccctgaaggaggccctgaccaaggcccaggcctggatcgccgacgtggacgagatccagaacggcgaccactacccctgcctggacgacctggagggcctggtggccgtgggcagagacctgcccgtgggcctggaggagctgagacagctggagctgcaggtgctgaccgcccacagctggagagagaaggccagcaagaccttcctgaagaagaacagctgctacaccctgctggaggtgctgtgcccctgcgccgacgccggcagcgacagcaccaagagaagcagatggatggagaaggccctgggcctgtaccagtgcgacaccgagctgctgggcctgagcgcccaggacctgagagaccccggcagcgtgatcgtggccttcaaggagggcgagcagaaggagaaggagggcatcctgcagctgagaagaaccaacagcgccaagcccagccccctggcccccagcctgatggccagcagccccaccagcatctgcgtgtgcggccaggtgcccgccggcgtgggcgtgctgcagtgcgacctgtgccaggactggttccacggccagtgcgtgagcgtgccccacctgctgaccagccccaagcccagcctgaccagcagccccctgctggcctggtgggagtgggacaccaagttcctgtgccccctgtgcatgagaagcagaagacccagactggagaccatcctggccctgctggtggccctgcagagactgcccgtgagactgcccgagggcgaggccctgcagtgcctgaccgagagagccatcggctggcaggacagagccagaaaggccctggccagcgaggacgtgaccgccctgctgagacagctggccgagctgagacagcagctgcaggccaagcccagacccgaggaggccagcgtgtacaccagcgccaccgcctgcgaccccatcagagagggcagcggcaacaacatcagcaaggtgcagggcctgctggagaacggcgacagcgtgaccagccccgagaacatggcccccggcaagggcagcgacctggagctgctgagcagcctgctgccccagctgaccggccccgtgctggagctgcccgaggccatcagagcccccctggaggagctgatgatggagggcgacctgctggaggtgaccctggacgagaaccacagcatctggcagctgctgcaggccggccagccccccgacctggacagaatcagaaccctgctggagctggagaagttcgagcaccagggcagcagaaccagaagcagagccctggagagaagaagaagaagacagaaggtggaccagggcagaaacgtggagaacctggtgcagcaggagctgcagagcaagagagccagaagcagcggcatcatgagccaggtgggcagagaggaggagcactaccaggagaaggccgacagagagaacatgttcctgacccccagcaccgaccacagccccttcctgaagggcaaccagaacagcctgcagcacaaggacagcggcagcagcgccgcctgccccagcctgatgcccctgctgcagctgagctacagcgacgagcagcagctgtag

SEQ ID NO: 87498 - DNA, 4449 bp, synthetic construct
  misc_feature 1..4449: note = Description of Artificial Sequence: Synthetic coding sequence
  source 1..4449: mol_type = other DNA
atggagcccggctgcgacgagttcctgcccccccccgagtgccccgtgttcgagcccagctgggccgagttccaggaccccctgggctacatcgccaagatcagacccatcgccgagaagagcggcatctgcaagatcagaccccccgccgactggcagccccccttcgccgtggaggtggacaacttcagattcacccccagagtgcagagactgaacgagctggaggcccagaccagagtgaagctgaactacctggaccagatcgccaagttctgggagatccagggcagcagcctgaagatccccaacgtggagagaaagatcctggacctgtacagcctgagcaagcagtgcaacacccaccccttcgacaacgaggtgaaggacaaggagtacaagccccacagcatccccctgagacagagcgtgcagcccagcaagttcagcagctacagcagaagagccaagagactgcagcccgaccccgagcccaccgaggaggacatcgagaagcaccccgagctgaagaagctgcagatctacggccccggccccaagatgatgggcctgggcctgatggccaaggacaaggacaagaccgtgcacaagaaggtgacctgcccccccaccgtgaccgtgaaggacgagcagagcggcggcggcaacgtgagcagcaccctgctgaagcagcacctgagcctggagccctgcaccaagaccaccatgcagctgagaaagaaccacagcagcgcccagttcatcgacagctacatctgccaggtgtgcagcagaggcgacgaggacgacaagctgctgttctgcgacggctgcgacgacaactaccacatcttctgcctgctgccccccctgcccgagatccccagaggcatctggagatgccccaagtgcatcctggccgagtgcaagcagccccccgaggccttcggcttcgagcaggccacccaggagtacagcctgcagagcttcggcgagatggccgacagcttcaagagcgactacttcaacatgcccgtgcacatggtgcccaccgagctggtggagaaggagttctggagactggtgagcagcatcgaggaggacgtgaccgtggagtacggcgccgacatccacagcaaggagttcggcagcggcttccccgtgagcaacagcaagcagaacctgagccccgaggagaaggagtacgccaccagcggctggaacctgaacgtgatgcccgtgctggaccagagcgtgctgtgccacatcaacgccgacatcagcggcatgaaggtgccctggctgtacgtgggcatggtgttcagcgccttctgctggcacatcgaggaccactggagctacagcatcaactacctgcactggggcgagcccaagacctggtacggcgtgcccagcctggccgccgagcacctggaggaggtgatgaagatgctgacccccgagctgttcgacagccagcccgacctgctgcaccagctggtgaccctgatgaaccccaacaccctgatgagccacggcgtgcccgtggtgagaaccaaccagtgcgccggcgagttcgtgatcaccttccccagagcctaccacagcggcttcaaccagggctacaacttcgccgaggccgtgaacttctgcaccgccgactggctgcccgccggcagacagtgcatcgagcactacagaagactgagaagatactgcgtgttcagccacgaggagctgatctgcaagatggccgccttccccgagaccctggacctgaacctggccgtggccgtgcacaaggagatgttcatcatggtgcaggaggagagaagactgagaaaggccctgctggagaagggcgtgaccgaggccgagagagaggccttcgagctgctgcccgacgacgagagacagtgcatcaagtgcaagaccacctgcttcctgagcgccctggcctgctacgactgccccgacggcctggtgtgcctgagccacatcaacgacctgtgcaagtgcagcagcagcagacagtacctgagatacagatacaccctggacgagctgcccaccatgctgcacaagctgaagatcagagccgagagcttcgacacctgggccaacaaggtgagagtggccctggaggtggaggacggcagaaagagaagcttcgaggagctgagagccctggagagcgaggccagagagagaagattccccaacagcgagctgctgcagagactgaagaactgcctgagcgaggtggaggcctgcatcgcccaggtgctgggcctggtgagcggccaggtggccagaatggacaccccccagctgaccctgaccgagctgagagtgctgctggagcagatgggcagcctgccctgcgccatgcaccagatcggcgacgtgaaggacgtgctggagcaggtggaggcctaccaggccgaggccagagaggccctggccaccctgcccagcagccccggcctgctgagaagcctgctggagagaggccagcagctgggcgtggaggtgcccgaggcccaccagctgcagcagcaggtggagcaggcccagtggctggacgaggtgaagcaggccctggcccccagcgcccacagaggcagcctggtgatcatgcagggcctgctggtgatgggcgccaagatcgccagcagccccagcgtggacaaggccagagccgagctgcaggagctgctgaccatcgccgagagatgggaggagaaggcccacttctgcctggaggccagacagaagcacccccccgccaccctggaggccatcatcagagagaccgagaacatccccgtgcacctgcccaacatccaggccctgaaggaggccctgaccaaggcccaggcctggatcgccgacgtggacgagatccagaacggcgaccactacccctgcctggacgacctggagggcctggtggccgtgggcagagacctgcccgtgggcctggaggagctgagacagctggagctgcaggtgctgaccgcccacagctggagagagaaggccagcaagaccttcctgaagaagaacagctgctacaccctgctggaggtgctgtgcccctgcgccgacgccggcagcgacagcaccaagagaagcagatggatggagaaggccctgggcctgtaccagtgcgacaccgagctgctgggcctgagcgcccaggacctgagagaccccggcagcgtgatcgtggccttcaaggagggcgagcagaaggagaaggagggcatcctgcagctgagaagaaccaacagcgccaagcccagccccctggcccccagcctgatggccagcagccccaccagcatctgcgtgtgcggccaggtgcccgccggcgtgggcgtgctgcagtgcgacctgtgccaggactggttccacggccagtgcgtgagcgtgccccacctgctgaccagccccaagcccagcctgaccagcagccccctgctggcctggtgggagtgggacaccaagttcctgtgccccctgtgcatgagaagcagaagacccagactggagaccatcctggccctgctggtggccctgcagagactgcccgtgagactgcccgagggcgaggccctgcagtgcctgaccgagagagccatcggctggcaggacagagccagaaaggccctggccagcgaggacgtgaccgccctgctgagacagctggccgagctgagacagcagctgcaggccaagcccagacccgaggaggccagcgtgtacaccagcgccaccgcctgcgaccccatcagagagggcagcggcaacaacatcagcaaggtgcagggcctgctggagaacggcgacagcgtgaccagccccgagaacatggcccccggcaagggcagcgacctggagctgctgagcagcctgctgccccagctgaccggccccgtgctggagctgcccgaggccatcagagcccccctggaggagctgatgatggagggcgacctgctggaggtgaccctggacgagaaccacagcatctggcagctgctgcaggccggccagccccccgacctggacagaatcagaaccctgctggagctggagaagttcgagcaccagggcagcagaaccagaagcagagccctggagagaagaagaagaagacagaaggtggaccagggcagaaacgtggagaacctggtgcagcaggagctgcagagcaagagagccagaagcagcggcatcatgagccaggtgggcagagaggaggagcactaccaggagaaggccgacagagagaacatgttcctgacccccagcaccgaccacagccccttcctgaagggcaaccagaacagcctgcagcacaaggacagcggcagcagcgccgcctgccccagcctgatgcccctgctgcagctgagctacagcgacgagcagcagctgtag

SEQ ID NO: 87499 - DNA, 882 bp, synthetic construct
  misc_feature 1..882: note = Description of Artificial Sequence: Synthetic coding sequence
  source 1..882: mol_type = other DNA
ctgcccaacatccaggccctgaaggaggccctgaccaaggcccaggcctggatcgccgacgtggacgagatccagaacggcgaccactacccctgcctggacgacctggagggcctggtggccgtgggcagagacctgcccgtgggcctggaggagctgagacagctggagctgcaggtgctgtgcccctgcgccgacgccggcagcgacagcaccaagagaagcagatggatggagaaggccctgggcctgtaccagtgcgacaccgagctgctgggcctgagcgcccaggacctgagagaccccggcagcgtgatcgtggccttcaaggagggcgagcagaaggagaaggagggcatcctgcagctgagaagaaccaacagcgccaagcccagccccctggcccccagcctgatggccagcagccccaccagcatctgcgtgtgcggccaggtgcccgccggcgtgggcgtgctgcagtgcgacctgtgccaggactggttccacggccagtgcgtgagcgtgccccacctgctgaccagccccaagcccagcctgaccagcagccccctgctggcctggtgggagtgggacaccaagttcctgtgccccctgtgcatgagaagcagaagacccagactggagaccatcctggccctgctggtggccctgcagagactgcccgtgagactgcccgagggcgaggccctgcagtgcctgaccgagagagccatcggctggcaggacagagccagaaaggccctggccagcgaggacgtgaccgccctgctgagacagctggccgagctgagacagcagctgcaggccaagcccagacccgaggaggccagcgtgtacaccagcgccaccgcctgcgactag

SEQ ID NO: 87500 - DNA, 4431 bp, synthetic construct
  misc_feature 1..4431: note = Description of Artificial Sequence: Synthetic coding sequence
  source 1..4431: mol_type = other DNA
atggagcccggctgcgacgagttcctgcccccccccgagtgccccgtgttcgagcccagctgggccgagttccaggaccccctgggctacatcgccaagatcagacccatcgccgagaagagcggcatctgcaagatcagaccccccgccgactggcagccccccttcgccgtggaggtggacaacttcagattcacccccagagtgcagagactgaacgagctggagatcgtgatcgaggagggcggctacgaggccatctgcaaggacagaagatgggccagagtggcccagagactgcactacccccccggcaagaacatcggcagcctgctgagaagccactacgagagaatcatctacccctacgagatgttccagagcggcgccaaccacgtgcagtgcaacacccaccccttcgacaacgaggtgaaggacaaggagtacaagccccacagcatccccctgagacagagcgtgcagcccagcaagttcagcagctacagcagaagagccaagagactgcagcccgaccccgagcccaccgaggaggacatcgagaagcaccccgagctgaagaagctgcagatctacggccccggccccaagatgatgggcctgggcctgatggccaaggacaaggacaagaccgtgcacaagaaggtgacctgcccccccaccgtgaccgtgaaggacgagcagagcggcggcggcaacgtgagcagcaccctgctgaagcagcacctgagcctggagccctgcaccaagaccaccatgcagctgagaaagaaccacagcagcgcccagttcatcgacagctacatctgccaggtgtgcagcagaggcgacgaggacgacaagctgctgttctgcgacggctgcgacgacaactaccacatcttctgcctgctgccccccctgcccgagatccccagaggcatctggagatgccccaagtgcatcctggccgagtgcaagcagccccccgaggccttcggcttcgagcaggccacccaggagtacagcctgcagagcttcggcgagatggccgacagcttcaagagcgactacttcaacatgcccgtgcacatggtgcccaccgagctggtggagaaggagttctggagactggtgagcagcatcgaggaggacgtgaccgtggagtacggcgccgacatccacagcaaggagttcggcagcggcttccccgtgagcaacagcaagcagaacctgagccccgaggagaaggagtacgccaccagcggctggaacctgaacgtgatgcccgtgctggaccagagcgtgctgtgccacatcaacgccgacatcagcggcatgaaggtgccctggctgtacgtgggcatggtgttcagcgccttctgctggcacatcgaggaccactggagctacagcatcaactacctgcactggggcgagcccaagacctggtacggcgtgcccagcctggccgccgagcacctggaggaggtgatgaagatgctgacccccgagctgttcgacagccagcccgacctgctgcaccagctggtgaccctgatgaaccccaacaccctgatgagccacggcgtgcccgtggtgagaaccaaccagtgcgccggcgagttcgtgatcaccttccccagagcctaccacagcggcttcaaccagggctacaacttcgccgaggccgtgaacttctgcaccgccgactggctgcccgccggcagacagtgcatcgagcactacagaagactgagaagatactgcgtgttcagccacgaggagctgatctgcaagatggccgccttccccgagaccctggacctgaacctggccgtggccgtgcacaaggagatgttcatcatggtgcaggaggagagaagactgagaaaggccctgctggagaagggcgtgaccgaggccgagagagaggccttcgagctgctgcccgacgacgagagacagtgcatcaagtgcaagaccacctgcttcctgagcgccctggcctgctacgactgccccgacggcctggtgtgcctgagccacatcaacgacctgtgcaagtgcagcagcagcagacagtacctgagatacagatacaccctggacgagctgcccaccatgctgcacaagctgaagatcagagccgagagcttcgacacctgggccaacaaggtgagagtggccctggaggtggaggacggcagaaagagaagcttcgaggagctgagagccctggagagcgaggccagagagagaagattccccaacagcgagctgctgcagagactgaagaactgcctgagcgaggtggaggcctgcatcgcccaggtgctgggcctggtgagcggccaggtggccagaatggacaccccccagctgaccctgaccgagctgagagtgctgctggagcagatgggcagcctgccctgcgccatgcaccagatcggcgacgtgaaggacgtgctggagcaggtggaggcctaccaggccgaggccagagaggccctggccaccctgcccagcagccccggcctgctgagaagcctgctggagagaggccagcagctgggcgtggaggtgcccgaggcccaccagctgcagcagcaggtggagcaggcccagtggctggacgaggtgaagcaggccctggcccccagcgcccacagaggcagcctggtgatcatgcagggcctgctggtgatgggcgccaagatcgccagcagccccagcgtggacaaggccagagccgagctgcaggagctgctgaccatcgccgagagatgggaggagaaggcccacttctgcctggaggccagacagaagcacccccccgccaccctggaggccatcatcagagagaccgagaacatccccgtgcacctgcccaacatccaggccctgaaggaggccctgaccaaggcccaggcctggatcgccgacgtggacgagatccagaacggcgaccactacccctgcctggacgacctggagggcctggtggccgtgggcagagacctgcccgtgggcctggaggagctgagacagctggagctgcaggtgctgaccgcccacagctggagagagaaggccagcaagaccttcctgaagaagaacagctgctacaccctgctggaggtgctgtgcccctgcgccgacgccggcagcgacagcaccaagagaagcagatggatggagaaggccctgggcctgtaccagtgcgacaccgagctgctgggcctgagcgcccaggacctgagagaccccggcagcgtgatcgtggccttcaaggagggcgagcagaaggagaaggagggcatcctgcagctgagaagaaccaacagcgccaagcccagccccctggcccccagcctgatggccagcagccccaccagcatctgcgtgtgcggccaggtgcccgccggcgtgggcgtgctgcagtgcgacctgtgccaggactggttccacggccagtgcgtgagcgtgccccacctgctgaccagccccaagcccagcctgaccagcagccccctgctggcctggtgggagtgggacaccaagttcctgtgccccctgtgcatgagaagcagaagacccagactggagaccatcctggccctgctggtggccctgcagagactgcccgtgagactgcccgagggcgaggccctgcagtgcctgaccgagagagccatcggctggcaggacagagccagaaaggccctggccagcgaggacgtgaccgccctgctgagacagctggccgagctgagacagcagctgcaggccaagcccagacccgaggaggccagcgtgtacaccagcgccaccgcctgcgaccccatcagagagggcagcggcaacaacatcagcaaggtgcagggcctgctggagaacggcgacagcgtgaccagccccgagaacatggcccccggcaagggcagcgacctggagctgctgagcagcctgctgccccagctgaccggccccgtgctggagctgcccgaggccatcagagcccccctggaggagctgatgatggagggcgacctgctggaggtgaccctggacgagaaccacagcatctggcagctgctgcaggccggccagccccccgacctggacagaatcagaaccctgctggagctggagaagttcgagcaccagggcagcagaaccagaagcagagccctggagagaagaagaagaagacagaaggtggaccagggcagaaacgtggagaacctggtgcagcaggagctgcagagcaagagagccagaagcagcggcatcatgagccaggtgggcagagaggaggagcactaccaggagaaggccgacagagagaacatgttcctgacccccagcaccgaccacagccccttcctgaagggcaaccagaacagcctgcagcacaaggacagcggctag

SEQ ID NO: 87501 - DNA, 1278 bp, synthetic construct
  misc_feature 1..1278: note = Description of Artificial Sequence: Synthetic coding sequence
  source 1..1278: mol_type = other DNA
atggagcccggctgcgacgagttcctgcccccccccgagtgccccgtgttcgagcccagctgggccgagttccaggaccccctgggctacatcgccaagatcagacccatcgccgagaagagcggcatctgcaagatcagaccccccgccgactggcagccccccttcgccgtggaggtggacaacttcagattcacccccagagtgcagagactgaacgagctggaggcccagaccagagtgaagctgaactacctggaccagatcgccaagttctgggagatccagggcagcagcctgaagatccccaacgtggagagaaagatcctggacctgtacagcctgagcaagatcgtgatcgaggagggcggctacgaggccatctgcaaggacagaagatgggccagagtggcccagagactgcactacccccccggcaagaacatcggcagcctgctgagaagccactacgagagaatcatctacccctacgagatgttccagagcggcgccaaccacgtgcccgagcccaccgaggaggacatcgagaagcaccccgagctgaagaagctgcagatctacggccccggccccaagatgatgggcctgggcctgatggccaaggacaaggacaagaccgtgcacaagaaggtgacctgcccccccaccgtgaccgtgaaggacgagcagagcggcggcggcaacgtgagcagcaccctgctgaagcagcacctgagcctggagccctgcaccaagaccaccatgcagctgagaaagaaccacagcagcgcccagttcatcgacagctacatctgccaggtgtgcagcagaggcgacgaggacgacaagctgctgttctgcgacggctgcgacgacaactaccacatcttctgcctgctgccccccctgcccgagatccccagaggcatctggagatgccccaagtgcatcctggccgagtgcaagcagccccccgaggccttcggcttcgagcaggccacccaggagtacagcctgcagagcttcggcgagatggccgacagcttcaagagcgactacttcaacatgcccgtgcacatggtgcccaccgagctggtggagaaggagttctggagactggtgagcagcatcgaggaggacgtgaccgtggagtacggcgccgacatccacagcaaggagttcggcagcggcttccccgtgagcaacagcaagcagaacctgagccccgaggagaaggagtacgccaccagcggctggaacctgaacgtgatgccctag

SEQ ID NO: 87502 - DNA, 2667 bp, synthetic construct
  misc_feature 1..2667: note = Description of Artificial Sequence: Synthetic coding sequence
  source 1..2667: mol_type = other DNA
atggagcccggctgcgacgagttcctgcccccccccgagtgccccgtgttcgagcccagctgggccgagttccaggaccccctgggctacatcgccaagatcagacccatcgccgagaagagcggcatctgcaagatcagaccccccgccgactggcagccccccttcgccgtggaggtggacaacttcagattcacccccagagtgcagagactgaacgagctggaggcccagaccagagtgaagctgaactacctggaccagatcgccaagttctgggagatccagggcagcagcctgaagatccccaacgtggagagaaagatcctggacctgtacagcctgagcaagatcgtgatcgaggagggcggctacgaggccatctgcaaggacagaagatgggccagagtggcccagagactgcactacccccccggcaagaacatcggcagcctgctgagaagccactacgagagaatcatctacccctacgagatgttccagagcggcgccaaccacgtgcagtgcaacacccaccccttcgacaacgaggtgaaggacaaggagtacaagccccacagcatccccctgagacagagcgtgcagcccagcaagttcagcagctacagcagaagagccaagagactgcagcccgaccccgagcccaccgaggaggacatcgagaagcaccccgagctgaagaagctgcagatctacggccccggccccaagatgatgggcctgggcctgatggccaaggacaaggacaagaccgtgcacaagaaggtgacctgcccccccaccgtgaccgtgaaggacgagcagagcggcggcggcaacgtgagcagcaccctgctgaagcagcacctgagcctggagccctgcaccaagaccaccatgcagctgagaaagaaccacagcagcgcccagttcatcgacagctacatctgccaggtgtgcagcagaggcgacgaggacgacaagctgctgttctgcgacggctgcgacgacaactaccacatcttctgcctgctgccccccctgcccgagatccccagaggcatctggagatgccccaagtgcatcctggccgagtgcaagcagccccccgaggccttcggcttcgagcaggccacccaggagtacagcctgcagagcttcggcgagatggccgacagcttcaagagcgactacttcaacatgcccgtgcacatggtgcccaccgagctggtggagaaggagttctggagactggtgagcagcatcgaggaggacgtgaccgtggagtacggcgccgacatccacagcaaggagttcggcagcggcttccccgtgagcaacagcaagcagaacctgagccccgaggagaaggagtacgccaccagcggctggaacctgaacgtgatgcccgtgctggaccagagcgtgctgtgccacatcaacgccgacatcagcggcatgaaggtgccctggctgtacgtgggcatggtgttcagcgccttctgctggcacatcgaggaccactggagctacagcatcaactacctgcactggggcgagcccaagacctggtacggcgtgcccagcctggccgccgagcacctggaggaggtgatgaagatgctgacccccgagctgttcgacagccagcccgacctgctgcaccagctggtgaccctgatgaaccccaacaccctgatgagccacggcgtgcccgtggtgagaaccaaccagtgcgccggcgagttcgtgatcaccttccccagagcctaccacagcggcttcaaccagggctacaacttcgccgaggccgtgaacttctgcaccgccgactggctgcccgccggcagacagtgcatcgagcactacagaagactgagaagatactgcgtgttcagccacgaggagctgatctgcaagatggccgccttccccgagaccctggacctgaacctggccgtggccgtgcacaaggagatgttcatcatggtgcaggaggagagaagactgagaaaggccctgctggagaagggcgtgaccgaggccgagagagaggccttcgagctgctgcccgacgacgagagacagtgcatcaagtgcaagaccacctgcttcctgagcgccctggcctgctacgactgccccgacggcctggtgtgcctgagccacatcaacgacctgtgcaagtgcagcagcagcagacagtacctgagatacagatacaccctggacgagctgcccaccatgctgcacaagctgaagatcagagccgagagcttcgacacctgggccaacaaggtgagagtggccctggaggtggaggacggcagaaagagaagcttcgaggagctgagagccctggagagcgaggccagagagagaagattccccaacagcgagctgctgcagagactgaagaactgcctgagcgaggtggaggcctgcatcgcccaggtgctgggcctggtgagcggccaggtggccagaatggacaccccccagctgaccctgaccgagctgagagtgctgctggagcagatgggcagcctgccctgcgccatgcaccagatcggcgacgtgaaggtgctgagctggaagtggagaagatacgtgttcccctaccacctgtgcgtgtacagcatgcagggcaacatcctgcccgactag

SEQ ID NO: 87503 - DNA, 4713 bp, synthetic construct
  misc_feature 1..4713: note = Description of Artificial Sequence: Synthetic coding sequence
  source 1..4713: mol_type = other DNA
atggagcccggctgcgacgagttcctgcccccccccgagtgccccgtgttcgagcccagctgggccgagttccaggaccccctgggctacatcgccaagatcagacccatcgccgagaagagcggcatctgcaagatcagaccccccgccgactggcagccccccttcgccgtggaggtggacaacttcagattcacccccagagtgcagagactgaacgagctggaggcccagaccagagtgaagctgaactacctggaccagatcgccaagttctgggagatccagggcagcagcctgaagatccccaacgtggagagaaagatcctggacctgtacagcctgagcaagatcgtgatcgaggagggcggctacgaggccatctgcaaggacagaagatgggccagagtggcccagagactgcactacccccccggcaagaacatcggcagcctgctgagaagccactacgagagaatcatctacccctacgagatgttccagagcggcgccaaccacgtgcagtgcaacacccaccccttcgacaacgaggtgaaggacaaggagtacaagccccacagcatccccctgagacagagcgtgcagcccagcaagttcagcagctacagcagaagagccaagagactgcagcccgaccccgagcccaccgaggaggacatcgagaagcaccccgagctgaagaagctgcagatctacggccccggccccaagatgatgggcctgggcctgatggccaaggacaaggacaagaccgtgcacaagaaggtgacctgcccccccaccgtgaccgtgaaggacgagcagagcggcggcggcaacgtgagcagcaccctgctgaagcagcacctgagcctggagccctgcaccaagaccaccatgcagctgagaaagaaccacagcagcgcccagttcatcgacagctacatctgccaggtgtgcagcagaggcgacgaggacgacaagctgctgttctgcgacggctgcgacgacaactaccacatcttctgcctgctgccccccctgcccgagatccccagaggcatctggagatgccccaagtgcatcctggccgagtgcaagcagccccccgaggccttcggcttcgagcaggccacccaggagtacagcctgcagagcttcggcgagatggccgacagcttcaagagcgactacttcaacatgcccgtgcacatggtgcccaccgagctggtggagaaggagttctggagactggtgagcagcatcgaggaggacgtgaccgtggagtacggcgccgacatccacagcaaggagttcggcagcggcttccccgtgagcaacagcaagcagaacctgagccccgaggagaagagacagagcctgaccgtgctgaccagactgatcagcagcttctgggcccaggccgtgctgcccccctggccccccaaggtgctgggcctgcaggagtacgccaccagcggctggaacctgaacgtgatgcccgtgctggaccagagcgtgctgtgccacatcaacgccgacatcagcggcatgaaggtgccctggctgtacgtgggcatggtgttcagcgccttctgctggcacatcgaggaccactggagctacagcatcaactacctgcactggggcgagcccaagacctggtacggcgtgcccagcctggccgccgagcacctggaggaggtgatgaagatgctgacccccgagctgttcgacagccagcccgacctgctgcaccagctggtgaccctgatgaaccccaacaccctgatgagccacggcgtgcccgtggtgagaaccaaccagtgcgccggcgagttcgtgatcaccttccccagagcctaccacagcggcttcaaccagggctacaacttcgccgaggccgtgaacttctgcaccgccgactggctgcccgccggcagacagtgcatcgagcactacagaagactgagaagatactgcgtgttcagccacgaggagctgatctgcaagatggccgccttccccgagaccctggacctgaacctggccgtggccgtgcacaaggagatgttcatcatggtgcaggaggagagaagactgagaaaggccctgctggagaagggcgtgaccgaggccgagagagaggccttcgagctgctgcccgacgacgagagacagtgcatcaagtgcaagaccacctgcttcctgagcgccctggcctgctacgactgccccgacggcctggtgtgcctgagccacatcaacgacctgtgcaagtgcagcagcagcagacagtacctgagatacagatacaccctggacgagctgcccaccatgctgcacaagctgaagatcagagccgagagcttcgacacctgggccaacaaggtgagagtggccctggaggtggaggacggcagaaagagaagcttcgaggagctgagagccctggagagcgaggccagagagagaagattccccaacagcgagctgctgcagagactgaagaactgcctgagcgaggtggaggcctgcatcgcccaggtgctgggcctggtgagcggccaggtggccagaatggacaccccccagctgaccctgaccgagctgagagtgctgctggagcagatgggcagcctgccctgcgccatgcaccagatcggcgacgtgaaggacgtgctggagcaggtggaggcctaccaggccgaggccagagaggccctggccaccctgcccagcagccccggcctgctgagaagcctgctggagagaggccagcagctgggcgtggaggtgcccgaggcccaccagctgcagcagcaggtggagcaggcccagtggctggacgaggtgaagcaggccctggcccccagcgcccacagaggcagcctggtgatcatgcagggcctgctggtgatgggcgccaagatcgccagcagccccagcgtggacaaggccagagccgagctgcaggagctgctgaccatcgccgagagatgggaggagaaggcccacttctgcctggaggccagacagaagcacccccccgccaccctggaggccatcatcagagagaccgagaacatccccgtgcacctgcccaacatccaggccctgaaggaggccctgaccaaggcccaggcctggatcgccgacgtggacgagatccagaacggcgaccactacccctgcctggacgacctggagggcctggtggccgtgggcagagacctgcccgtgggcctggaggagctgagacagctggagctgcaggtgctgaccgcccacagctggagagagaaggccagcaagaccttcctgaagaagaacagctgctacaccctgctggaggtgctgtgcccctgcgccgacgccggcagcgacagcaccaagagaagcagatggatggagaaggccctgggcctgtaccagtgcgacaccgagctgctgggcctgagcgcccaggacctgagagaccccggcagcgtgatcgtggccttcaaggagggcgagcagaaggagaaggagggcatcctgcagctgagaagaaccaacagcgccaagcccagccccctggcccccagcctgatggccagcagccccaccagcatctgcgtgtgcggccaggtgcccgccggcgtgggcgtgctgcagtgcgacctgtgccaggactggttccacggccagtgcgtgagcgtgccccacctgctgaccagccccaagcccagcctgaccagcagccccctgctggcctggtgggagtgggacaccaagttcctgtgccccctgtgcatgagaagcagaagacccagactggagaccatcctggccctgctggtggccctgcagagactgcccgtgagactgcccgagggcgaggccctgcagtgcctgaccgagagagccatcggctggcaggacagagccagaaaggccctggccagcgaggacgtgaccgccctgctgagacagctggccgagctgagacagcagctgcaggccaagcccagacccgaggaggccagcgtgtacaccagcgccaccgcctgcgaccccatcagagagggcagcggcaacaacatcagcaaggtgcagggcctgctggagaacggcgacagcgtgaccagccccgagaacatggcccccggcaagggcagcgacctggagctgctgagcagcctgctgccccagctgaccggccccgtgctggagctgcccgaggccatcagagcccccctggaggagctgatgatggagggcgacctgctggaggtgaccctggacgagaaccacagcatctggcagctgctgcaggccggccagccccccgacctggacagaatcagaaccctgctggagctggagaagttcgagcaccagggcagcagaaccagaagcagagccctggagagaagaagaagaagacagaaggtggaccagggcagaaacgtggagaacctggtgcagcaggagctgcagagcaagagagccagaagcagcggcatcatgagccaggtgggcagagaggaggagcactaccaggagaaggccgacagagagaacatgttcctgacccccagcaccgaccacagccccttcctgaagggcaaccagaacagcctgcagcacaaggacagcggcagcagcgccgcctgccccagcctgatgcccctgctgcagctgagctacagcgacgagcagcagctgtag

SEQ ID NO: 87504 - DNA, 3297 bp, synthetic construct
  misc_feature 1..3297: note = Description of Artificial Sequence: Synthetic coding sequence
  source 1..3297: mol_type = other DNA
atggacctgggcaccctgtacgagagctgcaaccagccccaggacgccatcaagtgctacctgaacgccaccagaagcaagagctgcagcaacaccagcgccctggccgccagaatcaagtacctgcaggcccagctgtgcaacctgccccagggcagcctgcagaacaagaccaagctgctgcccagcatcgaggaggcctggagcctgcccatccccgccgagctgaccagcagacagggcgccatgaacaccgcccagcaggcctgcaagccccaccaccccaacaccgagcccgtgctgggcctgagccagacccccatcagccagcagagcctgcccctgcacatgatccccagcagccaggtggacgacctgagcagccccgccaagagaaagagaaccagcagccccaccaagaacaccagcgacaactggagcggcggccacgccgtgagccacccccccgtgcagcagcaggcccacagctggtgcctgaccccccagaagctgcagcacctggagcagctgagagccaacagaaacaacctgaaccccgcccagaagctgatgctggagcagctggagagccagttcgtgctgatgcagcagcaccagatgagacccaccggcgtggcccaggtgagaagcaccggcatccccaacggccccaccgccgacagcagcctgcccaccaacagcgtgagcggccagcagccccagctggccctgaccagagtgcccagcgtgagccagcccggcgtgagacccgcctgccccggccagcccctggccaacggccccttcagcgccggccacgtgccctgcagcaccagcagaaccctgggcagcaccgacaccatcctgatcggcaacaaccacatcaccggcagcggcagcaacggcaacgtgccctacctgcagagaaacgccctgaccctgccccacaacagaaccaacctgaccagcagcgccgaggagccctggaagaaccagctgagcaacagcacccagggcctgcacaagggccagagcagccacagcgccggccccaacggcgagagacccctgagcagcaccggccccagccagcacctgcaggccgccggcagcggcatccagaaccagaacggccaccccaccctgcccagcaacagcgtgacccagggcgccgccctgaaccacctgagcagccacaccgccaccagcggcggccagcagggcatcaccctgaccaaggagagcaagcccagcggcaacatcctgaccgtgcccgagaccagcagacacaccggcgagacccccaacagcaccgccagcgtggagggcctgcccaaccacgtgcaccagatgaccgccgacgccgtgtgcagccccagccacggcgacagcaagagccccggcctgctgagcagcgacaacccccagctgagcgccctgctgatgggcaaggccaacaacaacgtgggcaccggcacctgcgacaaggtgaacaacatccaccccgccgtgcacaccaagaccgacaacagcgtggccagcagccccagcagcgccatcagcaccgccacccccagccccaagagcaccgagcagaccaccaccaacagcgtgaccagcctgaacagcccccacagcggcctgcacaccatcaacggcgagggcatggaggagagccagagccccatgaagaccgacctgctgctggtgaaccacaagcccagcccccagatcatccccagcatgagcgtgagcatctaccccagcagcgccgaggtgctgaaggcctgcagaaacctgggcaagaacggcctgagcaacagcagcatcctgctggacaagtgccccccccccagaccccccagcagcccctacccccccctgcccaaggacaagctgaacccccccacccccagcatctacctggagaacaagagagacgccttcttcccccccctgcaccagttctgcaccaaccccaacaaccccgtgaccgtgatcagaggcctggccggcgccctgaagctggacctgggcctgttcagcaccaagaccctggtggaggccaacaacgagcacatggtggaggtgagaacccagctgctgcagcccgccgacgagaactgggaccccaccggcaccaagaagatctggcactgcgagagcaacagaagccacaccaccatcgccaagtacgcccagtaccaggccagcagcttccaggagagcctgagagaggagaacgagaagagaagccaccacaaggaccacagcgacagcgagagcaccagcagcgacaacagcggcagaagaagaaagggccccttcaagaccatcaagttcggcaccaacatcgacctgagcgacgacaagaagtggaagctgcagctgcacgagctgaccaagctgcccgccttcgtgagagtggtgagcgccggcaacctgctgagccacgtgggccacaccatcctgggcatgaacaccgtgcagctgtacatgaaggtgcccggcagcagaacccccggccaccaggagaacaacaacttctgcagcgtgaacatcaacatcggccccggcgactgcgagtggttcgtggtgcccgagggctactggggcgtgctgaacgacttctgcgagaagaacaacctgaacttcctgatgggcagctggtggcccaacctggaggacctgtacgaggccaacgtgcccgtgtacagattcatccagagacccggcgacctggtgtggatcaacgccggcaccgtgcactgggtgcaggccatcggctggtgcaacaacatcgcctggaacgtgggccccctgaccgcctgccagtacaagctggccgtggagagatacgagtggaacaagctgcagagcgtgaagagcatcgtgcccatggtgcacctgagctggaacatggccagaaacatcaaggtgagcgaccccaagctgttcgagatgatcaagtactgcctgctgagaaccctgaagcagtgccagaccctgagagaggccctgatcgccgccggcaaggagatcatctggcacggcagaaccaaggaggagcccgcccactactgcagcatctgcgaggtggaggtgttcgacctgctgttcgtgaccaacgagagcaacagcagaaagacctacatcgtgcactgccaggactgcgccagaaagaccagcggcaacctggagaacttcgtggtgctggagcagtacaagatggaggacctgatgcaggtgtacgaccagttcaccctggccccccccctgcccagcgccagcagctag

SEQ ID NO: 87505 - DNA, 4206 bp, synthetic construct
  misc_feature 1..4206: note = Description of Artificial Sequence: Synthetic coding sequence
  source 1..4206: mol_type = other DNA
atgaagagctgcggcgtgagcctggccaccgccgccgccgccgccgccgccttcggcgacgaggagaagaagatggccgccggcaaggccagcggcgagagcgaggaggccagccccagcctgaccgccgaggagagagaggccctgggcggcctggacagcagactgttcggcttcgtgagattccacgaggacggcgccagaaccaaggccctgctgggcaaggccgtgagatgctacgagagcctgatcctgaaggccgagggcaaggtggagagcgacttcttctgccagctgggccacttcaacctgctgctggaggactaccccaaggccctgagcgcctaccagagatactacagcctgcagagcgactactggaagaacgccgccttcctgtacggcctgggcctggtgtacttccactacaacgccttccagtgggccatcaaggccttccaggaggtgctgtacgtggaccccagcttctgcagagccaaggagatccacctgagactgggcctgatgttcaaggtgaacaccgactacgagagcagcctgaagcacttccagctggccctggtggactgcaacccctgcaccctgagcaacgccgagatccagttccacatcgcccacctgtacgagacccagagaaagtaccacagcgccaaggaggcctacgagcagctgctgcagaccgagaacctgagcgcccaggtgaaggccaccgtgctgcagcagctgggctggatgcaccacaccgtggacctgctgggcgacaaggccaccaaggagagctacgccatccagtacctgcagaagagcctggaggccgaccccaacagcggccagagctggtacttcctgggcagatgctacagcagcatcggcaaggtgcaggacgccttcatcagctacagacagagcatcgacaagagcgaggccagcgccgacacctggtgcagcatcggcgtgctgtaccagcagcagaaccagcccatggacgccctgcaggcctacatctgcgccgtgcagctggaccacggccacgccgccgcctggatggacctgggcaccctgtacgagagctgcaaccagccccaggacgccatcaagtgctacctgaacgccaccagaagcaagagctgcagcaacaccagcgccctggccgccagaatcaagtacctgcaggcccagctgtgcaacctgccccagggcagcctgcagaacaagaccaagctgctgcccagcatcgaggaggcctggagcctgcccatccccgccgagctgaccagcagacagggcgccatgaacaccgcccagcagaacaccagcgacaactggagcggcggccacgccgtgagccacccccccgtgcagcagcaggcccacagctggtgcctgaccccccagaagctgcagcacctggagcagctgagagccaacagaaacaacctgaaccccgcccagaagctgatgctggagcagctggagagccagttcgtgctgatgcagcagcaccagatgagacccaccggcgtggcccaggtgagaagcaccggcatccccaacggccccaccgccgacagcagcctgcccaccaacagcgtgagcggccagcagccccagctggccctgaccagagtgcccagcgtgagccagcccggcgtgagacccgcctgccccggccagcccctggccaacggccccttcagcgccggccacgtgccctgcagcaccagcagaaccctgggcagcaccgacaccatcctgatcggcaacaaccacatcaccggcagcggcagcaacggcaacgtgccctacctgcagagaaacgccctgaccctgccccacaacagaaccaacctgaccagcagcgccgaggagccctggaagaaccagctgagcaacagcacccagggcctgcacaagggccagagcagccacagcgccggccccaacggcgagagacccctgagcagcaccggccccagccagcacctgcaggccgccggcagcggcatccagaaccagaacggccaccccaccctgcccagcaacagcgtgacccagggcgccgccctgaaccacctgagcagccacaccgccaccagcggcggccagcagggcatcaccctgaccaaggagagcaagcccagcggcaacatcctgaccgtgcccgagaccagcagacacaccggcgagacccccaacagcaccgccagcgtggagggcctgcccaaccacgtgcaccagatgaccgccgacgccgtgtgcagccccagccacggcgacagcaagagccccggcctgctgagcagcgacaacccccagctgagcgccctgctgatgggcaaggccaacaacaacgtgggcaccggcacctgcgacaaggtgaacaacatccaccccgccgtgcacaccaagaccgacaacagcgtggccagcagccccagcagcgccatcagcaccgccacccccagccccaagagcaccgagcagaccaccaccaacagcgtgaccagcctgaacagcccccacagcggcctgcacaccatcaacggcgagggcatggaggagagccagagccccatgaagaccgacctgctgctggtgaaccacaagcccagcccccagatcatccccagcatgagcgtgagcatctaccccagcagcgccgaggtgctgaaggcctgcagaaacctgggcaagaacggcctgagcaacagcagcatcctgctggacaagtgccccccccccagaccccccagcagcccctacccccccctgcccaaggacaagctgaacccccccacccccagcatctacctggagaacaagagagacgccttcttcccccccctgcaccagttctgcaccaaccccaacaaccccgtgaccgtgatcagaggcctggccggcgccctgaagctggacctgggcctgttcagcaccaagaccctggtggaggccaacaacgagcacatggtggaggtgagaacccagctgctgcagcccgccgacgagaactgggaccccaccggcaccaagaagatctggcactgcgagagcaacagaagccacaccaccatcgccaagtacgcccagtaccaggccagcagcttccaggagagcctgagagaggagaacgagaagagaagccaccacaaggaccacagcgacagcgagagcaccagcagcgacaacagcggcagaagaagaaagggccccttcaagaccatcaagttcggcaccaacatcgacctgagcgacgacaagaagtggaagctgcagctgcacgagctgaccaagctgcccgccttcgtgagagtggtgagcgccggcaacctgctgagccacgtgggccacaccatcctgggcatgaacaccgtgcagctgtacatgaaggtgcccggcagcagaacccccggccaccaggagaacaacaacttctgcagcgtgaacatcaacatcggccccggcgactgcgagtggttcgtggtgcccgagggctactggggcgtgctgaacgacttctgcgagaagaacaacctgaacttcctgatgggcagctggtggcccaacctggaggacctgtacgaggccaacgtgcccgtgtacagattcatccagagacccggcgacctggtgtggatcaacgccggcaccgtgcactgggtgcaggccatcggctggtgcaacaacatcgcctggaacgtgggccccctgaccgcctgccagtacaagctggccgtggagagatacgagtggaacaagctgcagagcgtgaagagcatcgtgcccatggtgcacctgagctggaacatggccagaaacatcaaggtgagcgaccccaagctgttcgagatgatcaagtactgcctgctgagaaccctgaagcagtgccagaccctgagagaggccctgatcgccgccggcaaggagatcatctggcacggcagaaccaaggaggagcccgcccactactgcagcatctgcgaggtggaggtgttcgacctgctgttcgtgaccaacgagagcaacagcagaaagacctacatcgtgcactgccaggactgcgccagaaagaccagcggcaacctggagaacttcgtggtgctggagcagtacaagatggaggacctgatgcaggtgtacgaccagttcaccctggccccccccctgcccagcgccagcagctag

SEQ ID NO: 87506 - DNA, 4227 bp, synthetic construct
  misc_feature 1..4227: note = Description of Artificial Sequence: Synthetic coding sequence
  source 1..4227: mol_type = other DNA
atgaagagctgcggcgtgagcctggccaccgccgccgccgccgccgccgccttcggcgacgaggagaagaagatggccgccggcaaggccagcggcgagagcgaggaggccagccccagcctgaccgccgaggagagagaggccctgggcggcctggacagcagactgttcggcttcgtgagattccacgaggacggcgccagaaccaaggccctgctgggcaaggccgtgagatgctacgagagcctgatcctgaaggccgagggcaaggtggagagcgacttcttctgccagctgggccacttcaacctgctgctggaggactaccccaaggccctgagcgcctaccagagatactacagcctgcagagcgactactggaagaacgccgccttcctgtacggcctgggcctggtgtacttccactacaacgccttccagtgggccatcaaggccttccaggaggtgctgtacgtggaccccagcttctgcagagccaaggagatccacctgagactgggcctgatgttcaaggtgaacaccgactacgagagcagcctgaagcacttccagctggccctggtggactgcaacccctgcaccctgagcaacgccgagatccagttccacatcgcccacctgtacgagacccagagaaagtaccacagcgccaaggaggcctacgagcagctgctgcagaccgagaacctgagcgcccaggtgaaggccaccgtgctgcagcagctgggctggatgcaccacaccgtggacctgctgggcgacaaggccaccaaggagagctacgccatccagtacctgcagaagagcctggaggccgaccccaacagcggccagagctggtacttcctgggcagatgctacagcagcatcggcaaggtgcaggacgccttcatcagctacagacagagcatcgacaagagcgaggccagcgccgacacctggtgcagcatcggcgtgctgtaccagcagcagaaccagcccatggacgccctgcaggcctacatctgcgccgtgcagctggaccacggccacgccgccgcctggatggacctgggcaccctgtacgagagctgcaaccagccccaggacgccatcaagtgctacctgaacgccaccagaagcaagagctgcagcaacaccagcgccctggccgccagaatcaagtacctgcaggcctgcaagccccaccaccccaacaccgagcccgtgctgggcctgagccagacccccatcagccagcagagcctgcccctgcacatgatccccagcagccaggtggacgacctgagcagccccgccaagagaaagagaaccagcagccccaccaagaacaccagcgacaactggagcggcggccacgccgtgagccacccccccgtgcagcagcaggcccacagctggtgcctgaccccccagaagctgcagcacctggagcagctgagagccaacagaaacaacctgaaccccgcccagaagctgatgctggagcagctggagagccagttcgtgctgatgcagcagcaccagatgagacccaccggcgtggcccaggtgagaagcaccggcatccccaacggccccaccgccgacagcagcctgcccaccaacagcgtgagcggccagcagccccagctggccctgaccagagtgcccagcgtgagccagcccggcgtgagacccgcctgccccggccagcccctggccaacggccccttcagcgccggccacgtgccctgcagcaccagcagaaccctgggcagcaccgacaccatcctgatcggcaacaaccacatcaccggcagcggcagcaacggcaacgtgccctacctgcagagaaacgccctgaccctgccccacaacagaaccaacctgaccagcagcgccgaggagccctggaagaaccagctgagcaacagcacccagggcctgcacaagggccagagcagccacagcgccggccccaacggcgagagacccctgagcagcaccggccccagccagcacctgcaggccgccggcagcggcatccagaaccagaacggccaccccaccctgcccagcaacagcgtgacccagggcgccgccctgaaccacctgagcagccacaccgccaccagcggcggccagcagggcatcaccctgaccaaggagagcaagcccagcggcaacatcctgaccgtgcccgagaccagcagacacaccggcgagacccccaacagcaccgccagcgtggagggcctgcccaaccacgtgcaccagatgaccgccgacgccgtgtgcagccccagccacggcgacagcaagagccccggcctgctgagcagcgacaacccccagctgagcgccctgctgatgggcaaggccaacaacaacgtgggcaccggcacctgcgacaaggtgaacaacatccaccccgccgtgcacaccaagaccgacaacagcgtggccagcagccccagcagcgccatcagcaccgccacccccagccccaagagcaccgagcagaccaccaccaacagcgtgaccagcctgaacagcccccacagcggcctgcacaccatcaacggcgagggcatggaggagagccagagccccatgaagaccgacctgctgctggtgaaccacaagcccagcccccagatcatccccagcatgagcgtgagcatctaccccagcagcgccgaggtgctgaaggcctgcagaaacctgggcaagaacggcctgagcaacagcagcatcctgctggacaagtgccccccccccagaccccccagcagcccctacccccccctgcccaaggacaagctgaacccccccacccccagcatctacctggagaacaagagagacgccttcttcccccccctgcaccagttctgcaccaaccccaacaaccccgtgaccgtgatcagaggcctggccggcgccctgaagctggacctgggcctgttcagcaccaagaccctggtggaggccaacaacgagcacatggtggaggtgagaacccagctgctgcagcccgccgacgagaactgggaccccaccggcaccaagaagatctggcactgcgagagcaacagaagccacaccaccatcgccaagtacgcccagtaccaggccagcagcttccaggagagcctgagagaggagaacgagaagagaagccaccacaaggaccacagcgacagcgagagcaccagcagcgacaacagcggcagaagaagaaagggccccttcaagaccatcaagttcggcaccaacatcgacctgagcgacgacaagaagtggaagctgcagctgcacgagctgaccaagctgcccgccttcgtgagagtggtgagcgccggcaacctgctgagccacgtgggccacaccatcctgggcatgaacaccgtgcagctgtacatgaaggtgcccggcagcagaacccccggccaccaggagaacaacaacttctgcagcgtgaacatcaacatcggccccggcgactgcgagtggttcgtggtgcccgagggctactggggcgtgctgaacgacttctgcgagaagaacaacctgaacttcctgatgggcagctggtggcccaacctggaggacctgtacgaggccaacgtgcccgtgtacagattcatccagagacccggcgacctggtgtggatcaacgccggcaccgtgcactgggtgcaggccatcggctggtgcaacaacatcgcctggaacgtgggccccctgaccgcctgccagtacaagctggccgtggagagatacgagtggaacaagctgcagagcgtgaagagcatcgtgcccatggtgcacctgagctggaacatggccagaaacatcaaggtgagcgaccccaagctgttcgagatgatcaagtactgcctgctgagaaccctgaagcagtgccagaccctgagagaggccctgatcgccgccggcaaggagatcatctggcacggcagaaccaaggaggagcccgcccactactgcagcatctgcgaggtggaggtgttcgacctgctgttcgtgaccaacgagagcaacagcagaaagacctacatcgtgcactgccaggactgcgccagaaagaccagcggcaacctggagaacttcgtggtgctggagcagtacaagatggaggacctgatgcaggtgtacgaccagttcaccctggccccccccctgcccagcgccagcagctag

SEQ ID NO: 87507 - DNA, 3000 bp, synthetic construct
  misc_feature 1..3000: note = Description of Artificial Sequence: Synthetic coding sequence
  source 1..3000: mol_type = other DNA
tgaggcaccctgtacgagagctgcaaccagccccaggacgccatcaagtgctacctgaacgccaccagaagcaagagctgcagcaacaccagcgccctggccgccagaatcaagtacctgcagaacaccagcgacaactggagcggcggccacgccgtgagccacccccccgtgcagcagcaggcccacagctggtgcctgaccccccagaagctgcagcacctggagcagctgagagccaacagaaacaacctgaaccccgcccagaagctgatgctggagcagctggagagccagttcgtgctgatgcagcagcaccagatgagacccaccggcgtggcccaggtgagaagcaccggcatccccaacggccccaccgccgacagcagcctgcccaccaacagcgtgagcggccagcagccccagctggccctgaccagagtgcccagcgtgagccagcccggcgtgagacccgcctgccccggccagcccctggccaacggccccttcagcgccggccacgtgccctgcagcaccagcagaaccctgggcagcaccgacaccatcctgatcggcaacaaccacatcaccggcagcggcagcaacggcaacgtgccctacctgcagagaaacgccctgaccctgccccacaacagaaccaacctgaccagcagcgccgaggagccctggaagaaccagctgagcaacagcacccagggcctgcacaagggccagagcagccacagcgccggccccaacggcgagagacccctgagcagcaccggccccagccagcacctgcaggccgccggcagcggcatccagaaccagaacggccaccccaccctgcccagcaacagcgtgacccagggcgccgccctgaaccacctgagcagccacaccgccaccagcggcggccagcagggcatcaccctgaccaaggagagcaagcccagcggcaacatcctgaccgtgcccgagaccagcagacacaccggcgagacccccaacagcaccgccagcgtggagggcctgcccaaccacgtgcaccagatgaccgccgacgccgtgtgcagccccagccacggcgacagcaagagccccggcctgctgagcagcgacaacccccagctgagcgccctgctgatgggcaaggccaacaacaacgtgggcaccggcacctgcgacaaggtgaacaacatccaccccgccgtgcacaccaagaccgacaacagcgtggccagcagccccagcagcgccatcagcaccgccacccccagccccaagagcaccgagcagaccaccaccaacagcgtgaccagcctgaacagcccccacagcggcctgcacaccatcaacggcgagggcatggaggagagccagagccccatgaagaccgacctgctgctggtgaaccacaagcccagcccccagatcatccccagcatgagcgtgagcatctaccccagcagcgccgaggtgctgaaggcctgcagaaacctgggcaagaacggcctgagcaacagcagcatcctgctggacaagtgccccccccccagaccccccagcagcccctacccccccctgcccaaggacaagctgaacccccccacccccagcatctacctggagaacaagagagacgccttcttcccccccctgcaccagttctgcaccaaccccaacaaccccgtgaccgtgatcagaggcctggccggcgccctgaagctggacctgggcctgttcagcaccaagaccctggtggaggccaacaacgagcacatggtggaggtgagaacccagctgctgcagcccgccgacgagaactgggaccccaccggcaccaagaagatctggcactgcgagagcaacagaagccacaccaccatcgccaagtacgcccagtaccaggccagcagcttccaggagagcctgagagaggagaacgagaagagaagccaccacaaggaccacagcgacagcgagagcaccagcagcgacaacagcggcagaagaagaaagggccccttcaagaccatcaagttcggcaccaacatcgacctgagcgacgacaagaagtggaagctgcagctgcacgagctgaccaagctgcccgccttcgtgagagtggtgagcgccggcaacctgctgagccacgtgggccacaccatcctgggcatgaacaccgtgcagctgtacatgaaggtgcccggcagcagaacccccggccaccaggagaacaacaacttctgcagcgtgaacatcaacatcggccccggcgactgcgagtggttcgtggtgcccgagggctactggggcgtgctgaacgacttctgcgagaagaacaacctgaacttcctgatgggcagctggtggcccaacctggaggacctgtacgaggccaacgtgcccgtgtacagattcatccagagacccggcgacctggtgtggatcaacgccggcaccgtgcactgggtgcaggccatcggctggtgcaacaacatcgcctggaacgtgggccccctgaccgcctgccagtacaagctggccgtggagagatacgagtggaacaagctgcagagcgtgaagagcatcgtgcccatggtgcacctgagctggaacatggccagaaacatcaaggtgagcgaccccaagctgttcgagatgatcaagtactgcctgctgagaaccctgaagcagtgccagaccctgagagaggccctgatcgccgccggcaaggagatcatctggcacggcagaaccaaggaggagcccgcccactactgcagcatctgcgaggtggaggtgttcgacctgctgttcgtgaccaacgagagcaacagcagaaagacctacatcgtgcactgccaggactgcgccagaaagaccagcggcaacctggagaacttcgtggtgctggagcagtacaagatggaggacctgatgcaggtgtacgaccagttcaccctggccccccccctgcccagcgccagcagctag

SEQ ID NO: 87508 - DNA, 486 bp, synthetic construct
  misc_feature 1..486: note = Description of Artificial Sequence: Synthetic coding sequence
  source 1..486: mol_type = other DNA
tgagccagaaacatcaaggtgagcgaccccaagctgttcgagatgatcaagatcttcagcctgagccccaacttcagagccgagaagtgcctgagagaccacctggtgcagcccctgagaagcaacggcgagcccgagcccctgagattcaccggcgagtactgcctgctgagaaccctgaagcagtgccagaccctgagagaggccctgatcgccgccggcaaggagatcatctggcacggcagaaccaaggaggagcccgcccactactgcagcatctgcgaggtggaggtgttcgacctgctgttcgtgaccaacgagagcaacagcagaaagacctacatcgtgcactgccaggactgcgccagaaagaccagcggcaacctggagaacttcgtggtgctggagcagtacaagatggaggacctgatgcaggtgtacgaccagttcaccctggccccccccctgcccagcgccagcagctag

SEQ ID NO: 87509 - DNA, 3135 bp, synthetic construct
  misc_feature 1..3135: note = Description of Artificial Sequence: Synthetic coding sequence
  source 1..3135: mol_type = other DNA
tgaaacaagaccaagctgctgcccagcatcgaggaggcctggagcctgcccatccccgccgagctgaccagcagacagggcgccatgaacaccgcccagcaggcctgcaagccccaccaccccaacaccgagcccgtgctgggcctgagccagacccccatcagccagcagagcctgcccctgcacatgatccccagcagccaggtggacgacctgagcagccccgccaagagaaagagaaccagcagccccaccaagaacaccagcgacaactggagcggcggccacgccgtgagccacccccccgtgcagcagcaggcccacagctggtgcctgaccccccagaagctgcagcacctggagcagctgagagccaacagaaacaacctgaaccccgcccagaagctgatgctggagcagctggagagccagttcgtgctgatgcagcagcaccagatgagacccaccggcgtggcccaggtgagaagcaccggcatccccaacggccccaccgccgacagcagcctgcccaccaacagcgtgagcggccagcagccccagctggccctgaccagagtgcccagcgtgagccagcccggcgtgagacccgcctgccccggccagcccctggccaacggccccttcagcgccggccacgtgccctgcagcaccagcagaaccctgggcagcaccgacaccatcctgatcggcaacaaccacatcaccggcagcggcagcaacggcaacgtgccctacctgcagagaaacgccctgaccctgccccacaacagaaccaacctgaccagcagcgccgaggagccctggaagaaccagctgagcaacagcacccagggcctgcacaagggccagagcagccacagcgccggccccaacggcgagagacccctgagcagcaccggccccagccagcacctgcaggccgccggcagcggcatccagaaccagaacggccaccccaccctgcccagcaacagcgtgacccagggcgccgccctgaaccacctgagcagccacaccgccaccagcggcggccagcagggcatcaccctgaccaaggagagcaagcccagcggcaacatcctgaccgtgcccgagaccagcagacacaccggcgagacccccaacagcaccgccagcgtggagggcctgcccaaccacgtgcaccagatgaccgccgacgccgtgtgcagccccagccacggcgacagcaagagccccggcctgctgagcagcgacaacccccagctgagcgccctgctgatgggcaaggccaacaacaacgtgggcaccggcacctgcgacaaggtgaacaacatccaccccgccgtgcacaccaagaccgacaacagcgtggccagcagccccagcagcgccatcagcaccgccacccccagccccaagagcaccgagcagaccaccaccaacagcgtgaccagcctgaacagcccccacagcggcctgcacaccatcaacggcgagggcatggaggagagccagagccccatgaagaccgacctgctgctggtgaaccacaagcccagcccccagatcatccccagcatgagcgtgagcatctaccccagcagcgccgaggtgctgaaggcctgcagaaacctgggcaagaacggcctgagcaacagcagcatcctgctggacaagtgccccccccccagaccccccagcagcccctacccccccctgcccaaggacaagctgaacccccccacccccagcatctacctggagaacaagagagacgccttcttcccccccctgcaccagttctgcaccaaccccaacaaccccgtgaccgtgatcagaggcctggccggcgccctgaagctggacctgggcctgttcagcaccaagaccctggtggaggccaacaacgagcacatggtggaggtgagaacccagctgctgcagcccgccgacgagaactgggaccccaccggcaccaagaagatctggcactgcgagagcaacagaagccacaccaccatcgccaagtacgcccagtaccaggccagcagcttccaggagagcctgagagaggagaacgagaagagaagccaccacaaggaccacagcgacagcgagagcaccagcagcgacaacagcggcagaagaagaaagggccccttcaagaccatcaagttcggcaccaacatcgacctgagcgacgacaagaagtggaagctgcagctgcacgagctgaccaagctgcccgccttcgtgagagtggtgagcgccggcaacctgctgagccacgtgggccacaccatcctgggcatgaacaccgtgcagctgtacatgaaggtgcccggcagcagaacccccggccaccaggagaacaacaacttctgcagcgtgaacatcaacatcggccccggcgactgcgagtggttcgtggtgcccgagggctactggggcgtgctgaacgacttctgcgagaagaacaacctgaacttcctgatgggcagctggtggcccaacctggaggacctgtacgaggccaacgtgcccgtgtacagattcatccagagacccggcgacctggtgtggatcaacgccggcaccgtgcactgggtgcaggccatcggctggtgcaacaacatcgcctggaacgtgggccccctgaccgcctgccagtacaagctggccgtggagagatacgagtggaacaagctgcagagcgtgaagagcatcgtgcccatggtgcacctgagctggaacatggccagaaacatcaaggtgagcgaccccaagctgttcgagatgatcaagtactgcctgctgagaaccctgaagcagtgccagaccctgagagaggccctgatcgccgccggcaaggagatcatctggcacggcagaaccaaggaggagcccgcccactactgcagcatctgcgaggtggaggtgttcgacctgctgttcgtgaccaacgagagcaacagcagaaagacctacatcgtgcactgccaggactgcgccagaaagaccagcggcaacctggagaacttcgtggtgctggagcagtacaagatggaggacctgatgcaggtgtacgaccagttcaccctggccccccccctgcccagcgccagcagctag

SEQ ID NO: 87510 - DNA, 675 bp, synthetic construct
  misc_feature 1..675: note = Description of Artificial Sequence: Synthetic coding sequence
  source 1..675: mol_type = other DNA
tgactgcaggcctacatctgcgccgtgcagctggaccacggccacgccgccgcctggatggacctgggcaccctgtacgagagctgcaaccagccccaggacgccatcaagtgctacctgaacgccaccagaagcaagagctgcagcaacaccagcgccctggccgccagaatcaagtacctgcaggcccagctgtgcaacctgccccagggcagcctgcagaacaagaccaagctgctgcccagcatcgaggaggcctggagcctgcccatccccgccgagctgaccagcagacagggcgccatgaacaccgcccagcagaacaccagcgacaactggagcggcggccacgccgtgagccacccccccgtgcagcagcaggcccacagctggtgcctgaccccccagaagctgcagatgagacccaccggcgtggcccaggtgagaagcaccggcatccccaacggccccaccgccgacagcagcctgcccaccaacagcgtgagcggccagcagccccagctggccctgaccagagtgcccagcgtgagccagcccggcgtgagacccgcctgccccggccagcccctggccaacggccccttcagcgccggccacgtgccctgcagcaccagcagaaccctgggcagcaccgacaccatcctgatcggctag

SEQ ID NO: 87511 - DNA, 516 bp, synthetic construct
  misc_feature 1..516: note = Description of Artificial Sequence: Synthetic coding sequence
  source 1..516: mol_type = other DNA
agcctgcagaacaagaccaagctgctgcccagcatcgaggaggcctggagcctgcccatccccgccgagctgaccagcagacagggcgccatgaacaccgcccagcagaacaccagcgacaactggagcggcggccacgccgtgagccacccccccgtgcagcagcaggcccacagctggtgcctgaccccccagaagctgcagcacctggagcagctgagagccaacagaaacaacctgaaccccgcccagaagctgatgctggagcagctggagagccagttcgtgctgatgcagcagcaccagatgagacccaccggcgtggcccaggtgagaagcaccggcatccccaacggccccaccgccgacagcagcctgcccaccaacagcgtgagcggccagcagccccagctggccctgaccagagtgcccagcgtgagccagcccggcgtgagacccgcctgccccggccagcccctggccaacggccccttctgcagaccctgcagcctgtag

SEQ ID NO: 87512 - DNA, 4071 bp, synthetic construct
  misc_feature 1..4071: note = Description of Artificial Sequence: Synthetic coding sequence
  source 1..4071: mol_type = other DNA
atgaagagctgcggcgtgagcctggccaccgccgccgccgccgccgccgccttcggcgacgaggagaagaagatggccgccggcaaggccagcggcgagagcgaggaggccagccccagcctgaccgccgaggagagagaggccctgggcggcctggacagcagactgttcggcttcgtgagattccacgaggacggcgccagaaccaaggccctgctgggcaaggccgtgagatgctacgagagcctgatcctgaaggccgagggcaaggtggagagcgacttcttctgccagctgggccacttcaacctgctgctggaggactaccccaaggccctgagcgcctaccagagatactacagcctgcagagcgactactggaagaacgccgccttcctgtacggcctgggcctggtgtacttccactacaacgccttccagtgggccatcaaggccttccaggaggtgctgtacgtggaccccagcttctgcagagccaaggagatccacctgagactgggcctgatgttcaaggtgaacaccgactacgagagcagcctgaagcacttccagctggccctggtggactgcaacccctgcaccctgagcaacgccgagatccagttccacatcgcccacctgtacgagacccagagaaagtaccacagcgccaaggaggcctacgagcagctgctgcagaccgagaacctgagcgcccaggtgaaggccaccgtgctgcagcagctgggctggatgcaccacaccgtggacctgctgggcgacaaggccaccaaggagagctacgccatccagtacctgcagaagagcctggaggccgaccccaacagcggccagagctggtacttcctgggcagatgctacagcagcatcggcaaggtgcaggacgccttcatcagctacagacagagcatcgacaagagcgaggccagcgccgacacctggtgcagcatcggcgtgctgtaccagcagcagaaccagcccatggacgccctgcaggcctacatctgcgccgtgcagctggaccacggccacgccgccgcctggatggacctgggcaccctgtacgagagctgcaaccagccccaggacgccatcaagtgctacctgaacgccaccagaagcaagagctgcagcaacaccagcgccctggccgccagaatcaagtacctgcagaacaccagcgacaactggagcggcggccacgccgtgagccacccccccgtgcagcagcaggcccacagctggtgcctgaccccccagaagctgcagcacctggagcagctgagagccaacagaaacaacctgaaccccgcccagaagctgatgctggagcagctggagagccagttcgtgctgatgcagcagcaccagatgagacccaccggcgtggcccaggtgagaagcaccggcatccccaacggccccaccgccgacagcagcctgcccaccaacagcgtgagcggccagcagccccagctggccctgaccagagtgcccagcgtgagccagcccggcgtgagacccgcctgccccggccagcccctggccaacggccccttcagcgccggccacgtgccctgcagcaccagcagaaccctgggcagcaccgacaccatcctgatcggcaacaaccacatcaccggcagcggcagcaacggcaacgtgccctacctgcagagaaacgccctgaccctgccccacaacagaaccaacctgaccagcagcgccgaggagccctggaagaaccagctgagcaacagcacccagggcctgcacaagggccagagcagccacagcgccggccccaacggcgagagacccctgagcagcaccggccccagccagcacctgcaggccgccggcagcggcatccagaaccagaacggccaccccaccctgcccagcaacagcgtgacccagggcgccgccctgaaccacctgagcagccacaccgccaccagcggcggccagcagggcatcaccctgaccaaggagagcaagcccagcggcaacatcctgaccgtgcccgagaccagcagacacaccggcgagacccccaacagcaccgccagcgtggagggcctgcccaaccacgtgcaccagatgaccgccgacgccgtgtgcagccccagccacggcgacagcaagagccccggcctgctgagcagcgacaacccccagctgagcgccctgctgatgggcaaggccaacaacaacgtgggcaccggcacctgcgacaaggtgaacaacatccaccccgccgtgcacaccaagaccgacaacagcgtggccagcagccccagcagcgccatcagcaccgccacccccagccccaagagcaccgagcagaccaccaccaacagcgtgaccagcctgaacagcccccacagcggcctgcacaccatcaacggcgagggcatggaggagagccagagccccatgaagaccgacctgctgctggtgaaccacaagcccagcccccagatcatccccagcatgagcgtgagcatctaccccagcagcgccgaggtgctgaaggcctgcagaaacctgggcaagaacggcctgagcaacagcagcatcctgctggacaagtgccccccccccagaccccccagcagcccctacccccccctgcccaaggacaagctgaacccccccacccccagcatctacctggagaacaagagagacgccttcttcccccccctgcaccagttctgcaccaaccccaacaaccccgtgaccgtgatcagaggcctggccggcgccctgaagctggacctgggcctgttcagcaccaagaccctggtggaggccaacaacgagcacatggtggaggtgagaacccagctgctgcagcccgccgacgagaactgggaccccaccggcaccaagaagatctggcactgcgagagcaacagaagccacaccaccatcgccaagtacgcccagtaccaggccagcagcttccaggagagcctgagagaggagaacgagaagagaagccaccacaaggaccacagcgacagcgagagcaccagcagcgacaacagcggcagaagaagaaagggccccttcaagaccatcaagttcggcaccaacatcgacctgagcgacgacaagaagtggaagctgcagctgcacgagctgaccaagctgcccgccttcgtgagagtggtgagcgccggcaacctgctgagccacgtgggccacaccatcctgggcatgaacaccgtgcagctgtacatgaaggtgcccggcagcagaacccccggccaccaggagaacaacaacttctgcagcgtgaacatcaacatcggccccggcgactgcgagtggttcgtggtgcccgagggctactggggcgtgctgaacgacttctgcgagaagaacaacctgaacttcctgatgggcagctggtggcccaacctggaggacctgtacgaggccaacgtgcccgtgtacagattcatccagagacccggcgacctggtgtggatcaacgccggcaccgtgcactgggtgcaggccatcggctggtgcaacaacatcgcctggaacgtgggccccctgaccgcctgccagtacaagctggccgtggagagatacgagtggaacaagctgcagagcgtgaagagcatcgtgcccatggtgcacctgagctggaacatggccagaaacatcaaggtgagcgaccccaagctgttcgagatgatcaagtactgcctgctgagaaccctgaagcagtgccagaccctgagagaggccctgatcgccgccggcaaggagatcatctggcacggcagaaccaaggaggagcccgcccactactgcagcatctgcgaggtggaggtgttcgacctgctgttcgtgaccaacgagagcaacagcagaaagacctacatcgtgcactgccaggactgcgccagaaagaccagcggcaacctggagaacttcgtggtgctggagcagtacaagatggaggacctgatgcaggtgtacgaccagttcaccctggccccccccctgcccagcgccagcagctag

SEQ ID NO: 87513 - DNA, 675 bp, synthetic construct
  misc_feature 1..675: note = Description of Artificial Sequence: Synthetic coding sequence
  source 1..675: mol_type = other DNA
atgaagagctgcggcgtgagcctggccaccgccgccgccgccgccgccgccttcggcgacgaggagaagaagatggccgccggcaaggccagcggcgagagcgaggaggccagccccagcctgaccgccgaggagagagaggccctgggcggcctggacagcagactgttcggcttcgtgagattccacgaggacggcgccagaaccaaggccctgctgggcaaggccgtgagatgctacgagagcctgatcctgaaggccgagggcaaggtggagagcgacttcttctgccagctgggccacttcaacctgctgctggaggactaccccaaggccctgagcgcctaccagagatactacagcctgcagagcgactactggaagaacgccgccttcctgtacggcctgggcctggtgtacttccactacaacgccttccagtgggccatcaaggccttccaggaggtgctgtacgtggaccccagcttctgcagagccaaggagatccacctgagactgggcctgatgttcaaggtgaacaccgactacgagagcagcctgaagcacttccagctggccctggtggactgcaacccctgcaccctgagcaacgccgagatccagttccacatcgcccacctgtacgagacccaggtgggctgcatcaccctgtag

SEQ ID NO: 87514 - DNA, 3969 bp, synthetic construct
  misc_feature 1..3969: note = Description of Artificial Sequence: Synthetic coding sequence
  source 1..3969: mol_type = other DNA
atgaagagctgcggcgtgagcctggccaccgccgccgccgccgccgccgccttcggcgacgaggagaagaagatggccgccggcaaggccagcggcgagagcgaggaggccagccccagcctgaccgccgaggagagagaggccctgggcggcctggacagcagactgttcggcttcgtgagattccacgaggacggcgccagaaccaaggccctgctgggcaaggccgtgagatgctacgagagcctgatcctgaaggccgagggcaaggtggagagcgacttcttctgccagctgggccacttcaacctgctgctggaggactaccccaaggccctgagcgcctaccagagatactacagcctgcagagcgactactggaagaacgccgccttcctgtacggcctgggcctggtgtacttccactacaacgccttccagtgggccatcaaggccttccaggaggtgctgtacgtggaccccagcttctgcagagccaaggagatccacctgagactgggcctgatgttcaaggtgaacaccgactacgagagcagcctgaagcacttccagctggccctggtggactgcaacccctgcaccctgagcaacgccgagatccagttccacatcgcccacctgtacgagacccagagaaagtaccacagcgccaaggaggcctacgagcagctgctgcagaccgagaacctgagcgcccaggtgaaggccaccgtgctgcagcagctgggctggatgcaccacaccgtggacctgctgggcgacaaggccaccaaggagagctacgccatccagtacctgcagaagagcctggaggccgaccccaacagcggccagagctggtacttcctgggcagatgctacagcagcatcggcaaggtgcaggacgccttcatcagctacagacagagcatcgacaagagcgaggccagcgccgacacctggtgcagcatcggcgtgctgtaccagcagcagaaccagcccatggacgccctgcaggcctacatctgcgccgtgcagctggaccacggccacgccgccgcctggatggacctgggcaccctgtacgagagctgcaaccagccccaggacgccatcaagtgctacctgaacgccaccagaagcaagagctgcagcaacaccagcgccctggccgccagaatcaagtacctgcagaacaccagcgacaactggagcggcggccacgccgtgagccacccccccgtgcagcagcaggcccacagctggtgcctgaccccccagaagctgcagatgagacccaccggcgtggcccaggtgagaagcaccggcatccccaacggccccaccgccgacagcagcctgcccaccaacagcgtgagcggccagcagccccagctggccctgaccagagtgcccagcgtgagccagcccggcgtgagacccgcctgccccggccagcccctggccaacggccccttcagcgccggccacgtgccctgcagcaccagcagaaccctgggcagcaccgacaccatcctgatcggcaacaaccacatcaccggcagcggcagcaacggcaacgtgccctacctgcagagaaacgccctgaccctgccccacaacagaaccaacctgaccagcagcgccgaggagccctggaagaaccagctgagcaacagcacccagggcctgcacaagggccagagcagccacagcgccggccccaacggcgagagacccctgagcagcaccggccccagccagcacctgcaggccgccggcagcggcatccagaaccagaacggccaccccaccctgcccagcaacagcgtgacccagggcgccgccctgaaccacctgagcagccacaccgccaccagcggcggccagcagggcatcaccctgaccaaggagagcaagcccagcggcaacatcctgaccgtgcccgagaccagcagacacaccggcgagacccccaacagcaccgccagcgtggagggcctgcccaaccacgtgcaccagatgaccgccgacgccgtgtgcagccccagccacggcgacagcaagagccccggcctgctgagcagcgacaacccccagctgagcgccctgctgatgggcaaggccaacaacaacgtgggcaccggcacctgcgacaaggtgaacaacatccaccccgccgtgcacaccaagaccgacaacagcgtggccagcagccccagcagcgccatcagcaccgccacccccagccccaagagcaccgagcagaccaccaccaacagcgtgaccagcctgaacagcccccacagcggcctgcacaccatcaacggcgagggcatggaggagagccagagccccatgaagaccgacctgctgctggtgaaccacaagcccagcccccagatcatccccagcatgagcgtgagcatctaccccagcagcgccgaggtgctgaaggcctgcagaaacctgggcaagaacggcctgagcaacagcagcatcctgctggacaagtgccccccccccagaccccccagcagcccctacccccccctgcccaaggacaagctgaacccccccacccccagcatctacctggagaacaagagagacgccttcttcccccccctgcaccagttctgcaccaaccccaacaaccccgtgaccgtgatcagaggcctggccggcgccctgaagctggacctgggcctgttcagcaccaagaccctggtggaggccaacaacgagcacatggtggaggtgagaacccagctgctgcagcccgccgacgagaactgggaccccaccggcaccaagaagatctggcactgcgagagcaacagaagccacaccaccatcgccaagtacgcccagtaccaggccagcagcttccaggagagcctgagagaggagaacgagaagagaagccaccacaaggaccacagcgacagcgagagcaccagcagcgacaacagcggcagaagaagaaagggccccttcaagaccatcaagttcggcaccaacatcgacctgagcgacgacaagaagtggaagctgcagctgcacgagctgaccaagctgcccgccttcgtgagagtggtgagcgccggcaacctgctgagccacgtgggccacaccatcctgggcatgaacaccgtgcagctgtacatgaaggtgcccggcagcagaacccccggccaccaggagaacaacaacttctgcagcgtgaacatcaacatcggccccggcgactgcgagtggttcgtggtgcccgagggctactggggcgtgctgaacgacttctgcgagaagaacaacctgaacttcctgatgggcagctggtggcccaacctggaggacctgtacgaggccaacgtgcccgtgtacagattcatccagagacccggcgacctggtgtggatcaacgccggcaccgtgcactgggtgcaggccatcggctggtgcaacaacatcgcctggaacgtgggccccctgaccgcctgccagtacaagctggccgtggagagatacgagtggaacaagctgcagagcgtgaagagcatcgtgcccatggtgcacctgagctggaacatggccagaaacatcaaggtgagcgaccccaagctgttcgagatgatcaagtactgcctgctgagaaccctgaagcagtgccagaccctgagagaggccctgatcgccgccggcaaggagatcatctggcacggcagaaccaaggaggagcccgcccactactgcagcatctgcgaggtggaggtgttcgacctgctgttcgtgaccaacgagagcaacagcagaaagacctacatcgtgcactgccaggactgcgccagaaagaccagcggcaacctggagaacttcgtggtgctggagcagtacaagatggaggacctgatgcaggtgtacgaccagttcaccctggccccccccctgcccagcgccagcagctag

SEQ ID NO: 87515 - DNA, 5049 bp, synthetic construct
  misc_feature 1..5049: note = Description of Artificial Sequence: Synthetic coding sequence
  source 1..5049: mol_type = other DNA
atgcacagagccgtggacccccccggcgccagagccgccagagaggccttcgccctgggcggcctgagctgcgccggcgcctggagcagctgccccccccaccccccccccagaagcgcctggctgcccggcggcagatgcagcgccagcatcggccagccccccctgcccgcccccctgccccccagccacggcagcagcagcggccaccccagcaagccctactacgcccccggcgcccccacccccagacccctgcacggcaagctggagagcctgcacggctgcgtgcaggccctgctgagagagcccgcccagcccggcctgtgggagcagctgggccagctgtacgagagcgagcacgacagcgaggaggccaccagatgctaccacagcgccctgagatacggcggcagcttcgccgagctgggccccagaatcggcagactgcagcaggcccagctgtggaacttccacaccggcagctgccagcacagagccaaggtgctgccccccctggagcaggtgtggaacctgctgcacctggagcacaagagaaactacggcgccaagagaggcggcccccccgtgaagagagccgccgagccccccgtggtgcagcccgtgccccccgccgccctgagcggccccagcggcgaggagggcctgagccccggcggcaagagaagaagaggctgcaacagcgagcagaccggcctgccccccggcctgcccctgccccccccccccctgcccccccccccccccccccccccccccccccccccccccctgcccggcctggccaccagcccccccttccagctgaccaagcccggcctgtggagcaccctgcacggcgacgcctggggccccgagagaaagggcagcgccccccccgagagacaggagcagagacacagcctgccccacccctacccctaccccgcccccgcctacaccgcccacccccccggccacagactggtgcccgccgccccccccggccccggccccagaccccccggcgccgagagccacggctgcctgcccgccaccagaccccccggcagcgacctgagagagagcagagtgcagagaagcagaatggacagcagcgtgagccccgccgccaccaccgcctgcgtgccctacgcccccagcagaccccccggcctgcccggcaccaccaccagcagcagcagcagcagcagcagcaacaccggcctgagaggcgtggagcccaaccccggcatccccggcgccgaccactaccagacccccgccctggaggtgagccaccacggcagactgggccccagcgcccacagcagcagaaagcccttcctgggcgcccccgccgccaccccccacctgagcctgccccccggccccagcagcccccccccccccccctgccccagactgctgagacccccccccccccccgcctggctgaagggccccgcctgcagagccgccagagaggacggcgagatcctggaggagctgttcttcggcaccgagggcccccccagacccgcccccccccccctgccccacagagagggcttcctgggcccccccgccagcagattcagcgtgggcacccaggacagccacaccccccccaccccccccacccccaccaccagcagcagcaacagcaacagcggcagccacagcagcagccccgccggccccgtgagcttccccccccccccctacctggccagaagcatcgaccccctgcccagaccccccagccccgcccagaacccccaggacccccccctggtgcccctgaccctggccctgccccccgccccccccagcagctgccaccagaacaccagcggcagcttcagaagacccgagagccccagacccagagtgagcttccccaagacccccgaggtgggccccggccccccccccggccccctgagcaaggccccccagcccgtgccccccggcgtgggcgagctgcccgccagaggccccagactgttcgacttcccccccacccccctggaggaccagttcgaggagcccgccgagttcaagatcctgcccgacggcctggccaacatcatgaagatgctggacgagagcatcagaaaggaggaggagcagcagcagcacgaggccggcgtggccccccagccccccctgaaggagcccttcgccagcctgcagagccccttccccaccgacaccgcccccaccaccaccgcccccgccgtggccgtgaccaccaccaccaccaccaccaccaccaccaccgccacccaggaggaggagaagaagcccccccccgccctgcccccccccccccccctggccaagttccccccccccagccagccccagcccccccccccccccccccccagccccgccagcctgctgaagagcctggccagcgtgctggagggccagaagtactgctacagaggcaccggcgccgccgtgagcaccagacccggccccctgcccaccacccagtacagccccggcccccccagcggcgccaccgccctgccccccaccagcgccgcccccagcgcccagggcagcccccagcccagcgccagcagcagcagccagttcagcaccagcggcggcccctgggccagagagagaagagccggcgaggagcccgtgcccggccccatgacccccacccagccccccccccccctgagcctgccccccgccagaagcgagagcgaggtgctggaggagatcagcagagcctgcgagaccctggtggagagagtgggcagaagcgccaccgaccccgccgaccccgtggacaccgccgagcccgccgacagcggcaccgagagactgctgccccccgcccaggccaaggaggaggccggcggcgtggccgccgtgagcggcagctgcaagagaagacagaaggagcaccagaaggagcacagaagacacagaagagcctgcaaggacagcgtgggcagaagacccagagagggcagagccaaggccaaggccaaggtgcccaaggagaagagcagaagagtgctgggcaacctggacctgcagagcgaggagatccagggcagagagaagagcagacccgacctgggcggcgccagcaaggccaagccccccaccgcccccgccccccccagcgcccccgcccccagcgcccagcccaccccccccagcgccagcgtgcccggcaagaaggccagagaggaggcccccggcccccccggcgtgagcagagccgacatgctgaagctgagaagcctgagcgagggcccccccaaggagctgaagatcagactgatcaaggtggagagcggcgacaaggagaccttcatcgccagcgaggtggaggagagaagactgagaatggccgacctgaccatcagccactgcgccgccgacgtggtgagagccagcagaaacgccaaggtgaagggcaagttcagagagagctacctgagccccgcccagagcgtgaagcccaagatcaacaccgaggagaagctgcccagagagaagctgaacccccccacccccagcatctacctggagagcaagagagacgccttcagccccgtgctgctgcagttctgcaccgaccccagaaaccccatcaccgtgatcagaggcctggccggcagcctgagactgaacctgggcctgttcagcaccaagaccctggtggaggccagcggcgagcacaccgtggaggtgagaacccaggtgcagcagcccagcgacgagaactgggacctgaccggcaccagacagatctggccctgcgagagcagcagaagccacaccaccatcgccaagtacgcccagtaccaggccagcagcttccaggagagcctgcaggaggagaaggagagcgaggacgaggagagcgaggagcccgacagcaccaccggcaccccccccagcagcgcccccgaccccaagaaccaccacatcatcaagttcggcaccaacatcgacctgagcgacgccaagagatggaagccccagctgcaggagctgctgaagctgcccgccttcatgagagtgaccagcaccggcaacatgctgagccacgtgggccacaccatcctgggcatgaacaccgtgcagctgtacatgaaggtgcccggcagcagaacccccggccaccaggagaacaacaacttctgcagcgtgaacatcaacatcggccccggcgactgcgagtggttcgccgtgcacgagcactactgggagaccatcagcgccttctgcgacagacacggcgtggactacctgaccggcagctggtggcccatcctggacgacctgtacgccagcaacatccccgtgtacagattcgtgcagagacccggcgacctggtgtggatcaacgccggcaccgtgcactgggtgcaggccaccggctggtgcaacaacatcgcctggaacgtgggccccctgaccgcctaccagtaccagctggccctggagagatacgagtggaacgaggtgaagaacgtgaagagcatcgtgcccatgatccacgtgagctggaacgtggccagaaccgtgaagatcagcgaccccgacctgttcaagatgatcaagttctgcctgctgcagagcatgaagcactgccaggtgcagagagagagcctggtgagagccggcaagaagatcgcctaccagggcagagtgaaggacgagcccgcctactactgcaacgagtgcgacgtggaggtgttcaacatcctgttcgtgaccagcgagaacggcagcagaaacacctacctggtgcactgcgagggctgcgccagaagaagaagcgccggcctgcagggcgtggtggtgctggagcagtacagaaccgaggagctggcccaggcctacgacgccttcaccctggtgagagccagaagagccagaggccagagaagaagagccctgggccaggccgccggcaccggcttcggcagccccgccgcccccttccccgagcccccccccgccttcagcccccaggcccccgccagcaccagcagatag

SEQ ID NO: 87516 - DNA, 4932 bp, synthetic construct
  misc_feature 1..4932: note = Description of Artificial Sequence: Synthetic coding sequence
  source 1..4932: mol_type = other DNA
atgcacagagccgtggacccccccggcgccagagccgccagagaggccttcgccctgggcggcctgagctgcgccggcgcctggagcagctgccccccccaccccccccccagaagcgcctggctgcccggcggcagatgcagcgccagcatcggccagccccccctgcccgcccccctgccccccagccacggcagcagcagcggccaccccagcaagccctactacgcccccggcgcccccacccccagacccctgcacggcaagctggagagcctgcacggctgcgtgcaggccctgctgagagagcccgcccagcccggcctgtgggagcagctgggccagctgtacgagagcgagcacgacagcgaggaggccaccagatgctaccacagcgccctgagatacggcggcagcttcgccgagctgggccccagaatcggcagactgcagcaggcccagctgtggaacttccacaccggcagctgccagcacagagccaaggtgctgccccccctggagcaggtgtggaacctgctgcacctggagcacaagagaaactacggcgccaagagaggcggcccccccgtgaagagagccgccgagccccccgtggtgcagcccgtgccccccgccgccctgagcggccccagcggcgaggagggcctgagccccggcggcaagagaagaagaggctgcaacagcgagcagaccggcctgccccccggcctgcccctgccccccccccccctgcccccccccccccccccccccccccccccccccccccccctgcccggcctggccaccagcccccccttccagctgaccaagcccggcctgtggagcaccctgcacggcgacgcctggggccccgagagaaagggcagcgccccccccgagagacaggagcagagacacagcctgccccacccctacccctaccccgcccccgcctacaccgcccacccccccggccacagactggtgcccgccgccccccccggccccggccccagaccccccggcgccgagagccacggctgcctgcccgccaccagaccccccggcagcgacctgagagagagcagagtgcagagaagcagaatggacagcagcgtgagccccgccgccaccaccgcctgcgtgccctacgcccccagcagaccccccggcctgcccggcaccaccaccagcagcagcagcagcagcagcagcaacaccggcctgagaggcgtggagcccaaccccggcatccccggcgccgaccactaccagacccccgccctggaggtgagccaccacggcagactgggccccagcgcccacagcagcagaaagcccttcctgggcgcccccgccgccaccccccacctgagcctgccccccggccccagcagcccccccccccccccctgccccagactgctgagacccccccccccccccgcctggctgaagggccccgcctgcagagccgccagagaggacggcgagatcctggaggagctgttcttcggcaccgagggcccccccagacccgcccccccccccctgccccacagagagggcttcctgggcccccccgccagcagattcagcgtgggcacccaggacagccacaccccccccaccccccccacccccaccaccagcagcagcaacagcaacagcggcagccacagcagcagccccgccggccccgtgagcttccccccccccccctacctggccagaagcatcgaccccctgcccagaccccccagccccgcccagaacccccaggacccccccctggtgcccctgaccctggccctgccccccgccccccccagcagctgccaccagaacaccagcggcagcttcagaagacccgagagccccagacccagagtgagcttccccaagacccccgaggtgggccccggccccccccccggccccctgagcaaggccccccagcccgtgccccccggcgtgggcgagctgcccgccagaggccccagactgttcgacttcccccccacccccctggaggaccagttcgaggagcccgccgagttcaagatcctgcccgacggcctggccaacatcatgaagatgctggacgagagcatcagaaaggaggaggagcagcagcagcacgaggccggcgtggccccccagccccccctgaaggagcccttcgccagcctgcagagccccttccccaccgacaccgcccccaccaccaccgcccccgccgtggccgtgaccaccaccaccaccaccaccaccaccaccaccgccacccaggaggaggagaagaagcccccccccgccctgcccccccccccccccctggccaagttccccccccccagccagccccagcccccccccccccccccccccagccccgccagcctgctgaagagcctggccagcgtgctggagggccagaagtactgctacagaggcaccggcgccgccgtgagcaccagacccggccccctgcccaccacccagtacagccccggcccccccagcggcgccaccgccctgccccccaccagcgccgcccccagcgcccagggcagcccccagcccagcgccagcagcagcagccagttcagcaccagcggcggcccctgggccagagagagaagagccggcgaggagcccgtgcccggccccatgacccccacccagccccccccccccctgagcctgccccccgccagaagcgagagcgaggtgctggaggagatcagcagagcctgcgagaccctggtggagagagtgggcagaagcgccaccgaccccgccgaccccgtggacaccgccgagcccgccgacagcggcaccgagagactgctgccccccgcccaggccaaggaggaggccggcggcgtggccgccgtgagcggcagctgcaagagaagacagaaggagcaccagaaggagcacagaagacacagaagagcctgcaaggacagcgtgggcagaagacccagagagggcagagccaaggccaaggccaaggtgcccaaggagaagagcagaagagtgctgggcaacctggacctgcagagcgaggagatccagggcagagagaagagcagacccgacctgggcggcgccagcaaggccaagccccccaccgcccccgccccccccagcgcccccgcccccagcgcccagcccaccccccccagcgccagcgtgcccggcaagaaggccagagaggaggcccccggcccccccggcgtgagcagagccgacatgctgaagctgagaagcctgagcgagggcccccccaaggagctgaagatcagactgatcaaggtggagagcggcgacaaggagaccttcatcgccagcgaggtggaggagagaagactgagaatggccgacctgaccatcagccactgcgccgccgacgtggtgagagccagcagaaacgccaaggtgaagggcaagttcagagagagctacctgagccccgcccagagcgtgaagcccaagatcaacaccgaggagaagctgcccagagagaagctgaacccccccacccccagcatctacctggagagcaagagagacgccttcagccccgtgctgctgcagttctgcaccgaccccagaaaccccatcaccgtgatcagaggcctggccggcagcctgagactgaacctgggcctgttcagcaccaagaccctggtggaggccagcggcgagcacaccgtggaggtgagaacccaggtgcagcagcccagcgacgagaactgggacctgaccggcaccagacagatctggccctgcgagagcagcagaagccacaccaccatcgccaagtacgcccagtaccaggccagcagcttccaggagagcctgcaggaggagaaggagagcgaggacgaggagagcgaggagcccgacagcaccaccggcaccccccccagcagcgcccccgaccccaagaaccaccacatcatcaagttcggcaccaacatcgacctgagcgacgccaagagatggaagccccagctgcaggagctgctgaagctgcccgccttcatgagagtgaccagcaccggcaacatgctgagccacgtgggccacaccatcctgggcatgaacaccgtgcagctgtacatgaaggtgcccggcagcagaacccccggccaccaggagaacaacaacttctgcagcgtgaacatcaacatcggccccggcgactgcgagtggttcgccgtgcacgagcactactgggagaccatcagcgccttctgcgacagacacggcgtggactacctgaccggcagctggtggcccatcctggacgacctgtacgccagcaacatccccgtgtacagattcgtgcagagacccggcgacctggtgtggatcaacgccggcaccgtgcactgggtgcaggccaccggctggtgcaacaacatcgcctggaacgtgggccccctgaccgcctaccagtaccagctggccctggagagatacgagtggaacgaggtgaagaacgtgaagagcatcgtgcccatgatccacgtgagctggaacgtggccagaaccgtgaagatcagcgaccccgacctgttcaagatgatcaagttctgcctgctgcagagcatgaagcactgccaggtgcagagagagagcctggtgagagccggcaagaagatcgcctaccagggcagagtgaaggacgagcccgcctactactgcaacgagtgcgacgtggaggtgttcaacatcctgttcgtgaccagcgagaacggcagcagaaacacctacctggtgcactgcgagggctgcgccagaagaagaagcgccggcctgcagggcgtggtggtgctggagcagtacagaaccgaggagctggcccaggcctacgacgccttcaccctggcccccgccagcaccagcagatag

SEQ ID NO: 87517 - DNA, 1245 bp, synthetic construct
  misc_feature 1..1245: note = Description of Artificial Sequence: Synthetic coding sequence
  source 1..1245: mol_type = other DNA
atgcacagcagaggcagagagatcgtggtgctgctgaacccctggagcatcaacgaggccgtgagcagctactgcacctacttcatcaagcaggacagcaagagcttcggcatcatggtgagctggaagggcatctacttcatcctgaccctgttctggggcagcttcttcggcagcatcttcatgctgagccccttcctgcccctgatgttcgtgaaccccagctggtacagatggatcaacaacagactggtggccacctggctgaccctgcccgtggccctgctggagaccatgttcggcgtgaaggtgatcatcaccggcgacgccttcgtgcccggcgagagaagcgtgatcatcatgaaccacagaaccagaatggactggatgttcctgtggaactgcctgatgagatacagctacctgagactggagaagatctgcctgaaggccagcctgaagggcgtgcccggcttcggctgggccatgcaggccgccgcctacatcttcatccacagaaagtggaaggacgacaagagccacttcgaggacatgatcgactacttctgcgacatccacgagcccctgcagctgctgatcttccccgagggcaccgacctgaccgagaacagcaagagcagaagcaacgccttcgccgagaagaacggcctgcagaagtacgagtacgtgctgcaccccagaaccaccggcttcaccttcgtggtggacagactgagagagggcaagaacctggacgccgtgcacgacatcaccgtggcctacccccacaacatcccccagagcgagaagcacctgctgcagggcgacttccccagagagatccacttccacgtgcacagataccccatcgacaccctgcccaccagcaaggaggacctgcagctgtggtgccacaagagatgggaggagaaggaggagagactgagaagcttctaccagggcgagaagaacttctacttcaccggccagagcgtgatccccccctgcaagagcgagctgagagtgctggtggtgaagctgctgagcatcctgtactggaccctgttcagccccgccatgtgcctgctgatctacctgtacagcctggtgaagtggtacttcatcatcaccatcgtgatcttcgtgctgcaggagagaatcttcggcggcctggagatcatcgagctggcctgctacagactgctgcacaagcagccccacctgaacagcaagaagaacgagtag

SEQ ID NO: 87518 - DNA, 927 bp, synthetic construct
  misc_feature 1..927: note = Description of Artificial Sequence: Synthetic coding sequence
  source 1..927: mol_type = other DNA
atgcacagcagaggcagagagatcgtggtgctgctgaacccctggagcatcaacgaggccgtgagcagctactgcacctacttcatcaagcaggacagcaagagcttcggcatcatggtgagctggaagggcatctacttcatcctgaccctgttctggggcagcttcttcggcagcatcttcatgctgagccccttcctgcccctgatgttcgtgaaccccagctggtacagatggatcaacaacagactggtggccacctggctgaccctgcccgtggccctgctggagaccatgttcggcgtgaaggtgatcatcaccggcgacgccttcgtgcccggcgagagaagcgtgatcatcatgaaccacagaaccagaatggactggatgttcctgtggaactgcctgatgagatacagctacctgagactggagaagatctgcctgaaggccagcctgaagggcgtgcccggcttcggctgggccatgcaggccgccgcctacatcttcatccacagaaagtggaaggacgacaagagccacttcgaggacatgatcgactacttctgcgacatccacgagcccctgcagctgctgatcttccccgagggcaccgacctgaccgagaacagcaagagcagaagcaacgccttcgccgagaagaacggcctgcagaagtacgagtacgtgctgcaccccagaaccaccggcttcaccttcgtggtggacagactgagagagggcagaagacagagcgagggcagcaagggccccctgcagggcgagctgcagatcaccgcccagggcaaccagagaggccacaagcagatggagaagcacagcatgctgatggactggaagaaccagtacagagagatcggccacaccgcccagagcaacctgcagatccagtgctacagccactag

SEQ ID NO: 87519 - DNA, 927 bp, synthetic construct; identical to SEQ ID NO: 87518
  misc_feature 1..927: note = Description of Artificial Sequence: Synthetic coding sequence
  source 1..927: mol_type = other DNA

SEQ ID NO: 87520 - DNA, 1131 bp, synthetic construct
  misc_feature 1..1131: note = Description of Artificial Sequence: Synthetic coding sequence
  source 1..1131: mol_type = other DNA
atggtgagctggaagggcatctacttcatcctgaccctgttctggggcagcttcttcggcagcatcttcatgctgagccccttcctgcccctgatgttcgtgaaccccagctggtacagatggatcaacaacagactggtggccacctggctgaccctgcccgtggccctgctggagaccatgttcggcgtgaaggtgatcatcaccggcgacgccttcgtgcccggcgagagaagcgtgatcatcatgaaccacagaaccagaatggactggatgttcctgtggaactgcctgatgagatacagctacctgagactggagaagatctgcctgaaggccagcctgaagggcgtgcccggcttcggctgggccatgcaggccgccgcctacatcttcatccacagaaagtggaaggacgacaagagccacttcgaggacatgatcgactacttctgcgacatccacgagcccctgcagctgctgatcttccccgagggcaccgacctgaccgagaacagcaagagcagaagcaacgccttcgccgagaagaacggcctgcagaagtacgagtacgtgctgcaccccagaaccaccggcttcaccttcgtggtggacagactgagagagggcaagaacctggacgccgtgcacgacatcaccgtggcctacccccacaacatcccccagagcgagaagcacctgctgcagggcgacttccccagagagatccacttccacgtgcacagataccccatcgacaccctgcccaccagcaaggaggacctgcagctgtggtgccacaagagatgggaggagaaggaggagagactgagaagcttctaccagggcgagaagaacttctacttcaccggccagagcgtgatccccccctgcaagagcgagctgagagtgctggtggtgaagctgctgagcatcctgtactggaccctgttcagccccgccatgtgcctgctgatctacctgtacagcctggtgaagtggtacttcatcatcaccatcgtgatcttcgtgctgcaggagagaatcttcggcggcctggagatcatcgagctggcctgctacagactgctgcacaagcagccccacctgaacagcaagaagaacgagtag

SEQ ID NO: 87521 - DNA, 993 bp, synthetic construct
  misc_feature 1..993: note = Description of Artificial Sequence: Synthetic coding sequence
  source 1..993: mol_type = other DNA
atggtgagctggaagggcatctacttcatcctgaccctgttctggggcagcttcttcggcagcatcttcatgctgagccccttcctgcccctgatgttcgtgaaccccagctggtacagatggatcaacaacagactggtggccacctggctgaccctgcccgtggccctgctggagaccatgttcggcgtgaaggtgatcatcaccggcgacgccttcgtgcccggcgagagaagcgtgatcatcatgaaccacagaaccagaatggactggatgttcctgtggaactgcctgatgagatacagctacctgagactggagaagatctgcctgaaggccagcctgaagggcgtgcccggcttcggctgggccatgcaggccgccgcctacatcttcatccacagaaagtggaaggacgacaagagccacttcgaggacatgatcgactacttctgcgacatccacgagcccctgcagctgctgatcttccccgagggcaccgacctgaccgagaacagcaagagcagaagcaacgccttcgccgagaagaacggcctgcagaagtacgagtacgtgctgcaccccagaaccaccggcttcaccttcgtggtggacagactgagagagggcaagaacctggacgccgtgcacgacatcaccgtggcctacccccacaacatcccccagagcgagaagcacctgctgcagggcgacttccccagagagatccacttccacgtgcacagataccccatcgacaccctgcccaccagcaaggaggacctgcagctgtggtgccacaagagatgggaggagaaggaggagagactgagaagcttctaccagggcgagaagaacttctacttcaccggccagagcgtgatccccccctgcaagagcgagctgagagtgctggtggtgaagctgtacaccgtgctggaccccgtgcagccctgcaacgtgcccacccacatcttcgtgcagagctgctag

SEQ ID NO: 87522 - DNA, 462 bp, synthetic construct
  misc_feature 1..462: note = Description of Artificial Sequence: Synthetic coding sequence
  source 1..462: mol_type = other DNA
atgcacagcagaggcagagagatcgtggtgctgctgaacccctggagcatcaacgaggccgtgagcagctactgcacctacttcatcaagcaggacagcaagagcttcggcatcatggtgagctggaagggcatctacttcatcctgaccctgttctggggcagcttcttcggcagcatcttcatgctgagccccttcctgcccctgatgttcgtgaaccccagctggtacagatggatcaacaacagactggtggccacctggctgaccctgcccgtggccctgctggagaccatgttcggcgtgaaggtgatcatcaccggcgacgccttcgtgcccggcgagagaagcgtgatcatcatgaaccacagaaccagaatggactggatgttcctgtggaactgcctgatgagatacagctacctgagactggagaagatctgcctgaaggccagcctgtag

SEQ ID NO: 87523 - DNA, 1131 bp, synthetic construct; identical to SEQ ID NO: 87520
  misc_feature 1..1131: note = Description of Artificial Sequence: Synthetic coding sequence
  source 1..1131: mol_type = other DNA

SEQ ID NO: 87524 - DNA, 1095 bp, synthetic construct
  misc_feature 1..1095: note = Description of Artificial Sequence: Synthetic coding sequence
  source 1..1095: mol_type = other DNA
atggccgccatcagcaccagcatccccgtgatcagccagccccagttcaccgccatgaacgagccccagtgcttctacaacgagagcatcgccttcttctacaacagaagcggcaagcacctggccaccgagtggaacaccgtgagcaagctggtgatgggcctgggcatcaccgtgtgcatcttcatcatgctggccaacctgctggtgatggtggccatctacgtgaacagaagattccacttccccatctactacctgatggccaacctggccgccgccgacttcttcgccggcctggcctacttctacctgatgttcaacaccggccccaacaccagaagactgaccgtgagcacctggctgctgagacagggcctgatcgacaccagcctgaccgccagcgtggccaacctgctggccatcgccatcgagagacacatcaccgtgttcagaatgcagctgcacaccagaatgagcaacagaagagtggtggtggtgatcgtggtgatctggaccatggccatcgtgatgggcgccatccccagcgtgggctggaactgcatctgcgacatcgagaactgcagcaacatggcccccctgtacagcgacagctacctggtgttctgggccatcttcaacctggtgaccttcgtggtgatggtggtgctgtacgcccacatcttcggctacgtgagacagagaaccatgagaatgagcagacacagcagcggccccagaagaaacagagacaccatgatgagcctgctgaagaccgtggtgatcgtgctgggcgccttcatcatctgctggacccccggcctggtgctgctgctgctggacgtgtgctgcccccagtgcgacgtgctggcctacgagaagttcttcctgctgctggccgagttcaacagcgccatgaaccccatcatctacagctacagagacaaggagatgagcgccaccttcagacagatcctgtgctgccagagaagcgagaaccccaccggccccaccgagggcagcgacagaagcgccagcagcctgaaccacaccatcctggccggcgtgcacagcaacgaccacagcgtggtgtag

SEQ ID NO: 87525 - DNA, 1095 bp, synthetic construct; identical to SEQ ID NO: 87524
  misc_feature 1..1095: note = Description of Artificial Sequence: Synthetic coding sequence
  source 1..1095: mol_type = other DNA

SEQ ID NO: 87526 - DNA, 1095 bp, synthetic construct; identical to SEQ ID NO: 87524
  misc_feature 1..1095: note = Description of Artificial Sequence: Synthetic coding sequence
  source 1..1095: mol_type = other DNA

SEQ ID NO: 87527 - DNA, 549 bp, synthetic construct
  misc_feature 1..549: note = Description of Artificial Sequence: Synthetic coding sequence
  source 1..549: mol_type = other DNA
atggccgccatcagcaccagcatccccgtgatcagccagccccagttcaccgccatgaacgagccccagtgcttctacaacgagagcatcgccttcttctacaacagaagcggcaagcacctggccaccgagtggaacaccgtgagcaagctggtgatgggcctgggcatcaccgtgtgcatcttcatcatgctggccaacctgctggtgatggtggccatctacgtgaacagaagattccacttccccatctactacctgatggccaacctggccgccgccgacttcttcgccggcctggcctacttctacctgatgttcaacaccggccccaacaccagaagactgaccgtgagcacctggctgctgagacagggcctgatcgacaccagcctgaccgccagcgtggccaacctgctggccatcgccatcgagagacacatcaccgtgttcagaatgcagctgcacaccagaatgagcaacagaagagtggtggtggtgatcgtggtgatctggaccatggccatcgtgatgggcgccatcccctag

SEQ ID NO: 87528 - DNA, 1041 bp, synthetic construct
  misc_feature 1..1041: note = Description of Artificial Sequence: Synthetic coding sequence
  source 1..1041: mol_type = other DNA
atgaacgagccccagtgcttctacaacgagagcatcgccttcttctacaacagaagcggcaagcacctggccaccgagtggaacaccgtgagcaagctggtgatgggcctgggcatcaccgtgtgcatcttcatcatgctggccaacctgctggtgatggtggccatctacgtgaacagaagattccacttccccatctactacctgatggccaacctggccgccgccgacttcttcgccggcctggcctacttctacctgatgttcaacaccggccccaacaccagaagactgaccgtgagcacctggctgctgagacagggcctgatcgacaccagcctgaccgccagcgtggccaacctgctggccatcgccatcgagagacacatcaccgtgttcagaatgcagctgcacaccagaatgagcaacagaagagtggtggtggtgatcgtggtgatctggaccatggccatcgtgatgggcgccatccccagcgtgggctggaactgcatctgcgacatcgagaactgcagcaacatggcccccctgtacagcgacagctacctggtgttctgggccatcttcaacctggtgaccttcgtggtgatggtggtgctgtacgcccacatcttcggctacgtgagacagagaaccatgagaatgagcagacacagcagcggccccagaagaaacagagacaccatgatgagcctgctgaagaccgtggtgatcgtgctgggcgccttcatcatctgctggacccccggcctggtgctgctgctgctggacgtgtgctgcccccagtgcgacgtgctggcctacgagaagttcttcctgctgctggccgagttcaacagcgccatgaaccccatcatctacagctacagagacaaggagatgagcgccaccttcagacagatcctgtgctgccagagaagcgagaaccccaccggccccaccgagggcagcgacagaagcgccagcagcctgaaccacaccatcctggccggcgtgcacagcaacgaccacagcgtggtgtag

SEQ ID NO: 87529 - DNA, 1098 bp, synthetic construct
  misc_feature 1..1098: note = Description of Artificial Sequence: Synthetic coding sequence
  source 1..1098: mol_type = other DNA
atggaggagggcgcccagagaagcggcgccctgggcgccccccaccagttcaccgccatgaacgagccccagtgcttctacaacgagagcatcgccttcttctacaacagaagcggcaagcacctggccaccgagtggaacaccgtgagcaagctggtgatgggcctgggcatcaccgtgtgcatcttcatcatgctggccaacctgctggtgatggtggccatctacgtgaacagaagattccacttccccatctactacctgatggccaacctggccgccgccgacttcttcgccggcctggcctacttctacctgatgttcaacaccggccccaacaccagaagactgaccgtgagcacctggctgctgagacagggcctgatcgacaccagcctgaccgccagcgtggccaacctgctggccatcgccatcgagagacacatcaccgtgttcagaatgcagctgcacaccagaatgagcaacagaagagtggtggtggtgatcgtggtgatctggaccatggccatcgtgatgggcgccatccccagcgtgggctggaactgcatctgcgacatcgagaactgcagcaacatggcccccctgtacagcgacagctacctggtgttctgggccatcttcaacctggtgaccttcgtggtgatggtggtgctgtacgcccacatcttcggctacgtgagacagagaaccatgagaatgagcagacacagcagcggccccagaagaaacagagacaccatgatgagcctgctgaagaccgtggtgatcgtgctgggcgccttcatcatctgctggacccccggcctggtgctgctgctgctggacgtgtgctgcccccagtgcgacgtgctggcctacgagaagttcttcctgctgctggccgagttcaacagcgccatgaaccccatcatctacagctacagagacaaggagatgagcgccaccttcagacagatcctgtgctgccagagaagcgagaaccccaccggccccaccgagggcagcgacagaagcgccagcagcctgaaccacaccatcctggccggcgtgcacagcaacgaccacagcgtggtgtag

SEQ ID NO: 87530 - DNA, 1098 bp, synthetic construct
  misc_feature 1..1098: note = Description of Artificial Sequence: Synthetic coding sequence
  source 1..1098: mol_type = other DNA
atgctgctgctgctgatccccgcccacagcagcgtgctggagaacgagttcaccgccatgaacgagccccagtgcttctacaacgagagcatcgccttcttctacaacagaagcggcaagcacctggccaccgagtggaacaccgtgagcaagctggtgatgggcctgggcatcaccgtgtgcatcttcatcatgctggccaacctgctggtgatggtggccatctacgtgaacagaagattccacttccccatctactacctgatggccaacctggccgccgccgacttcttcgccggcctggcctacttctacctgatgttcaacaccggccccaacaccagaagactgaccgtgagcacctggctgctgagacagggcctgatcgacaccagcctgaccgccagcgtggccaacctgctggccatcgccatcgagagacacatcaccgtgttcagaatgcagctgcacaccagaatgagcaacagaagagtggtggtggtgatcgtggtgatctggaccatggccatcgtgatgggcgccatccccagcgtgggctggaactgcatctgcgacatcgagaactgcagcaacatggcccccctgtacagcgacagctacctggtgttctgggccatcttcaacctggtgaccttcgtggtgatggtggtgctgtacgcccacatcttcggctacgtgagacagagaaccatgagaatgagcagacacagcagcggccccagaagaaacagagacaccatgatgagcctgctgaagaccgtggtgatcgtgctgggcgccttcatcatctgctggacccccggcctggtgctgctgctgctggacgtgtgctgcccccagtgcgacgtgctggcctacgagaagttcttcctgctgctggccgagttcaacagcgccatgaaccccatcatctacagctacagagacaaggagatgagcgccaccttcagacagatcctgtgctgccagagaagcgagaaccccaccggccccaccgagggcagcgacagaagcgccagcagcctgaaccacaccatcctggccggcgtgcacagcaacgaccacagcgtggtgtag

SEQ ID NO: 87531 - DNA, 1056 bp, synthetic construct
  misc_feature 1..1056: note = Description of Artificial Sequence: Synthetic coding sequence
  source 1..1056: mol_type = other DNA
atggtgatcatgggccagtgctactacaacgagaccatcggcttcttctacaacaacagcggcaaggagctgagcagccactggagacccaaggacgtggtggtggtggccctgggcctgaccgtgagcgtgctggtgctgctgaccaacctgctggtgatcgccgccatcgccagcaacagaagattccaccagcccatctactacctgctgggcaacctggccgccgccgacctgttcgccggcgtggcctacctgttcctgatgttccacaccggccccagaaccgccagactgagcctggagggctggttcctgagacagggcctgctggacaccagcctgaccgccagcgtggccaccctgctggccatcgccgtggagagacacagaagcgtgatggccgtgcagctgcacagcagactgcccagaggcagagtggtgatgctgatcgtgggcgtgtgggtggccgccctgggcctgggcctgctgcccgcccacagctggcactgcctgtgcgccctggacagatgcagcagaatggcccccctgctgagcagaagctacctggccgtgtgggccctgagcagcctgctggtgttcctgctgatggtggccgtgtacaccagaatcttcttctacgtgagaagaagagtgcagagaatggccgagcacgtgagctgccaccccagatacagagagaccaccctgagcctggtgaagaccgtggtgatcatcctgggcgccttcgtggtgtgctggacccccggccaggtggtgctgctgctggacggcctgggctgcgagagctgcaacgtgctggccgtggagaagtacttcctgctgctggccgaggccaacagcctggtgaacgccgccgtgtacagctgcagagacgccgagatgagaagaaccttcagaagactgctgtgctgcgcctgcctgagacagagcaccagagagagcgtgcactacaccagcagcgcccagggcggcgccagcaccagaatcatgctgcccgagaacggccaccccctgatggacagcaccctgtag

SEQ ID NO: 87532 - DNA, 1056 bp, synthetic construct; identical to SEQ ID NO: 87531
  misc_feature 1..1056: note = Description of Artificial Sequence: Synthetic coding sequence
  source 1..1056: mol_type = other DNA

SEQ ID NO: 87533 - DNA, 1062 bp, synthetic construct
  misc_feature 1..1062: note = Description of Artificial Sequence: Synthetic coding sequence
  source 1..1062: mol_type = other DNA
atgaacgagtgccactacgacaagcacatggacttcttctacaacagaagcaacaccgacaccgtggacgactggaccggcaccaagctggtgatcgtgctgtgcgtgggcaccttcttctgcctgttcatcttcttcagcaacagcctggtgatcgccgccgtgatcaagaacagaaagttccacttccccttctactacctgctggccaacctggccgccgccgacttcttcgccggcatcgcctacgtgttcctgatgttcaacaccggccccgtgagcaagaccctgaccgtgaacagatggttcctgagacagggcctgctggacagcagcctgaccgccagcctgaccaacctgctggtgatcgccgtggagagacacatgagcatcatgagaatgagagtgcacagcaacctgaccaagaagagagtgaccctgctgatcctgctggtgtgggccatcgccatcttcatgggcgccgtgcccaccctgggctggaactgcctgtgcaacatcagcgcctgcagcagcctggcccccatctacagcagaagctacctggtgttctggaccgtgagcaacctgatggccttcctgatcatggtggtggtgtacctgagaatctacgtgtacgtgaagagaaagaccaacgtgctgagcccccacaccagcggcagcatcagcagaagaagaacccccatgaagctgatgaagaccgtgatgaccgtgctgggcgccttcgtggtgtgctggacccccggcctggtggtgctgctgctggacggcctgaactgcagacagtgcggcgtgcagcacgtgaagagatggttcctgctgctggccctgctgaacagcgtggtgaaccccatcatctacagctacaaggacgaggacatgtacggcaccatgaagaagatgatctgctgcttcagccaggagaaccccgagagaagacccagcagaatccccagcaccgtgctgagcagaagcgacaccggcagccagtacatcgaggacagcatcagccagggcgccgtgtgcaacaagagcaccagctag

SEQ ID NO: 87534 - DNA, 1062 bp, synthetic construct; identical to SEQ ID NO: 87533
  misc_feature 1..1062: note = Description of Artificial Sequence: Synthetic coding sequence
  source 1..1062: mol_type = other DNA

SEQ ID NO: 87535 - DNA, 1113 bp, synthetic construct
  misc_feature 1..1113: note = Description of Artificial Sequence: Synthetic coding sequence
  source 1..1113: mol_type = other DNA
atgggcgacagaagattcatcgacttccagttccaggacagcaacagcagcctgagacccagactgggcaacgccaccgccaacaacacctgcatcgtggacgacagcttcaagtacaacctgaacggcgccgtgtacagcgtggtgttcatcctgggcctgatcaccaacagcgtgagcctgttcgtgttctgcttcagaatgaagatgagaagcgagaccgccatcttcatcaccaacctggccgtgagcgacctgctgttcgtgtgcaccctgcccttcaagatcttctacaacttcaacagacactggcccttcggcgacaccctgtgcaagatcagcggcaccgccttcctgaccaacatctacggcagcatgctgttcctgacctgcatcagcgtggacagattcctggccatcgtgtaccccttcagaagcagaaccatcagaaccagaagaaacagcgccatcgtgtgcgccggcgtgtggatcctggtgctgagcggcggcatcagcgccagcctgttcagcaccaccaacgtgaacaacgccaccaccacctgcttcgagggcttcagcaagagagtgtggaagacctacctgagcaagatcaccatcttcatcgaggtggtgggcttcatcatccccctgatcctgaacgtgagctgcagcagcgtggtgctgagaaccctgagaaagcccgccaccctgagccagatcggcaccaacaagaagaaggtgctgaagatgatcaccgtgcacatggccgtgttcgtggtgtgcttcgtgccctacaacagcgtgctgttcctgtacgccctggtgagaagccaggccatcaccaactgcttcctggagagattcgccaagatcatgtaccccatcaccctgtgcctggccaccctgaactgctgcttcgaccccttcatctactacttcaccctggagagcttccagaagagcttctacatcaacgcccacatcagaatggagagcctgttcaagaccgagacccccctgaccaccaagcccagcctgcccgccatccaggaggaggtgagcgaccagaccaccaacaacggcggcgagctgatgctggagagcaccttctag

SEQ ID NO: 87536 - DNA, 1113 bp, synthetic construct; identical to SEQ ID NO: 87535
  misc_feature 1..1113: note = Description of Artificial Sequence: Synthetic coding sequence
  source 1..1113: mol_type = other DNA

SEQ ID NO: 87537 - DNA, 1119 bp, synthetic construct
  misc_feature 1..1119: note = Description of Artificial Sequence: Synthetic coding sequence
  source 1..1119: mol_type = other DNA
atgctggccaacagcagcagcaccaacagcagcgtgctgccctgccccgactacagacccacccacagactgcacctggtggtgtacagcctggtgctggccgccggcctgcccctgaacgccctggccctgtgggtgttcctgagagccctgagagtgcacagcgtggtgagcgtgtacatgtgcaacctggccgccagcgacctgctgttcaccctgagcctgcccgtgagactgagctactacgccctgcaccactggcccttccccgacctgctgtgccagaccaccggcgccatcttccagatgaacatgtacggcagctgcatcttcctgatgctgatcaacgtggacagatacgccgccatcgtgcaccccctgagactgagacacctgagaagacccagagtggccagactgctgtgcctgggcgtgtgggccctgatcctggtgttcgccgtgcccgccgccagagtgcacagacccagcagatgcagatacagagacctggaggtgagactgtgcttcgagagcttcagcgacgagctgtggaagggcagactgctgcccctggtgctgctggccgaggccctgggcttcctgctgcccctggccgccgtggtgtacagcagcggcagagtgttctggaccctggccagacccgacgccacccagagccagagaagaagaaagaccgtgagactgctgctggccaacctggtgatcttcctgctgtgcttcgtgccctacaacagcaccctggccgtgtacggcctgctgagaagcaagctggtggccgccagcgtgcccgccagagacagagtgagaggcgtgctgatggtgatggtgctgctggccggcgccaactgcgtgctggaccccctggtgtactacttcagcgccgagggcttcagaaacaccctgagaggcctgggcaccccccacagagccagaaccagcgccaccaacggcaccagagccgccctggcccagagcgagagaagcgccgtgaccaccgacgccaccagacccgacgccgccagccagggcctgctgagacccagcgacagccacagcctgagcagcttcacccagtgcccccaggacagcgccctgtag

SEQ ID NO: 87538 - DNA, 1119 bp, synthetic construct; identical to SEQ ID NO: 87537
  misc_feature 1..1119: note = Description of Artificial Sequence: Synthetic coding sequence
  source 1..1119: mol_type = other DNA

SEQ ID NO: 87539 - DNA, 1290 bp, synthetic construct
  misc_feature 1..1290: note = Description of Artificial Sequence: Synthetic coding sequence
  source 1..1290: mol_type = other DNA
atgctggccaacagcagcagcaccaacagcagcgtgctgccctgccccgactacagacccacccacagactgcacctggtggtgtacagcctggtgctggccgccggcctgcccctgaacgccctggccctgtgggtgttcctgagagccctgagagtgcacagcgtggtgagcgtgtacatgtgcaacctggccgccagcgacctgctgttcaccctgagcctgcccgtgagactgagctactacgccctgcaccactggcccttccccgacctgctgtgccagaccaccggcgccatcttccagatgaacatgtacggcagctgcatcttcctgatgctgatcaacgtggacagatacgccgccatcgtgcaccccctgagactgagacacctgagaagacccagagtggccagactgctgtgcctgggcgtgtgggccctgatcctggtgttcgccgtgcccgccgccagagtgcacagacccagcagatgcagatacagagacctggaggtgagactgtgcttcgagagcttcagcgacgagctgtggaagggcagactgctgcccctggtgctgctggccgaggccctgggcttcctgctgcccctggccgccgtggtgtacagcagcggcagagtgttctggaccctggccagacccgacgccacccagagccagagaagaagaaagaccgtgagactgctgctggccaacctggtgatcttcctgctgtgcttcgtgccctacaacagcaccctggccgtgtacggcctgctgagaagcaagctggtggccgccagcgtgcccgccagagacagagtgagaggcgtgctgatggtgatggtgctgctggccggcgccaactgcgtgctggaccccctggtgtactacttcagcgccgagggcttcagaaacaccctgagaggcctgggcaccccccacagagccagaaccagcgccaccaacggcaccagagccgccctggcccagagcgagagaagcgccgtgaccaccgacgccaccagacccgacgccgccagccagggcctgctgagacccagcgacagccacagcctgagcagcttcacccacgccatcgccctgagcgtgcccgacagccagagactgagcttctgggaggcctacagagtgtacacccaggagggcggcctgggcacctggaccttcggctggcagttccagctgagcaacgccgaggagtacaaggtgtggaagcccggccccagagagggcagcgccgccggcaacggcttcttcaagctgtag

SEQ ID NO: 87540 - DNA, 1605 bp, synthetic construct
  misc_feature 1..1605: note = Description of Artificial Sequence: Synthetic coding sequence
  source 1..1605: mol_type = other DNA
atgagactgagaggctgcggccccagagccgcccccgccagcagcgccggcgccagcgacgccagactgctggccccccccggcagaaaccccttcgtgcacgagctgagactgagcgccctgcagaaggcccaggtggccctgatgaccctgaccctgttccccgtgagactgctggtggccgccgccatgatgctgctggcctggcccctggccctggtggccagcctgggcagcgccgagaaggagcccgagcagccccccgccctgtggagaaaggtggtggacttcctgctgaaggccatcatgagaaccatgtggttcgccggcggcttccacagagtggccgtgaagggcagacaggccctgcccaccgaggccgccatcctgaccctggccccccacagcagctacttcgacgccatccccgtgaccatgaccatgagcagcatcgtgatgaaggccgagagcagagacatccccatctggggcaccctgatccagtacatcagacccgtgttcgtgagcagaagcgaccaggacagcagaagaaagaccgtggaggagatcaagagaagagcccagagcaacggcaagtggccccagatcatgatcttccccgagggcacctgcaccaacagaacctgcctgatcaccttcaagcccggcgccttcatccccggcgcccccgtgcagcccgtggtgctgagataccccaacaagctggacaccatcacctggacctggcagggccccggcgccctggagatcctgtggctgaccctgtgccagttccacaaccaggtggagatcgagttcctgcccgtgtacagccccagcgaggaggagaagagaaaccccgccctgtacgccagcaacgtgagaagagtgatggccgaggccctgggcgtgagcgtgaccgactacaccttcgaggactgccagctggccctggccgagggccagctgagactgcccgccgacacctgcctgctggagttcgccagactggtgagaggcctgggcctgaagcccgagaagctggagaaggacctggacagatacagcgagagagccagaatgaagggcggcgagaagatcggcatcgccgagttcgccgccagcctggaggtgcccgtgagcgacctgctggaggacatgttcagcctgttcgacgagagcggcagcggcgaggtggacctgagagagtgcgtggtggccctgagcgtggtgtgcagacccgccagaaccctggacaccatccagctggccttcaagatgtacggcgcccaggaggacggcagcgtgggcgagggcgacctgagctgcatcctgaagaccgccctgggcgtggccgagctgaccgtgaccgacctgttcagagccatcgaccaggaggagaagggcaagatcaccttcgccgacttccacagattcgccgagatgtaccccgccttcgccgaggagtacctgtaccccgaccagacccacttcgagagctgcgccgagaccagccccgcccccatccccaacggcttctgcgccgacttcagccccgagaacagcgacgccggcagaaagcccgtgagaaagaagctggactag

SEQ ID NO: 87541 - DNA, 1605 bp, synthetic construct; identical to SEQ ID NO: 87540
  misc_feature 1..1605: note = Description of Artificial Sequence: Synthetic coding sequence
  source 1..1605: mol_type = other DNA

SEQ ID NO: 87542 - DNA, 1464 bp, synthetic construct
  misc_feature 1..1464: note = Description of Artificial Sequence: Synthetic coding sequence
  source 1..1464: mol_type = other DNA
atggccagcagcgccgagggcgacgagggcaccgtggtggccctggccggcgtgctgcagagcggcttccaggagctgagcctgaacaagctggccaccagcctgggcgccagcgagcaggccctgagactgatcatcagcatcttcctgggctaccccttcgccctgttctacagacactacctgttctacaaggagacctacctgatccacctgttccacaccttcaccggcctgagcatcgcctacttcaacttcggcaaccagctgtaccacagcctgctgtgcatcgtgctgcagttcctgatcctgagactgatgggcagaaccatcaccgccgtgctgaccaccttctgcttccagatggcctacctgctggccggctactactacaccgccaccggcaactacgacatcaagtggaccatgccccactgcgtgctgaccctgaagctgatcggcctggccgtggactacttcgacggcggcaaggaccagaacagcctgagcagcgagcagcagaagtacgccatcagaggcgtgcccagcctgctggaggtggccggcttcagctacttctacggcgccttcctggtgggcccccagttcagcatgaaccactacatgaagctggtgcagggcgagctgatcgacatccccggcaagatccccaacagcatcatccccgccctgaagagactgagcctgggcctgttctacctggtgggctacaccctgctgagcccccacatcaccgaggactacctgctgaccgaggactacgacaaccaccccttctggttcagatgcatgtacatgctgatctggggcaagttcgtgctgtacaagtacgtgacctgctggctggtgaccgagggcgtgtgcatcctgaccggcctgggcttcaacggcttcgaggagaagggcaaggccaagtgggacgcctgcgccaacatgaaggtgtggctgttcgagaccaaccccagattcaccggcaccatcgccagcttcaacatcaacaccaacgcctgggtggccagatacatcttcaagagactgaagttcctgggcaacaaggagctgagccagggcctgagcctgctgttcctggccctgtggcacggcctgcacagcggctacctggtgtgcttccagatggagttcctgatcgtgatcgtggagagacaggccgccagactgatccaggagagccccaccctgagcaagctggccgccatcaccgtgctgcagcccttctactacctggtgcagcagaccatccactggctgttcatgggctacagcatgaccgccttctgcctgttcacctgggacaagtggctgaaggtgtacaagagcatctacttcctgggccacatcttcttcctgagcctgctgttcatcctgccctacatccacaaggccatggtgcccagaaaggagaagctgaagaagatggagtag

SEQ ID NO: 87543 - DNA, 1575 bp, synthetic construct
  misc_feature 1..1575: note = Description of Artificial Sequence: Synthetic coding sequence
  source 1..1575: mol_type = other DNA
atgagccagggcagccccggcgactgggcccccctggaccccacccccggcccccccgccagccccaaccccttcgtgcacgagctgcacctgagcagactgcagagagtgaagttctgcctgctgggcgccctgctggcccccatcagagtgctgctggccttcatcgtgctgttcctgctgtggcccttcgcctggctgcaggtggccggcctgagcgaggagcagctgcaggagcccatcaccggctggagaaagaccgtgtgccacaacggcgtgctgggcctgagcagactgctgttcttcctgctgggcttcctgagaatcagagtgagaggccagagagccagcagactgcaggcccccgtgctggtggccgccccccacagcaccttcttcgaccccatcgtgctgctgccctgcgacctgcccaaggtggtgagcagagccgagaacctgagcgtgcccgtgatcggcgccctgctgagattcaaccaggccatcctggtgagcagacacgaccccgccagcagaagaagagtggtggaggaggtgagaagaagagccaccagcggcggcaagtggccccaggtgctgttcttccccgagggcacctgcagcaacaagaaggccctgctgaagttcaagcccggcgccttcatcgccggcgtgcccgtgcagcccgtgctgatcagataccccaacagcctggacaccaccagctgggcctggagaggccccggcgtgctgaaggtgctgtggctgaccgccagccagccctgcagcatcgtggacgtggagttcctgcccgtgtaccaccccagccccgaggagagcagagaccccaccctgtacgccaacaacgtgcagagagtgatggcccaggccctgggcatccccgccaccgagtgcgagttcgtgggcagcctgcccgtgatcgtggtgggcagactgaaggtggccctggagccccagctgtgggagctgggcaaggtgctgagaaaggccggcctgagcgccggctacgtggacgccggcgccgagcccggcagaagcagaatgatcagccaggaggagttcgccagacagctgcagctgagcgacccccagaccgtggccggcgccttcggctacttccagcaggacaccaagggcctggtggacttcagagacgtggccctggccctggccgccctggacggcggcagaagcctggaggagctgaccagactggccttcgagctgttcgccgaggagcaggccgagggccccaacagactgctgtacaaggacggcttcagcaccatcctgcacctgctgctgggcagcccccaccccgccgccaccgccctgcacgccgagctgtgccaggccggcagcagccagggcctgagcctgtgccagttccagaacttcagcctgcacgaccccctgtacggcaagctgttcagcacctacctgagacccccccacaccagcagaggcaccagccagacccccaacgccagcagccccggcaaccccaccgccctggccaacggcaccgtgcaggcccccaagcagaagggcgactag

SEQ ID NO: 87544 - DNA, 693 bp, synthetic construct
  misc_feature 1..693: note = Description of Artificial Sequence: Synthetic coding sequence
  source 1..693: mol_type = other DNA
atgtgcggcaacaacatgagcacccccctgcccgccatcgtgcccgccgccagaaaggccaccgccgccgtgatcttcctgcacggcctgggcgacaccggccacggctgggccgaggccttcgccggcatcagaagcagccacatcaagtacatctgcccccacgcccccgtgagacccgtgaccctgaacatgaacgtggccatgcccagctggttcgacatcatcggcctgagccccgacagccaggaggacgagagcggcatcaagcaggccgccgagaacatcaaggccctgatcgaccaggaggtgaagaacggcatccccagcaacagaatcatcctgggcggcttcagccagggcggcgccctgagcctgtacaccgccctgaccacccagcagaagctggccggcgtgaccgccctgagctgctggctgcccctgagagccagcttcccccagggccccatcggcggcgccaacagagacatcagcatcctgcagtgccacggcgactgcgaccccctggtgcccctgatgttcggcagcctgaccgtggagaagctgaagaccctggtgaaccccgccaacgtgaccttcaagacctacgagggcatgatgcacagcagctgccagcaggagatgatggacgtgaagcagttcatcgacaagctgctgccccccatcgactag

SEQ ID NO: 87545 - DNA, 645 bp, synthetic construct
  misc_feature 1..645: note = Description of Artificial Sequence: Synthetic coding sequence
  source 1..645: mol_type = other DNA
atgtgcggcaacaacatgagcacccccctgcccgccatcgtgcccgccgccagaaaggccaccgccgccgtgatcttcctgcacggcctgggcgacaccggccacggctgggccgaggccttcgccggcatcagaagcagccacatcaagtacatctgcccccacgccttcgacatcatcggcctgagccccgacagccaggaggacgagagcggcatcaagcaggccgccgagaacatcaaggccctgatcgaccaggaggtgaagaacggcatccccagcaacagaatcatcctgggcggcttcagccagggcggcgccctgagcctgtacaccgccctgaccacccagcagaagctggccggcgtgaccgccctgagctgctggctgcccctgagagccagcttcccccagggccccatcggcggcgccaacagagacatcagcatcctgcagtgccacggcgactgcgaccccctggtgcccctgatgttcggcagcctgaccgtggagaagctgaagaccctggtgaaccccgccaacgtgaccttcaagacctacgagggcatgatgcacagcagctgccagcaggagatgatggacgtgaagcagttcatcgacaagctgctgccccccatcgactag

SEQ ID NO: 87546 - DNA, 1092 bp, synthetic construct
  misc_feature 1..1092: note = Description of Artificial Sequence: Synthetic coding sequence
  source 1..1092: mol_type = other DNA
atggagctgcacgagagacccgacgagagaagaaaggccagaaccagcacccagggcagactgggcgactggagaagagtgcacgccgacggcttcacccacagagtgtggagcagcagcagctggctggagcccgccatgaccagcagaaccagagtgacctggcccagcccccccagacccctgcccgtgcccgccgccgccgccgtggccttcggcgccaagggcaccgaccccgccgaggccagaagcagcagaggcatcgaggaggccggccccagagcccacggcagagccggcagagagcccgagagaagaagaagcagacagcagagaagaggcggcctgcaggccagaagaagcaccctgctgaagacctgcgccagagccagagccaccgcccccggcgccatgaagatggtggccccctggaccagattctacagcaacagctgctgcctgtgctgccacgtgagaaccggcaccatcctgctgggcgtgtggtacctgatcatcaacgccgtggtgctgctgatcctgctgagcgccctggccgaccccgaccagtacaacttcagcagcagcgagctgggcggcgacttcgagttcatggacgacgccaacatgtgcatcgccatcgccatcagcctgctgatgatcctgatctgcgccatggccacctacggcgcctacaagcagagagccgcctggatcatccccttcttctgctaccagatcttcgacttcgccctgaacatgctggtggccatcaccgtgctgatctaccccaacagcatccaggagtacatcagacagctgccccccaacttcccctacagagacgacgtgatgagcgtgaaccccacctgcctggtgctgatcatcctgctgttcatcagcatcatcctgaccttcaagggctacctgatcagctgcgtgtggaactgctacagatacatcaacggcagaaacagcagcgacgtgctggtgtacgtgaccagcaacgacaccaccgtgctgctgcccccctacgacgacgccaccgtgaacggcgccgccaaggagcccccccccccctacgtgagcgcctag

SEQ ID NO: 87547 - DNA, 954 bp, synthetic construct
  misc_feature 1..954: note = Description of Artificial Sequence: Synthetic coding sequence
  source 1..954: mol_type = other DNA
atgaccagcagaaccagagtgacctggcccagcccccccagacccctgcccgtgcccgccgccgccgccgtggccttcggcgccaagggcaccgaccccgccgaggccagaagcagcagaggcatcgaggaggccggccccagagcccacggcagagccggcagagagcccgagagaagaagaagcagacagcagagaagaggcggcctgcaggccagaagaagcaccctgctgaagacctgcgccagagccagagccaccgcccccggcgccatgaagatggtggccccctggaccagattctacagcaacagctgctgcctgtgctgccacgtgagaaccggcaccatcctgctgggcgtgtggtacctgatcatcaacgccgtggtgctgctgatcctgctgagcgccctggccgaccccgaccagtacaacttcagcagcagcgagctgggcggcgacttcgagttcatggacgacgccaacatgtgcatcgccatcgccatcagcctgctgatgatcctgatctgcgccatggccacctacggcgcctacaagcagagagccgcctggatcatccccttcttctgctaccagatcttcgacttcgccctgaacatgctggtggccatcaccgtgctgatctaccccaacagcatccaggagtacatcagacagctgccccccaacttcccctacagagacgacgtgatgagcgtgaaccccacctgcctggtgctgatcatcctgctgttcatcagcatcatcctgaccttcaagggctacctgatcagctgcgtgtggaactgctacagatacatcaacggcagaaacagcagcgacgtgctggtgtacgtgaccagcaacgacaccaccgtgctgctgcccccctacgacgacgccaccgtgaacggcgccgccaaggagcccccccccccctacgtgagcgcctag

SEQ ID NO: 87548 - DNA, 681 bp, synthetic construct
  misc_feature 1..681: note = Description of Artificial Sequence: Synthetic coding sequence
  source 1..681: mol_type = other DNA
atgaagatggtggccccctggaccagattctacagcaacagctgctgcctgtgctgccacgtgagaaccggcaccatcctgctgggcgtgtggtacctgatcatcaacgccgtggtgctgctgatcctgctgagcgccctggccgaccccgaccagtacaacttcagcagcagcgagctgggcggcgacttcgagttcatggacgacgccaacatgtgcatcgccatcgccatcagcctgctgatgatcctgatctgcgccatggccacctacggcgcctacaagcagagagccgcctggatcatccccttcttctgctaccagatcttcgacttcgccctgaacatgctggtggccatcaccgtgctgatctaccccaacagcatccaggagtacatcagacagctgccccccaacttcccctacagagacgacgtgatgagcgtgaaccccacctgcctggtgctgatcatcctgctgttcatcagcatcatcctgaccttcaagggctacctgatcagctgcgtgtggaactgctacagatacatcaacggcagaaacagcagcgacgtgctggtgtacgtgaccagcaacgacaccaccgtgctgctgcccccctacgacgacgccaccgtgaacggcgccgccaaggagcccccccccccctacgtgagcgcctag

SEQ ID NO: 87549 - DNA, 789 bp, synthetic construct
  misc_feature 1..789: note = Description of Artificial Sequence: Synthetic coding sequence
  source 1..789: mol_type = other DNA
atggaccccagactgagcaccgtgagacagacctgctgctgcttcaacgtgagaatcgccaccaccgccctggccatctaccacgtgatcatgagcgtgctgctgttcatcgagcacagcgtggaggtggcccacggcaaggccagctgcaagctgagccagatgggctacctgagaatcgccgacctgatcagcagcttcctgctgatcaccatgctgttcatcatcagcctgagcctgctgatcggcgtggtgaagaacagagagaagtacctgctgcccttcctgagcctgcagatcatggactacctgctgtgcctgctgaccctgctgggcagctacatcgagctgcccgcctacctgaagctggccagcagaagcagagccagcagcagcaagttccccctgatgaccctgcagctgctggacttctgcctgagcatcctgaccctgtgcagcagctacatggaggtgcccacctacctgaacttcaagagcatgaaccacatgaactacctgcccagccaggaggacatgccccacaaccagttcatcaagatgatgatcatcttcagcatcgccttcatcaccgtgctgatcttcaaggtgtacatgttcaagtgcgtgtggagatgctacagactgatcaagtgcatgaacagcgtggaggagaagagaaacagcaagatgctgcagaaggtggtgctgcccagctacgaggaggccctgagcctgcccagcaagacccccgagggcggccccgccccccccccctacagcgaggtgtag

SEQ ID NO: 87550 - DNA, 873 bp, synthetic construct
  misc_feature 1..873: note = Description of Artificial Sequence: Synthetic coding sequence
  source 1..873: mol_type = other DNA
atggaccccagactgagcaccgtgagacagacctgctgctgcttcaacgtgagaatcgccaccaccgccctggccatctaccacgtgatcatgagcgtgctgctgttcatcgagcacagcgtggaggtggcccacggcaaggccagctgcaagctgagccagatgggctacctgagaatcgccgacctgatcagcagcttcctgctgatcaccatgctgttcatcatcagcctgagcctgctgatcggcgtggtgaagaacagagagaagtacctgctgcccttcctgagcctgcagatcatggactacctgctgtgcctgctgaccctgctgggcagctacatcgagctgcccgcctacctgaagctggccagcagaagcagagccagcagcagcaagttccccctgatgaccctgcagctgctggacttctgcctgagcatcctgaccctgtgcagcagctacatggaggtgcccacctacctgaacttcaagagcatgaaccacatgaactacctgcccagccaggaggacatgccccacaaccagttcatcaagatgatgatcatcttcagcatcgccttcatcaccgtgctgatcttcaaggtgtacatgttcaagtgcgtgtggagatgctacagactgatcaagtgcatgaacagcgtggaggagaagagaaacagcaagatgctgcagaaggtggtgctgcccagctacgaggaggccctgagccccgccggccccgtgagctgcagccagctgggccagagattcagactgagccacagcagcggcctgagcatcatccagcccaacaacgcctggttcatcagcatcagcagcgacacctgcctggacgactggcccttctag

SEQ ID NO: 87551 - DNA, 11406 bp, synthetic construct
  misc_feature 1..11406: note = Description of Artificial Sequence: Synthetic coding sequence
  source 1..11406: mol_type = other DNA
atgagcaccgacagcaacagcctggccagagagttcctgaccgacgtgaacagactgtgcaacgccgtggtgcagagagtggaggccagagaggaggaggaggaggagacccacatggccaccctgggccagtacctggtgcacggcagaggcttcctgctgctgaccaagctgaacagcatcatcgaccaggccctgacctgcagagaggagctgctgaccctgctgctgagcctgctgcccctggtgtggaagatccccgtgcaggaggagaaggccaccgacttcaacctgcccctgagcgccgacatcatcctgaccaaggagaagaacagcagcagccagagaagcacccaggagaagctgcacctggagggcagcgccctgagcagccaggtgagcgccaaggtgaacgtgttcagaaagagcagaagacagagaaagatcacccacagatacagcgtgagagacgccagaaagacccagctgagcaccagcgacagcgaggccaacagcgacgagaagggcatcgccatgaacaagcacagaagaccccacctgctgcaccacttcctgaccagcttccccaagcaggaccaccccaaggccaagctggacagactggccaccaaggagcagaccccccccgacgccatggccctggagaacagcagagagatcatccccagacagggcagcaacaccgacatcctgagcgagcccgccgccctgagcgtgatcagcaacatgaacaacagccccttcgacctgtgccacgtgctgctgagcctgctggagaaggtgtgcaagttcgacgtgaccctgaaccacaacagccccctggccgccagcgtggtgcccaccctgaccgagttcctggccggcttcggcgactgctgcagcctgagcgacaacctggagagcagagtggtgagcgccggctggaccgaggagcccgtggccctgatccagagaatgctgttcagaaccgtgctgcacctgctgagcgtggacgtgagcaccgccgagatgatgcccgagaacctgagaaagaacctgaccgagctgctgagagccgccctgaagatcagaatctgcctggagaagcagcccgaccccttcgcccccagacagaagaagaccctgcaggaggtgcaggaggacttcgtgttcagcaagtacagacacagagccctgctgctgcccgagctgctggagggcgtgctgcagatcctgatctgctgcctgcagagcgccgccagcaaccccttctacttcagccaggccatggacctggtgcaggagttcatccagcaccacggcttcaacctgttcgagaccgccgtgctgcagatggagtggctggtgctgagagacggcgtgccccccgaggccagcgagcacctgaaggccctgatcaacagcgtgatgaagatcatgagcaccgtgaagaaggtgaagagcgagcagctgcaccacagcatgtgcaccagaaagagacacagaagatgcgagtacagccacttcatgcaccaccacagagacctgagcggcctgctggtgagcgccttcaagaaccaggtgagcaagaaccccttcgaggagaccgccgacggcgacgtgtactaccccgagagatgctgctgcatcgccgtgtgcgcccaccagtgcctgagactgctgcagcaggccagcctgagcagcacctgcgtgcagatcctgagcggcgtgcacaacatcggcatctgctgctgcatggaccccaagagcgtgatcatccccctgctgcacgccttcaagctgcccgccctgaagaacttccagcagcacatcctgaacatcctgaacaagctgatcctggaccagctgggcggcgccgagatcagccccaagatcaagaaggccgcctgcaacatctgcaccgtggacagcgaccagctggcccagctggaggagaccctgcagggcaacctgtgcgacgccgagctgagcagcagcctgagcagccccagctacagattccagggcatcctgcccagcagcggcagcgaggacctgctgtggaagtgggacgccctgaaggcctaccagaacttcgtgttcgaggaggacagactgcacagcatccagatcgccaaccacatctgcaacctgatccagaagggcaacatcgtggtgcagtggaagctgtacaactacatcttcaaccccgtgctgcagagaggcgtggagctggcccaccactgccagcacctgagcgtgaccagcgcccagagccacgtgtgcagccaccacaaccagtgcctgccccaggacgtgctgcagatctacgtgaagaccctgcccatcctgctgaagagcagagtgatcagagacctgttcctgagctgcaacggcgtgagccagatcatcgagctgaactgcctgaacggcatcagaagccacagcctgaaggccttcgagaccctgatcatcagcctgggcgagcagcagaaggacgccagcgtgcccgacatcgacggcatcgacatcgagcagaaggagctgagcagcgtgcacgtgggcaccagcttccaccaccagcaggcctacagcgacagcccccagagcctgagcaagttctacgccggcctgaaggaggcctaccccaagagaagaaagaccgtgaaccaggacgtgcacatcaacaccatcaacctgttcctgtgcgtggccttcctgtgcgtgagcaaggaggccgagagcgacagagagagcgccaacgacagcgaggacaccagcggctacgacagcaccgccagcgagcccctgagccacatgctgccctgcatcagcctggagagcctggtgctgcccagccccgagcacatgcaccaggccgccgacatctggagcatgtgcagatggatctacatgctgagcagcgtgttccagaagcagttctacagactgggcggcttcagagtgtgccacaagctgatcttcatgatcatccagaagctgttcagaagccacaaggaggagcagggcaagaaggagggcgacaccagcgtgaacgagaaccaggacctgaacagaatcagccagcccaagagaaccatgaaggaggacctgctgagcctggccatcaagagcgaccccatccccagcgagctgggcagcctgaagaagagcgccgacagcctgggcaagctggagctgcagcacatcagcagcatcaacgtggaggaggtgagcgccaccgaggccgcccccgaggaggccaagctgttcaccagccaggagagcgagaccagcctgcagagcatcagactgctggaggccctgctggccatctgcctgcacggcgccagaaccagccagcagaagatggagctggagctgcccaaccagaacctgagcgtggagagcatcctgttcgagatgagagaccacctgagccagagcaaggtgatcgagacccagctggccaagcccctgttcgacgccctgctgagagtggccctgggcaactacagcgccgacttcgagcacaacgacgccatgaccgagaagagccaccagagcgccgaggagctgagcagccagcccggcgacttcagcgaggaggccgaggacagccagtgctgcagcttcaagctgctggtggaggaggagggctacgaggccgacagcgagagcaaccccgaggacggcgagacccaggacgacggcgtggacctgaagagcgagaccgagggcttcagcgccagcagcagccccaacgacctgctggagaacctgacccagggcgagatcatctaccccgagatctgcatgctggagctgaacctgctgagcgccagcaaggccaagctggacgtgctggcccacgtgttcgagagcttcctgaagatcatcagacagaaggagaagaacgtgttcctgctgatgcagcagggcaccgtgaagaacctgctgggcggcttcctgagcatcctgacccaggacgacagcgacttccaggcctgccagagagtgctggtggacctgctggtgagcctgatgagcagcagaacctgcagcgaggagctgaccctgctgctgagaatcttcctggagaagagcccctgcaccaagatcctgctgctgggcatcctgaagatcatcgagagcgacaccaccatgagccccagccagtacctgaccttccccctgctgcacgcccccaacctgagcaacggcgtgagcagccagaagtaccccggcatcctgaacagcaaggccatgggcctgctgagaagagccagagtgagcagaagcaagaaggaggccgacagagagagcttcccccacagactgctgagcagctggcacatcgcccccgtgcacctgcccctgctgggccagaactgctggccccacctgagcgagggcttcagcgtgagcctgtggttcaacgtggagtgcatccacgaggccgagagcaccaccgagaagggcaagaagatcaagaagagaaacaagagcctgatcctgcccgacagcagcttcgacggcaccgagagcgacagacccgagggcgccgagtacatcaaccccggcgagagactgatcgaggagggctgcatccacatcatcagcctgggcagcaaggccctgatgatccaggtgtgggccgacccccacaacgccaccctgatcttcagagtgtgcatggacagcaacgacgacatgaaggccgtgctgctggcccaggtggagagccaggagaacatcttcctgcccagcaagtggcagcacctggtgctgacctacctgcagcagccccagggcaagagaagaatccacggcaagatcagcatctgggtgagcggccagagaaagcccgacgtgaccctggacttcatgctgcccagaaagaccagcctgagcagcgacagcaacaagaccttctgcatgatcggccactgcctgagcagccaggaggagttcctgcagctggccggcaagtgggacctgggcaacctgctgctgttcaacggcgccaaggtgggcagccaggaggccttctacctgtacgcctgcggccccaaccacaccagcgtgatgccctgcaagtacggcaagcccgtgaacgactacagcaagtacatcaacaaggagatcctgagatgcgagcagatcagagagctgttcatgaccaagaaggacgtggacatcggcctgctgatcgagagcctgagcgtggtgtacaccacctactgccccgcccagtacaccatctacgagcccgtgatcagactgaagggccagatgaagacccagctgagccagagacccttcagcagcaaggaggtgcagagcatcctgctggagccccaccacctgaagaacctgcagcccaccgagtacaagaccatccagggcatcctgcacgagatcggcggcaccggcatcttcgtgttcctgttcgccagagtggtggagctgagcagctgcgaggagacccaggccctggccctgagagtgatcctgagcctgatcaagtacaaccagcagagagtgcacgagctggagaactgcaacggcctgagcatgatccaccaggtgctgatcaagcagaagtgcatcgtgggcttctacatcctgaagaccctgctggagggctgctgcggcgaggacatcatctacatgaacgagaacggcgagttcaagctggacgtggacagcaacgccatcatccaggacgtgaagctgctggaggagctgctgctggactggaagatctggagcaaggccgagcagggcgtgtgggagaccctgctggccgccctggaggtgctgatcagagccgaccaccaccagcagatgttcaacatcaagcagctgctgaaggcccaggtggtgcaccacttcctgctgacctgccaggtgctgcaggagtacaaggagggccagctgacccccatgcccagagaggtgtgcagaagcttcgtgaagatcatcgccgaggtgctgggcagcccccccgacctggagctgctgaccatcatcttcaacttcctgctggccgtgcacccccccaccaacacctacgtgtgccacaaccccaccaacttctacttcagcctgcacatcgacggcaagatcttccaggagaaggtgagaagcatcatgtacctgagacacagcagcagcggcggcagaagcctgatgagccccggcttcatggtgatcagccccagcggcttcaccgccagcccctacgagggcgagaacagcagcaacatcatcccccagcagatggccgcccacatgctgagaagcagaagcctgcccgccttccccaccagcagcctgctgacccagagccagaagctgaccggcagcctgggctgcagcatcgacagactgcagaacatcgccgacacctacgtggccacccagagcaagaagcagaacagcctgggcagcagcgacaccctgaagaagggcaaggaggacgccttcatcagcagctgcgagagcgccaagaccgtgtgcgagatggaggccgtgctgagcgcccaggtgagcgtgagcgacgtgcccaagggcgtgctgggcttccccgtggtgaaggccgaccacaagcagctgggcgccgagcccagaagcgaggacgacagccccggcgacgagagctgccccagaagacccgactacctgaagggcctggccagcttccagagaagccacagcaccatcgccagcctgggcctggccttccccagccagaacggcagcgccgccgtgggcagatggcccagcctggtggacagaaacaccgacgactgggagaacttcgcctacagcctgggctacgagcccaactacaacagaaccgccagcgcccacagcgtgaccgaggactgcctggtgcccatctgctgcggcctgtacgagctgctgagcggcgtgctgctgatcctgcccgacgtgctgctggaggacgtgatggacaagctgatccaggccgacaccctgctggtgctggtgaaccaccccagccccgccatccagcagggcgtgatcaagctgctggacgcctacttcgccagagccagcaaggagcagaaggacaagttcctgaagaacagaggcttcagcctgctggccaaccagctgtacctgcacagaggcacccaggagctgctggagtgcttcatcgagatgttcttcggcagacacatcggcctggacgaggagttcgacctggaggacgtgagaaacatgggcctgttccagaagtggagcgtgatccccatcctgggcctgatcgagaccagcctgtacgacaacatcctgctgcacaacgccctgctgctgctgctgcagatcctgaacagctgcagcaaggtggccgacatgctgctggacaacggcctgctgtacgtgctgtgcaacaccgtggccgccctgaacggcctggagaagaacatccccatgagcgagtacaagctgctggcctgcgacatccagcagctgttcatcgccgtgaccatccacgcctgcagcagcagcggcagccagtacttcagagtgatcgaggacctgatcgtgatgctgggctacctgcagaacagcaagaacaagagaacccagaacatggccgtggccctgcagctgagagtgctgcaggccgccatggagttcatcagaaccaccgccaaccacgacagcgagaacctgaccgacagcctgcagagccccagcgccccccaccacgccgtggtgcagaagagaaagagcatcgccggccccagaaagttccccctggcccagaccgagagcctgctgatgaagatgagaagcgtggccaacgacgagctgcacgtgatgatgcagagaagaatgagccaggagaaccccagccaggccaccgagaccgagctggcccagagactgcagagactgaccgtgctggccgtgaacagaatcatctaccaggagttcaacagcgacatcatcgacatcctgagaacccccgagaacgtgacccagagcaagaccagcgtgttccagaccgagatcagcgaggagaacatccaccacgagcagagcagcgtgttcaaccccttccagaaggagatcttcacctacctggtggagggcttcaaggtgagcatcggcagcagcaaggccagcggcagcaagcagcagtggaccaagatcctgtggagctgcaaggagaccttcagaatgcagctgggcagactgctggtgcacatcctgagccccgcccacgccgcccaggagagaaagcagatcttcgagatcgtgcacgagcccaaccaccaggagatcctgagagactgcctgagccccagcctgcagcacggcgccaagctggtgctgtacctgagcgagctgatccacaaccaccagggcgagctgaccgaggaggagctgggcaccgccgagctgctgatgaacgccctgaagctgtgcggccacaagtgcatcccccccagcgccagcaccaaggccgacctgatcaagatgatcaaggaggagcagaagaagtacgagaccgaggagggcgtgaacaaggccgcctggcagaagaccgtgaacaacaaccagcagagcctgttccagagactggacagcaagagcaaggacatcagcaagatcgccgccgacatcacccaggccgtgagcctgagccagggcaacgagagaaagaaggtgatccagcacatcagaggcatgtacaaggtggacctgagcgccagcagacactggcaggagctgatccagcagctgacccacgacagagccgtgtggtacgaccccatctactaccccaccagctggcagctggaccccaccgagggccccaacagagagagaagaagactgcagagatgctacctgaccatccccaacaagtacctgctgagagacagacagaagagcgaggacgtggtgaagccccccctgagctacctgttcgaggacaagacccacagcagcttcagcagcaccgtgaaggacaaggccgccagcgagagcatcagagtgaacagaagatgcatcagcgtggcccccagcagagagaccgccggcgagctgctgctgggcaagtgcggcatgtacttcgtggaggacaacgccagcgacaccgtggagagcagcagcctgcagggcgagctggagcccgccagcttcagctggacctacgaggagatcaaggaggtgcacaagagatggtggcagctgagagacaacgccgtggagatcttcctgaccaacggcagaaccctgctgctggccttcgacaacaccaaggtgagagacgacgtgtaccacaacatcctgaccaacaacctgcccaacctgctggagtacggcaacatcaccgccctgaccaacctgtggtacaccggccagatcaccaacttcgagtacctgacccacctgaacaagcacgccggcagaagcttcaacgacctgatgcagtaccccgtgttccccttcatcctggccgactacgtgagcgagaccctggacctgaacgacctgctgatctacagaaacctgagcaagcccatcgccgtgcagtacaaggagaaggaggacagatacgtggacacctacaagtacctggaggaggagtacagaaagggcgccagagaggacgaccccatgccccccgtgcagccctaccactacggcagccactacagcaacagcggcaccgtgctgcacttcctggtgagaatgccccccttcaccaagatgttcctggcctaccaggaccagagcttcgacatccccgacagaaccttccacagcaccaacaccacctggagactgagcagcttcgagagcatgaccgacgtgaaggagctgatccccgagttcttctacctgcccgagttcctggtgaacagagagggcttcgacttcggcgtgagacagaacggcgagagagtgaaccacgtgaacctgcccccctgggccagaaacgaccccagactgttcatcctgatccacagacaggccctggagagcgactacgtgagccagaacatctgccagtggatcgacctggtgttcggctacaagcagaagggcaaggccagcgtgcaggccatcaacgtgttccaccccgccacctacttcggcatggacgtgagcgccgtggaggaccccgtgcagagaagagccctggagaccatgatcaagacctacggccagacccccagacagctgttccacatggcccacgtgagcagacccggcgccaagctgaacatcgagggcgagctgcccgccgccgtgggcctgctggtgcagttcgccttcagagagaccagagagcaggtgaaggagatcacctaccccagccccctgagctggatcaagggcctgaagtggggcgagtacgtgggcagccccagcgcccccgtgcccgtggtgtgcttcagccagccccacggcgagagattcggcagcctgcaggccctgcccaccagagccatctgcggcctgagcagaaacttctgcctgctgatgacctacagcaaggagcagggcgtgagaagcatgaacagcaccgacatccagtggagcgccatcctgagctggggctacgccgacaacatcctgagactgaagagcaagcagagcgagccccccgtgaacttcatccagagcagccagcagtaccaggtgaccagctgcgcctgggtgcccgacagctgccagctgttcaccggcagcaagtgcggcgtgatcaccgcctacaccaacagattcaccagcagcacccccagcgagatcgagatggagacccagatccacctgtacggccacaccgaggagatcaccagcctgttcgtgtgcaagccctacagcatcctgatcagcgtgagcagagacggcacctgcatcatctgggacctgaacagactgtgctacgtgcagagcctggccggccacaagagccccgtgaccgccgtgagcgccagcgagaccagcggcgacatcgccaccgtgtgcgacagcgccggcggcggcagcgacctgagactgtggaccgtgaacggcgacctggtgggccacgtgcactgcagagagatcatctgcagcgtggccttcagcaaccagcccgagggcgtgagcatcaacgtgatcgccggcggcctggagaacggcatcgtgagactgtggagcacctgggacctgaagcccgtgagagagatcaccttccccaagagcaacaagcccatcatcagcctgaccttcagctgcgacggccaccacctgtacaccgccaacagcgacggcaccgtgatcgcctggtgcagaaaggaccagcagagactgaagcagcccatgttctacagcttcctgagcagctacgccgccggctag

SEQ ID NO: 87552 - DNA, 11406 bp, synthetic construct; identical to SEQ ID NO: 87551
  misc_feature 1..11406: note = Description of Artificial Sequence: Synthetic coding sequence
  source 1..11406: mol_type = other DNA

SEQ ID NO: 87553 - DNA, 4149 bp, synthetic construct
  misc_feature 1..4149: note = Description of Artificial Sequence: Synthetic coding sequence
  source 1..4149: mol_type = other DNA
atgagcaccgacagcaacagcctggccagagagttcctgaccgacgtgaacagactgtgcaacgccgtggtgcagagagtggaggccagagaggaggaggaggaggagacccacatggccaccctgggccagtacctggtgcacggcagaggcttcctgctgctgaccaagctgaacagcatcatcgaccaggccctgacctgcagagaggagctgctgaccctgctgctgagcctgctgcccctggtgtggaagatccccgtgcaggaggagaaggccaccgacttcaacctgcccctgagcgccgacatcatcctgaccaaggagaagaacagcagcagccagagaagcacccaggagaagctgcacctggagggcagcgccctgagcagccaggtgagcgccaaggtgaacgtgttcagaaagagcagaagacagagaaagatcacccacagatacagcgtgagagacgccagaaagacccagctgagcaccagcgacagcgaggccaacagcgacgagaagggcatcgccatgaacaagcacagaagaccccacctgctgcaccacttcctgaccagcttccccaagcaggaccaccccaaggccaagctggacagactggccaccaaggagcagaccccccccgacgccatggccctggagaacagcagagagatcatccccagacagggcagcaacaccgacatcctgagcgagcccgccgccctgagcgtgatcagcaacatgaacaacagccccttcgacctgtgccacgtgctgctgagcctgctggagaaggtgtgcaagttcgacgtgaccctgaaccacaacagccccctggccgccagcgtggtgcccaccctgaccgagttcctggccggcttcggcgactgctgcagcctgagcgacaacctggagagcagagtggtgagcgccggctggaccgaggagcccgtggccctgatccagagaatgctgttcagaaccgtgctgcacctgctgagcgtggacgtgagcaccgccgagatgatgcccgagaacctgagaaagaacctgaccgagctgctgagagccgccctgaagatcagaatctgcctggagaagcagcccgaccccttcgcccccagacagaagaagaccctgcaggaggtgcaggaggacttcgtgttcagcaagtacagacacagagccctgctgctgcccgagctgctggagggcgtgctgcagatcctgatctgctgcctgcagagcgccgccagcaaccccttctacttcagccaggccatggacctggtgcaggagttcatccagcaccacggcttcaacctgttcgagaccgccgtgctgcagatggagtggctggtgctgagagacggcgtgccccccgaggccagcgagcacctgaaggccctgatcaacagcgtgatgaagatcatgagcaccgtgaagaaggtgaagagcgagcagctgcaccacagcatgtgcaccagaaagagacacagaagatgcgagtacagccacttcatgcaccaccacagagacctgagcggcctgctggtgagcgccttcaagaaccaggtgagcaagaaccccttcgaggagaccgccgacggcgacgtgtactaccccgagagatgctgctgcatcgccgtgtgcgcccaccagtgcctgagactgctgcagcaggccagcctgagcagcacctgcgtgcagatcctgagcggcgtgcacaacatcggcatctgctgctgcatggaccccaagagcgtgatcatccccctgctgcacgccttcaagctgcccgccctgaagaacttccagcagcacatcctgaacatcctgaacaagctgatcctggaccagctgggcggcgccgagatcagccccaagatcaagaaggccgcctgcaacatctgcaccgtggacagcgaccagctggcccagctggaggagaccctgcagggcaacctgtgcgacgccgagctgagcagcagcctgagcagccccagctacagattccagggcatcctgcccagcagcggcagcgaggacctgctgtggaagtgggacgccctgaaggcctaccagaacttcgtgttcgaggaggacagactgcacagcatccagatcgccaaccacatctgcaacctgatccagaagggcaacatcgtggtgcagtggaagctgtacaactacatcttcaaccccgtgctgcagagaggcgtggagctggcccaccactgccagcacctgagcgtgaccagcgcccagagccacgtgtgcagccaccacaaccagtgcctgccccaggacgtgctgcagatctacgtgaagaccctgcccatcctgctgaagagcagagtgatcagagacctgttcctgagctgcaacggcgtgagccagatcatcgagctgaactgcctgaacggcatcagaagccacagcctgaaggccttcgagaccctgatcatcagcctgggcgagcagcagaaggacgccagcgtgcccgacatcgacggcatcgacatcgagcagaaggagctgagcagcgtgcacgtgggcaccagcttccaccaccagcaggcctacagcgacagcccccagagcctgagcaagttctacgccggcctgaaggaggcctaccccaagagaagaaagaccgtgaaccaggacgtgcacatcaacaccatcaacctgttcctgtgcgtggccttcctgtgcgtgagcaaggaggccgagagcgacagagagagcgccaacgacagcgaggacaccagcggctacgacagcaccgccagcgagcccctgagccacatgctgccctgcatcagcctggagagcctggtgctgcccagccccgagcacatgcaccaggccgccgacatctggagcatgtgcagatggatctacatgctgagcagcgtgttccagaagcagttctacagactgggcggcttcagagtgtgccacaagctgatcttcatgatcatccagaagctgttcagaagccacaaggaggagcagggcaagaaggagggcgacaccagcgtgaacgagaaccaggacctgaacagaatcagccagcccaagagaaccatgaaggaggacctgctgagcctggccatcaagagcgaccccatccccagcgagctgggcagcctgaagaagagcgccgacagcctgggcaagctggagctgcagcacatcagcagcatcaacgtggaggaggtgagcgccaccgaggccgcccccgaggaggccaagctgttcaccagccaggagagcgagaccagcctgcagagcatcagactgctggaggccctgctggccatctgcctgcacggcgccagaaccagccagcagaagatggagctggagctgcccaaccagaacctgagcgtggagagcatcctgttcgagatgagagaccacctgagccagagcaaggtgatcgagacccagctggccaagcccctgttcgacgccctgctgagagtggccctgggcaactacagcgccgacttcgagcacaacgacgccatgaccgagaagagccaccagagcgccgaggagctgagcagccagcccggcgacttcagcgaggaggccgaggacagccagtgctgcagcttcaagctgctggtggaggaggagggctacgaggccgacagcgagagcaaccccgaggacggcgagacccaggacgacggcgtggacctgaagagcgagaccgagggcttcagcgccagcagcagccccaacgacctgctggagaacctgacccagggcgagatcatctaccccgagatctgcatgctggagctgaacctgctgagcgccagcaaggccaagctggacgtgctggcccacgtgttcgagagcttcctgaagatcatcagacagaaggagaagaacgtgttcctgctgatgcagcagggcaccgtgaagaacctgctgggcggcttcctgagcatcctgacccaggacgacagcgacttccaggcctgccagagagtgctggtggacctgctggtgagcctgatgagcagcagaacctgcagcgaggagctgaccctgctgctgagaatcttcctggagaagagcccctgcaccagagccaccgaccagaaggtgcagagcacctag

SEQ ID NO: 87554 - DNA, 1254 bp, synthetic construct
  misc_feature 1..1254: note = Description of Artificial Sequence: Synthetic coding sequence
  source 1..1254: mol_type = other DNA
atggccgcccccggcagcgccagaagacccctgctgctgctgctgctgctgctgctgctgggcctgatgcactgcgccagcgccgccatgttcatggtgaagaacggcaacggcaccgcctgcatcatggccaacttcagcgccgccttcagcgtgaactacgacaccaagagcggccccaagaacatgaccttcgacctgcccagcgacgccaccgtggtgctgaacagaagcagctgcggcaaggagaacaccagcgaccccagcctggtgatcgccttcggcagaggccacaccctgaccctgaacttcaccagaaacgccaccagatacagcgtgcagctgatgagcttcgtgtacaacctgagcgacacccacctgttccccaacgccagcagcaaggagatcaagaccgtggagagcatcaccgacatcagagccgacatcgacaagaagtacagatgcgtgagcggcacccaggtgcacatgaacaacgtgaccgtgaccctgcacgacgccaccatccaggcctacctgagcaacagcagcttcagcagaggcgagaccagatgcgagcaggacagacccagccccaccaccgccccccccgccccccccagccccagccccagccccgtgcccaagagccccagcgtggacaagtacaacgtgagcggcaccaacggcacctgcctgctggccagcatgggcctgcagctgaacctgacctacgagagaaaggacaacaccaccgtgaccagactgctgaacatcaaccccaacaagaccagcgccagcggcagctgcggcgcccacctggtgaccctggagctgcacagcgagggcaccaccgtgctgctgttccagttcggcatgaacgccagcagcagcagattcttcctgcagggcatccagctgaacaccatcctgcccgacgccagagaccccgccttcaaggccgccaacggcagcctgagagccctgcaggccaccgtgggcaacagctacaagtgcaacgccgaggagcacgtgagagtgaccaaggccttcagcgtgaacatcttcaaggtgtgggtgcaggccttcaaggtggagggcggccagttcggcagcgtggaggagtgcctgctggacgagaacagcatgctgatccccatcgccgtgggcggcgccctggccggcctggtgctgatcgtgctgatcgcctacctggtgggcagaaagagaagccacgccggctaccagaccatctag

SEQ ID NO: 87555 - DNA, 1095 bp, synthetic construct
  misc_feature 1..1095: note = Description of Artificial Sequence: Synthetic coding sequence
  source 1..1095: mol_type = other DNA
atggccgcccccggcagcgccagaagacccctgctgctgctgctgctgctgctgctgctgggcctgatgcactgcgccagcgccgccatgttcatggtgaagaacggcaacggcaccgcctgcatcatggccaacttcagcgccgccttcagcgtgaactacgacaccaagagcggccccaagaacatgaccttcgacctgcccagcgacgccaccgtggtgctgaacagaagcagctgcggcaaggagaacaccagcgaccccagcctggtgatcgccttcggcagaggccacaccctgaccctgaacttcaccagaaacgccaccagatacagcgtgcagctgatgagcttcgtgtacaacctgagcgacacccacctgttccccaacgccagcagcaaggagaccagatgcgagcaggacagacccagccccaccaccgccccccccgccccccccagccccagccccagccccgtgcccaagagccccagcgtggacaagtacaacgtgagcggcaccaacggcacctgcctgctggccagcatgggcctgcagctgaacctgacctacgagagaaaggacaacaccaccgtgaccagactgctgaacatcaaccccaacaagaccagcgccagcggcagctgcggcgcccacctggtgaccctggagctgcacagcgagggcaccaccgtgctgctgttccagttcggcatgaacgccagcagcagcagattcttcctgcagggcatccagctgaacaccatcctgcccgacgccagagaccccgccttcaaggccgccaacggcagcctgagagccctgcaggccaccgtgggcaacagctacaagtgcaacgccgaggagcacgtgagagtgaccaaggccttcagcgtgaacatcttcaaggtgtgggtgcaggccttcaaggtggagggcggccagttcggcagcgtggaggagtgcctgctggacgagaacagcatgctgatccccatcgccgtgggcggcgccctggccggcctggtgctgatcgtgctgatcgcctacctggtgggcagaaagagaagccacgccggctaccagaccatctag

SEQ ID NO: 87556 - DNA, 1233 bp, synthetic construct
  misc_feature 1..1233: note = Description of Artificial Sequence: Synthetic coding sequence
  source 1..1233: mol_type = other DNA
atggtgtgcttcagactgttccccgtgcccggcagcggcctggtgctggtgtgcctggtgctgggcgccgtgagaagctacgccctggagctgaacctgaccgacagcgagaacgccacctgcctgtacgccaagtggcagatgaacttcaccgtgagatacgagaccaccaacaagacctacaagaccgtgaccatcagcgaccacggcaccgtgacctacaacggcagcatctgcggcgacgaccagaacggccccaagatcgccgtgcagttcggccccggcttcagctggatcgccaacttcaccaaggccgccagcacctacagcatcgacagcgtgagcttcagctacaacaccggcgacaacaccaccttccccgacgccgaggacaagggcatcctgaccgtggacgagctgctggccatcagaatccccctgaacgacctgttcagatgcaacagcctgagcaccctggagaagaacgacgtggtgcagcactactgggacgtgctggtgcaggccttcgtgcagaacggcaccgtgagcaccaacgagttcctgtgcgacaaggacaagaccagcaccgtggcccccaccatccacaccaccgtgcccagccccaccaccacccccacccccaaggagaagcccgaggccggcacctacagcgtgaacaacggcaacgacacctgcctgctggccaccatgggcctgcagctgaacatcacccaggacaaggtggccagcgtgatcaacatcaaccccaacaccacccacagcaccggcagctgcagaagccacaccgccctgctgagactgaacagcagcaccatcaagtacctggacttcgtgttcgccgtgaagaacgagaacagattctacctgaaggaggtgaacatcagcatgtacctggtgaacggcagcgtgttcagcatcgccaacaacaacctgagctactgggacgcccccctgggcagcagctacatgtgcaacaaggagcagaccgtgagcgtgagcggcgccttccagatcaacaccttcgacctgagagtgcagcccttcaacgtgacccagggcaagtacagcaccgcccaggactgcagcgccgacgacgacaacttcctggtgcccatcgccgtgggcgccgccctggccggcgtgctgatcctggtgctgctggcctacttcatcggcctgaagcaccaccacgccggctacgagcagttctag

SEQ ID NO: 87557 - DNA, 1233 bp, synthetic construct
  misc_feature 1..1233: note = Description of Artificial Sequence: Synthetic coding sequence
  source 1..1233: mol_type = other DNA
atggtgtgcttcagactgttccccgtgcccggcagcggcctggtgctggtgtgcctggtgctgggcgccgtgagaagctacgccctggagctgaacctgaccgacagcgagaacgccacctgcctgtacgccaagtggcagatgaacttcaccgtgagatacgagaccaccaacaagacctacaagaccgtgaccatcagcgaccacggcaccgtgacctacaacggcagcatctgcggcgacgaccagaacggccccaagatcgccgtgcagttcggccccggcttcagctggatcgccaacttcaccaaggccgccagcacctacagcatcgacagcgtgagcttcagctacaacaccggcgacaacaccaccttccccgacgccgaggacaagggcatcctgaccgtggacgagctgctggccatcagaatccccctgaacgacctgttcagatgcaacagcctgagcaccctggagaagaacgacgtggtgcagcactactgggacgtgctggtgcaggccttcgtgcagaacggcaccgtgagcaccaacgagttcctgtgcgacaaggacaagaccagcaccgtggcccccaccatccacaccaccgtgcccagccccaccaccacccccacccccaaggagaagcccgaggccggcacctacagcgtgaacaacggcaacgacacctgcctgctggccaccatgggcctgcagctgaacatcacccaggacaaggtggccagcgtgatcaacatcaaccccaacaccacccacagcaccggcagctgcagaagccacaccgccctgctgagactgaacagcagcaccatcaagtacctggacttcgtgttcgccgtgaagaacgagaacagattctacctgaaggaggtgaacatcagcatgtacctggtgaacggcagcgtgttcagcatcgccaacaacaacctgagctactgggacgcccccctgggcagcagctacatgtgcaacaaggagcagaccgtgagcgtgagcggcgccttccagatcaacaccttcgacctgagagtgcagcccttcaacgtgacccagggcaagtacagcaccgcccaggagtgcagcctggacgacgacaccatcctgatccccatcatcgtgggcgccggcctgagcggcctgatcatcgtgatcgtgatcgcctacgtgatcggcagaagaaagagctacgccggctaccagaccctgtag

SEQ ID NO: 87558 - DNA, 1236 bp, synthetic construct
  misc_feature 1..1236: note = Description of Artificial Sequence: Synthetic coding sequence
  source 1..1236: mol_type = other DNA
atggtgtgcttcagactgttccccgtgcccggcagcggcctggtgctggtgtgcctggtgctgggcgccgtgagaagctacgccctggagctgaacctgaccgacagcgagaacgccacctgcctgtacgccaagtggcagatgaacttcaccgtgagatacgagaccaccaacaagacctacaagaccgtgaccatcagcgaccacggcaccgtgacctacaacggcagcatctgcggcgacgaccagaacggccccaagatcgccgtgcagttcggccccggcttcagctggatcgccaacttcaccaaggccgccagcacctacagcatcgacagcgtgagcttcagctacaacaccggcgacaacaccaccttccccgacgccgaggacaagggcatcctgaccgtggacgagctgctggccatcagaatccccctgaacgacctgttcagatgcaacagcctgagcaccctggagaagaacgacgtggtgcagcactactgggacgtgctggtgcaggccttcgtgcagaacggcaccgtgagcaccaacgagttcctgtgcgacaaggacaagaccagcaccgtggcccccaccatccacaccaccgtgcccagccccaccaccacccccacccccaaggagaagcccgaggccggcacctacagcgtgaacaacggcaacgacacctgcctgctggccaccatgggcctgcagctgaacatcacccaggacaaggtggccagcgtgatcaacatcaaccccaacaccacccacagcaccggcagctgcagaagccacaccgccctgctgagactgaacagcagcaccatcaagtacctggacttcgtgttcgccgtgaagaacgagaacagattctacctgaaggaggtgaacatcagcatgtacctggtgaacggcagcgtgttcagcatcgccaacaacaacctgagctactgggacgcccccctgggcagcagctacatgtgcaacaaggagcagaccgtgagcgtgagcggcgccttccagatcaacaccttcgacctgagagtgcagcccttcaacgtgacccagggcaagtacagcaccgccgaggagtgcagcgccgacagcgacctgaacttcctgatccccgtggccgtgggcgtggccctgggcttcctgatcatcgtggtgttcatcagctacatgatcggcagaagaaagagcagaaccggctaccagagcgtgtag

SEQ ID NO: 87559 - DNA, 903 bp, synthetic construct
  misc_feature 1..903: note = Description of Artificial Sequence: Synthetic coding sequence
  source 1..903: mol_type = other DNA
atggtgtgcttcagactgttccccgtgcccggcagcggcctggtgctggtgtgcctggtgctgggcatcctgaccgtggacgagctgctggccatcagaatccccctgaacgacctgttcagatgcaacagcctgagcaccctggagaagaacgacgtggtgcagcactactgggacgtgctggtgcaggccttcgtgcagaacggcaccgtgagcaccaacgagttcctgtgcgacaaggacaagaccagcaccgtggcccccaccatccacaccaccgtgcccagccccaccaccacccccacccccaaggagaagcccgaggccggcacctacagcgtgaacaacggcaacgacacctgcctgctggccaccatgggcctgcagctgaacatcacccaggacaaggtggccagcgtgatcaacatcaaccccaacaccacccacagcaccggcagctgcagaagccacaccgccctgctgagactgaacagcagcaccatcaagtacctggacttcgtgttcgccgtgaagaacgagaacagattctacctgaaggaggtgaacatcagcatgtacctggtgaacggcagcgtgttcagcatcgccaacaacaacctgagctactgggacgcccccctgggcagcagctacatgtgcaacaaggagcagaccgtgagcgtgagcggcgccttccagatcaacaccttcgacctgagagtgcagcccttcaacgtgacccagggcaagtacagcaccgccgaggagtgcagcgccgacagcgacctgaacttcctgatccccgtggccgtgggcgtggccctgggcttcctgatcatcgtggtgttcatcagctacatgatcggcagaagaaagagcagaaccggctaccagagcgtgtag

SEQ ID NO: 87560 - DNA, 1092 bp, synthetic construct
  misc_feature 1..1092: note = Description of Artificial Sequence: Synthetic coding sequence
  source 1..1092: mol_type = other DNA
atgaacttcaccgtgagatacgagaccaccaacaagacctacaagaccgtgaccatcagcgaccacggcaccgtgacctacaacggcagcatctgcggcgacgaccagaacggccccaagatcgccgtgcagttcggccccggcttcagctggatcgccaacttcaccaaggccgccagcacctacagcatcgacagcgtgagcttcagctacaacaccggcgacaacaccaccttccccgacgccgaggacaagggcatcctgaccgtggacgagctgctggccatcagaatccccctgaacgacctgttcagatgcaacagcctgagcaccctggagaagaacgacgtggtgcagcactactgggacgtgctggtgcaggccttcgtgcagaacggcaccgtgagcaccaacgagttcctgtgcgacaaggacaagaccagcaccgtggcccccaccatccacaccaccgtgcccagccccaccaccacccccacccccaaggagaagcccgaggccggcacctacagcgtgaacaacggcaacgacacctgcctgctggccaccatgggcctgcagctgaacatcacccaggacaaggtggccagcgtgatcaacatcaaccccaacaccacccacagcaccggcagctgcagaagccacaccgccctgctgagactgaacagcagcaccatcaagtacctggacttcgtgttcgccgtgaagaacgagaacagattctacctgaaggaggtgaacatcagcatgtacctggtgaacggcagcgtgttcagcatcgccaacaacaacctgagctactgggacgcccccctgggcagcagctacatgtgcaacaaggagcagaccgtgagcgtgagcggcgccttccagatcaacaccttcgacctgagagtgcagcccttcaacgtgacccagggcaagtacagcaccgcccaggagtgcagcctggacgacgacaccatcctgatccccatcatcgtgggcgccggcctgagcggcctgatcatcgtgatcgtgatcgcctacgtgatcggcagaagaaagagctacgccggctaccagaccctgtag

SEQ ID NO: 87561 - DNA, 447 bp, synthetic construct
  misc_feature 1..447: note = Description of Artificial Sequence: Synthetic coding sequence
  source 1..447: mol_type = other DNA
atgaaggccctgatcgtgctgggcctggtgctgctgagcgtgaccgtgcagggcaaggtgttcgagagatgcgagctggccagaaccctgaagagactgggcatggacggctacagaggcatcagcctggccaactggatgtgcctggccaagtgggagagcggctacaacaccagagccaccaactacaacgccggcgacagaagcaccgactacggcatcttccagatcaacagcagatactggtgcaacgacggcaagacccccggcgccgtgaacgcctgccacctgagctgcagcgccctgctgcaggacaacatcgccgacgccgtggcctgcgccaagagagtggtgagagacccccagggcatcagagcctgggtggcctggagaaacagatgccagaacagagacgtgagacagtacgtgcagggctgcggcgtgtag

SEQ ID NO: 87562 - DNA, 585 bp, synthetic construct
  misc_feature 1..585: note = Description of Artificial Sequence: Synthetic coding sequence
  source 1..585: mol_type = other DNA
atgcaggacgcccccctgagctgcctgagccccaccaagtggagcagcgtgagcagcgccgacagcaccgagaagagcgccagcgccgccggcaccagaaacctgcccttccagttctgcctgagacaggccctgagaatgaaggccgccggcatcctgaccctgatcggctgcctggtgaccggcgccgagagcaagatctacaccagatgcaagctggccaagatcttcagcagagccggcctggacaactactggggcttcagcctgggcaactggatctgcatggcctactacgagagcggctacaacaccaccgcccagaccgtgctggacgacggcagcatcgactacggcatcttccagatcaacagcttcgcctggtgcagaagaggcaagctgaaggagaacaaccactgccacgtggcctgcagcgccctggtgaccgacgacctgaccgacgccatcatctgcgccaagaagatcgtgaaggagacccagggcatgaactactggcagggctggaagaagcactgcgagggcagagacctgagcgactggaagaaggactgcgaggtgagctag

SEQ ID NO: 87563 - DNA, 441 bp, synthetic construct
  misc_feature 1..441: note = Description of Artificial Sequence: Synthetic coding sequence
  source 1..441: mol_type = other DNA
atgaaggccagcgtggtgctgagcctgctgggctacctggtggtgcccagcggcgcctacatcctgggcagatgcaccgtggccaagaagctgcacgacggcggcctggactacttcgagggctacagcctggagaactgggtgtgcctggcctacttcgagagcaagttcaaccccatggccatctacgagaacaccagagagggctacaccggcttcggcctgttccagatgagaggcagcgactggtgcggcgaccacggcagaaacagatgccacatgagctgcagcgccctgctgaaccccaacctggagaagaccatcaagtgcgccaagaccatcgtgaagggcaaggagggcatgggcgcctggcccacctggagcagatactgccagtacagcgacaccctggccagatggctggacggctgcaagctgtag

SEQ ID NO: 87564 - DNA, 441 bp, synthetic construct; identical to SEQ ID NO: 87563
  misc_feature 1..441: note = Description of Artificial Sequence: Synthetic coding sequence
  source 1..441: mol_type = other DNA

SEQ ID NO: 87565 - DNA, 447 bp, synthetic construct
  misc_feature 1..447: note = Description of Artificial Sequence: Synthetic coding sequence
  source 1..447: mol_type = other DNA
atgaccaaggccctgctgatctacctggtgagcagcttcctggccctgaaccaggccagcctgatcagcagatgcgacctggcccaggtgctgcagctggaggacctggacggcttcgagggctacagcctgagcgactggctgtgcctggccttcgtggagagcaagttcaacatcagcaagatcaacgagaacgccgacggcagcttcgactacggcctgttccagatcaacagccactactggtgcaacgactacaagagctacagcgagaacctgtgccacgtggactgccaggacctgctgaaccccaacctgctggccggcatccactgcgccaagagaatcgtgagcggcgccagaggcatgaacaactgggtggagtggagactgcactgcagcggcagacccctgttctactggctgaccggctgcagactgagatag

SEQ ID NO: 87566 - DNA, 447 bp, synthetic construct; identical to SEQ ID NO: 87565
  misc_feature 1..447: note = Description of Artificial Sequence: Synthetic coding sequence
  source 1..447: mol_type = other DNA

SEQ ID NO: 87567 - DNA, 447 bp, synthetic construct; identical to SEQ ID NO: 87565
  misc_feature 1..447: note = Description of Artificial Sequence: Synthetic coding sequence
  source 1..447: mol_type = other DNA

SEQ ID NO: 87568 - DNA, 2952 bp, synthetic construct
  misc_feature 1..2952: note = Description of Artificial Sequence: Synthetic coding sequence
  source 1..2952: mol_type = other DNA
atggagatgaagctgcccggccaggagggcttcgaggccagcagcgcccccagaaacatccccagcggcgagctggacagcaaccccgaccccggcaccggccccagccccgacggccccagcgacaccgagagcaaggagctgggcgtgcccaaggaccccctgctgttcatccagctgaacgagctgctgggctggccccaggccctggagtggagagagaccggcagcagcagcgccagcctgctgctggacatgggcgagatgcccagcatcaccctgagcacccacctgcaccacagatgggtgctgttcgaggagaagctggaggtggccgccggcagatggagcgccccccacgtgcccaccctggccctgcccagcctgcagaagctgagaagcctgctggccgagggcctggtgctgctggactgccccgcccagagcctgctggagctggtggagcaggtgaccagagtggagagcctgagccccgagctgagaggccagctgcaggccctgctgctgcagagaccccagcactacaaccagaccaccggcaccagaccctgctggggcagcacccaccccagaaaggccagcgacaacgaggaggcccccctgagagagcagtgccagaaccccctgagacagaagctgccccccggcgccgaggccggcaccgtgctggccggcgagctgggcttcctggcccagcccctgggcgccttcgtgagactgagaaaccccgtggtgctgggcagcctgaccgaggtgagcctgcccagcagattcttctgcctgctgctgggcccctgcatgctgggcaagggctaccacgagatgggcagagccgccgccgtgctgctgagcgacccccagttccagtggagcgtgagaagagccagcaacctgcacgacctgctggccgccctggacgccttcctggaggaggtgaccgtgctgccccccggcagatgggaccccaccgccagaatccccccccccaagtgcctgcccagccagcacaagagactgcccagccagcagagagagatcagaggccccgccgtgcccagactgaccagcgccgaggacagacacagacacggcccccacgcccacagccccgagctgcagagaaccggcagactgttcggcggcctgatccaggacgtgagaagaaaggtgccctggtaccccagcgacttcctggacgccctgcacctgcagtgcttcagcgccgtgctgtacatctacctggccaccgtgaccaacgccatcaccttcggcggcctgctgggcgacgccaccgacggcgcccagggcgtgctggagagcttcctgggcaccgccgtggccggcgccgccttctgcctgatggccggccagcccctgaccatcctgagcagcaccggccccgtgctggtgttcgagagactgctgttcagcttcagcagagactacagcctggactacctgcccttcagactgtgggtgggcatctgggtggccaccttctgcctggtgctggtggccaccgaggccagcgtgctggtgagatacttcaccagattcaccgaggagggcttctgcgccctgatcagcctgatcttcatctacgacgccgtgggcaagatgctgaacctgacccacacctaccccatccagaagcccggcagcagcgcctacggctgcctgtgccagtaccccggccccggcggcaacgagagccagtggatcagaaccagacccaaggacagagacgacatcgtgagcatggacctgggcctgatcaacgccagcctgctgcccccccccgagtgcaccagacagggcggccaccccagaggccccggctgccacaccgtgcccgacatcgccttcttcagcctgctgctgttcctgaccagcttcttcttcgccatggccctgaagtgcgtgaagaccagcagattcttccccagcgtggtgagaaagggcctgagcgacttcagcagcgtgctggccatcctgctgggctgcggcctggacgccttcctgggcctggccacccccaagctgatggtgcccagagagttcaagcccaccctgcccggcagaggctggctggtgagccccttcggcgccaacccctggtggtggagcgtggccgccgccctgcccgccctgctgctgagcatcctgatcttcatggaccagcagatcaccgccgtgatcctgaacagaatggagtacagactgcagaagggcgccggcttccacctggacctgttctgcgtggccgtgctgatgctgctgaccagcgccctgggcctgccctggtacgtgagcgccaccgtgatcagcctggcccacatggacagcctgagaagagagagcagagcctgcgcccccggcgagagacccaacttcctgggcatcagagagcagagactgaccggcctggtggtgttcatcctgaccggcgccagcatcttcctggcccccgtgctgaagttcatccccatgcccgtgctgtacggcatcttcctgtacatgggcgtggccgccctgagcagcatccagttcaccaacagagtgaagctgctgctgatgcccgccaagcaccagcccgacctgctgctgctgagacacgtgcccctgaccagagtgcacctgttcaccgccatccagctggcctgcctgggcctgctgtggatcatcaagagcacccccgccgccatcatcttccccctgatgctgctgggcctggtgggcgtgagaaaggccctggagagagtgttcagcccccaggagctgctgtggctggacgagctgatgcccgaggaggagagaagcatccccgagaagggcctggagcccgagcacagcttcagcggcagcgacagcgaggacagcgagctgatgtaccagcccaaggcccccgagatcaacatcagcgtgaactag

SEQ ID NO: 87569 - DNA, 123 bp, synthetic construct
  misc_feature 1..123: note = Description of Artificial Sequence: Synthetic coding sequence
  source 1..123: mol_type = other DNA
atgagattcgcctggaccgtgctgctgctgggccccctgcagctgtgcgccctggtgcactgcgccccccccgccgccggccagcagcagccccccagagagccccccgccgcccccggctag

SEQ ID NO: 87570 - DNA, 1134 bp, synthetic construct
  misc_feature 1..1134: note = Description of Artificial Sequence: Synthetic coding sequence
  source 1..1134: mol_type = other DNA
atgagattcgcctggaccgtgctgctgctgggccccctgcagctgtgcgccctggtgcactgcgccccccccgccgccggccagcagcagccccccagagagccccccgccgcccccggcgccgccagcgcccagcagcccagaacccccatcctgctgatcagagacaacagaaccgccgccgccagaaccagaaccgccggcagcagcggcgtgaccgccggcagacccagacccaccgccagacactggttccaggccggctacagcaccagcagagccagagaggccggcgccagcagagccgagaaccagaccgcccccggcgaggtgcccgccctgagcaacctgagaccccccagcagagtggacggcatggtgggcgacgacccctacaacccctacaagtacagcgacgacaacccctactacaactactacgacacctacgagagacccagacccggcggcagatacagacccggctacggcaccggctacttccagtacggcctgcccgacctggtggccgacccctactacatccaggccagcacctacgtgcagaagatgagcatgtacaacctgagatgcgccgccgaggagaactgcctggccagcaccgcctacagagccgacgtgagagactacgaccacagagtgctgctgagattcccccagagagtgaagaaccagggcaccagcgacttcctgcccagcagacccagatacagctgggagtggcacagctgccaccagcactaccacagcatggacgagttcagccactacgacctgctggacgccaacacccagagaagagtggccgagggccacaaggccagcttctgcctggaggacaccagctgcgactacggctaccacagaagattcgcctgcaccgcccacacccagggcctgagccccggctgctacgacacctacggcgccgacatcgactgccagtggatcgacatcaccgacgtgaagcccggcaactacatcctgaaggtgagcgtgaaccccagctacctggtgcccgagagcgactacaccaacaacgtggtgagatgcgacatcagatacaccggccaccacgcctacgccagcggctgcaccatcagcccctactag

SEQ ID NO: 87571 - DNA, 2325 bp, synthetic construct
  misc_feature 1..2325: note = Description of Artificial Sequence: Synthetic coding sequence
  source 1..2325: mol_type = other DNA
atggagagacccctgtgcagccacctgtgcagctgcctggccatgctggccctgctgagccccctgagcctggcccagtacgacagctggccccactaccccgagtacttccagcagcccgcccccgagtaccaccagccccaggcccccgccaacgtggccaagatccagctgagactggccggccagaagagaaagcacagcgagggcagagtggaggtgtactacgacggccagtggggcaccgtgtgcgacgacgacttcagcatccacgccgcccacgtggtgtgcagagagctgggctacgtggaggccaagagctggaccgccagcagcagctacggcaagggcgagggccccatctggctggacaacctgcactgcaccggcaacgaggccaccctggccgcctgcaccagcaacggctggggcgtgaccgactgcaagcacaccgaggacgtgggcgtggtgtgcagcgacaagagaatccccggcttcaagttcgacaacagcctgatcaaccagatcgagaacctgaacatccaggtggaggacatcagaatcagagccatcctgagcacctacagaaagagaacccccgtgatggagggctacgtggaggtgaaggagggcaagacctggaagcagatctgcgacaagcactggaccgccaagaacagcagagtggtgtgcggcatgttcggcttccccggcgagagaacctacaacaccaaggtgtacaagatgttcgccagcagaagaaagcagagatactggcccttcagcatggactgcaccggcaccgaggcccacatcagcagctgcaagctgggcccccaggtgagcctggaccccatgaagaacgtgacctgcgagaacggcctgcccgccgtggtgagctgcgtgcccggccaggtgttcagccccgacggccccagcagattcagaaaggcctacaagcccgagcagcccctggtgagactgagaggcggcgcctacatcggcgagggcagagtggaggtgctgaagaacggcgagtggggcaccgtgtgcgacgacaagtgggacctggtgagcgccagcgtggtgtgcagagagctgggcttcggcagcgccaaggaggccgtgaccggcagcagactgggccagggcatcggccccatccacctgaacgagatccagtgcaccggcaacgagaagagcatcatcgactgcaagttcaacgccgagagccagggctgcaaccacgaggaggacgccggcgtgagatgcaacacccccgccatgggcctgcagaagaagctgagactgaacggcggcagaaacccctacgagggcagagtggaggtgctggtggagagaaacggcagcctggtgtggggcatggtgtgcggccagaactggggcatcgtggaggccatggtggtgtgcagacagctgggcctgggcttcgccagcaacgccttccaggagacctggtactggcacggcgacgtgaacagcaacaaggtggtgatgagcggcgtgaagtgcagcggcaccgagctgagcctggcccactgcagacacgacggcgaggacgtggcctgcccccagggcggcgtgcagtacggcgccggcgtggcctgcagcgagaccgcccccgacctggtgctgaacgccgagatggtgcagcagaccacctacctggaggacagacccatgttcatgctgcagtgcgccatggaggagaactgcctgagcgccagcgccgcccagaccgaccccaccaccggctacagaagactgctgagattcagcagccagatccacaacaacggccagagcgacttcagacccaagaacggcagacacgcctggatctggcacgactgccacagacactaccacagcatggaggtgttcacccactacgacctgctgaacctgaacggcaccaaggtggccgagggccacaaggccagcttctgcctggaggacaccgagtgcgagggcgacatccagaagaactacgagtgcgccaacttcggcgaccagggcatcaccatgggctgctgggacatgtacagacacgacatcgactgccagtgggtggacatcaccgacgtgccccccggcgactacctgttccaggtggtgatcaaccccaacttcgaggtggccgagagcgactacagcaacaacatcatgaagtgcagaagcagatacgacggccacagaatctggatgtacaactgccacatcggcggcagcttcagcgaggagaccgagaagaagttcgagcacttcagcggcctgctgaacaaccagctgagcccccagtag

SEQ ID NO: 87572 - DNA, 456 bp, synthetic construct
  misc_feature 1..456: note = Description of Artificial Sequence: Synthetic coding sequence
  source 1..456: mol_type = other DNA
atggagagacccctgtgcagccacctgtgcagctgcctggccatgctggccctgctgagccccctgagcctggcccagtacgacagctggccccactaccccgagtacttccagcagcccgcccccgagtaccaccagccccaggcccccgccaacgtggccaagatccagctgagactggccggccagaagagaaagcacagcgagggcagagtggaggtgtactacgacggccagtggggcaccgtgtgcgacgacgacttcagcatccacgccgcccacgtggtgtgcagagagctgggctacgtggaggccaagagctggaccgccagcagcagctacggcaagggcgagggccccatctggctggacaacctgcactgcaccggcaacgaggccaccctggccgcctgcaccagcaacggctggggcgtgaccgactgcaagcacacctag

SEQ ID NO: 87573 - DNA, 291 bp, synthetic construct
  misc_feature 1..291: note = Description of Artificial Sequence: Synthetic coding sequence
  source 1..291: mol_type = other DNA
atggagagacccctgtgcagccacctgtgcagctgcctggccatgctggccctgctgagccccctgagcctggcccagtacgacagctggccccactaccccgagtacttccagcagcccgcccccgagtaccaccagccccaggcccccgccaacgtggccaagatccagctgagactggccggccagaagagaaagcacagcgagggcagagtggaggtgtactacgacggccagtggggcaccgtgtgcgacgacgacttcagcatccacgccgcccacgtggtgtag

SEQ ID NO: 87574 - DNA, 420 bp, synthetic construct
  misc_feature 1..420: note = Description of Artificial Sequence: Synthetic coding sequence
  source 1..420: mol_type = other DNA
atggagagacccctgtgcagccacctgtgcagctgcctggccatgctggccctgctgagccccctgagcctggcccagtacgacagctggccccactaccccgagtacttccagcagcccgcccccgagtaccaccagccccaggcccccgccaacgtggccaagatccagctgagactggccggccagaagagaaagcacagcgagggcagagtggaggtgtactacgacggccagtggggcaccgtgtgcgacgacgacttcagcatccacgccgcccacgtggtgtgcagagagctgggctacgtggaggccaagagctggaccgccagcagcagctacggcaagggcgagggccccatctggctggacaacctgcactgcaccggcaacgaggccaccctggccgcctgcacctag

SEQ ID NO: 87575 - DNA, 2262 bp, synthetic construct
  misc_feature 1..2262: note = Description of Artificial Sequence: Synthetic coding sequence
  source 1..2262: mol_type = other DNA
atgagacccgtgagcgtgtggcagtggagcccctggggcctgctgctgtgcctgctgtgcagcagctgcctgggcagccccagccccagcaccggccccgagaagaaggccggcagccagggcctgagattcagactggccggcttccccagaaagccctacgagggcagagtggagatccagagagccggcgagtggggcaccatctgcgacgacgacttcaccctgcaggccgcccacatcctgtgcagagagctgggcttcaccgaggccaccggctggacccacagcgccaagtacggccccggcaccggcagaatctggctggacaacctgagctgcagcggcaccgagcagagcgtgaccgagtgcgccagcagaggctggggcaacagcgactgcacccacgacgaggacgccggcgtgatctgcaaggaccagagactgcccggcttcagcgacagcaacgtgatcgaggtggagcaccacctgcaggtggaggaggtgagaatcagacccgccgtgggctggggcagaagacccctgcccgtgaccgagggcctggtggaggtgagactgcccgacggctggagccaggtgtgcgacaagggctggagcgcccacaacagccacgtggtgtgcggcatgctgggcttccccagcgagaagagagtgaacgccgccttctacagactgctggcccagagacagcagcacagcttcggcctgcacggcgtggcctgcgtgggcaccgaggcccacctgagcctgtgcagcctggagttctacagagccaacgacaccgccagatgccccggcggcggccccgccgtggtgagctgcgtgcccggccccgtgtacgccgccagcagcggccagaagaagcagcagcagagcaagccccagggcgaggccagagtgagactgaagggcggcgcccaccccggcgagggcagagtggaggtgctgaaggccagcacctggggcaccgtgtgcgacagaaagtgggacctgcacgccgccagcgtggtgtgcagagagctgggcttcggcagcgccagagaggccctgagcggcgccagaatgggccagggcatgggcgccatccacctgagcgaggtgagatgcagcggccaggagctgagcctgtggaagtgcccccacaagaacatcaccgccgaggactgcagccacagccaggacgccggcgtgagatgcaacctgccctacaccggcgccgagaccagaatcagactgagcggcggcagaagccagcacgagggcagagtggaggtgcagatcggcggccccggccccctgagatggggcctgatctgcggcgacgactggggcaccctggaggccatggtggcctgcagacagctgggcctgggctacgccaaccacggcctgcaggagacctggtactgggacagcggcaacatcaccgaggtggtgatgagcggcgtgagatgcaccggcaccgagctgagcctggaccagtgcgcccaccacggcacccacatcacctgcaagagaaccggcaccagattcaccgccggcgtgatctgcagcgagaccgccagcgacctgctgctgcacagcgccctggtgcaggagaccgcctacatcgaggacagacccctgcacatgctgtactgcgccgccgaggagaactgcctggccagcagcgccagaagcgccaactggccctacggccacagaagactgctgagattcagcagccagatccacaacctgggcagagccgacttcagacccaaggccggcagacacagctgggtgtggcacgagtgccacggccactaccacagcatggacatcttcacccactacgacatcctgacccccaacggcaccaaggtggccgagggccacaaggccagcttctgcctggaggacaccgagtgccaggaggacgtgagcaagagatacgagtgcgccaacttcggcgagcagggcatcaccgtgggctgctgggacctgtacagacacgacatcgactgccagtggatcgacatcaccgacgtgaagcccggcaactacatcctgcaggtggtgatcaaccccaacttcgaggtggccgagagcgacttcaccaacaacgccatgaagtgcaactgcaagtacgacggccacagaatctgggtgcacaactgccacatcggcgacgccttcagcgaggaggccaacagaagattcgagagataccccggccagaccagcaaccagatcatctag

SEQ ID NO: 87576 - DNA, 1827 bp, synthetic construct
  misc_feature 1..1827: note = Description of Artificial Sequence: Synthetic coding sequence
  source 1..1827: mol_type = other DNA
atgagacccgtgagcgtgtggcagtggagcccctggggcctgctgctgtgcctgctgtgcagcagctgcctgggcagccccagccccagcaccggccccgagaagaaggccggcagccagggcctgagattcagactggccggcttccccagaaagccctacgagggcagagtggagatccagagagccggcgagtggggcaccatctgcgacgacgacttcaccctgcaggccgcccacatcctgtgcagagagctgggcttcaccgaggccaccggctggacccacagcgccaagtacggccccggcaccggcagaatctggctggacaacctgagctgcagcggcaccgagcagagcgtgaccgagtgcgccagcagaggctggggcaacagcgactgcacccacgacgaggacgccggcgtgatctgcaaggaccagagactgcccggcttcagcgacagcaacgtgatcgaggccagagtgagactgaagggcggcgcccaccccggcgagggcagagtggaggtgctgaaggccagcacctggggcaccgtgtgcgacagaaagtgggacctgcacgccgccagcgtggtgtgcagagagctgggcttcggcagcgccagagaggccctgagcggcgccagaatgggccagggcatgggcgccatccacctgagcgaggtgagatgcagcggccaggagctgagcctgtggaagtgcccccacaagaacatcaccgccgaggactgcagccacagccaggacgccggcgtgagatgcaacctgccctacaccggcgccgagaccagaatcagactgagcggcggcagaagccagcacgagggcagagtggaggtgcagatcggcggccccggccccctgagatggggcctgatctgcggcgacgactggggcaccctggaggccatggtggcctgcagacagctgggcctgggctacgccaaccacggcctgcaggagacctggtactgggacagcggcaacatcaccgaggtggtgatgagcggcgtgagatgcaccggcaccgagctgagcctggaccagtgcgcccaccacggcacccacatcacctgcaagagaaccggcaccagattcaccgccggcgtgatctgcagcgagaccgccagcgacctgctgctgcacagcgccctggtgcaggagaccgcctacatcgaggacagacccctgcacatgctgtactgcgccgccgaggagaactgcctggccagcagcgccagaagcgccaactggccctacggccacagaagactgctgagattcagcagccagatccacaacctgggcagagccgacttcagacccaaggccggcagacacagctgggtgtggcacgagtgccacggccactaccacagcatggacatcttcacccactacgacatcctgacccccaacggcaccaaggtggccgagggccacaaggccagcttctgcctggaggacaccgagtgccaggaggacgtgagcaagagatacgagtgcgccaacttcggcgagcagggcatcaccgtgggctgctgggacctgtacagacacgacatcgactgccagtggatcgacatcaccgacgtgaagcccggcaactacatcctgcaggtggtgatcaaccccaacttcgaggtggccgagagcgacttcaccaacaacgccatgaagtgcaactgcaagtacgacggccacagaatctgggtgcacaactgccacatcggcgacgccttcagcgaggaggccaacagaagattcgagagataccccggccagaccagcaaccagatcatctag

SEQ ID NO: 87577 - DNA, 2094 bp, synthetic construct
  misc_feature 1..2094: note = Description of Artificial Sequence: Synthetic coding sequence
  source 1..2094: mol_type = other DNA
atgagacccgtgagcgtgtggcagtggagcccctggggcctgctgctgtgcctgctgtgcagcagctgcctgggcagccccagccccagcaccggccccgagaagaaggccggcagccagggcctgagattcagactggccggcttccccagaaagccctacgagggcagagtggagatccagagagccggcgagtggggcaccatctgcgacgacgacttcaccctgcaggccgcccacatcctgtgcagagagctgggcttcaccgaggccaccggctggacccacagcgccaagtacggccccggcaccggcagaatctggctggacaacctgagctgcagcggcaccgagcagagcgtgaccgagtgcgccagcagaggctggggcaacagcgactgcacccacgacgaggacgccggcgtgatctgcaaggaccagagactgcccggcttcagcgacagcaacgtgatcgaggtggagcaccacctgcaggtggaggaggtgagaatcagacccgccgtgggctggggcagaagacccctgcccgtgaccgagggcctggtggaggtgagactgcccgacggctggagccaggtgtgcgacaagggctggagcgcccacaacagccacgtggtgtgcggcatgctgggcttccccagcgagaagagagtgaacgccgccttctacagactgctggcccagagacagcagcacagcttcggcctgcacggcgtggcctgcgtgggcaccgaggcccacctgagcctgtgcagcctggagttctacagagccaacgacaccgccagatgccccggcggcggccccgccgtggtgagctgcgtgcccggccccgtgtacgccgccagcagcggccagaagaagcagcagcagagcaagccccagggcgaggccagagtgagactgaagggcggcgcccaccccggcgagggcagagtggaggtgctgaaggccagcacctggggcaccgtgtgcgacagaaagtgggacctgcacgccgccagcgtggtgtgcagagagctgggcttcggcagcgccagagaggccctgagcggcgccagaatgggccagggcatgggcgccatccacctgagcgaggtgagatgcagcggccaggagctgagcctgtggaagtgcccccacaagaacatcaccgccgaggactgcagccacagccaggacgccggcgtgagatgcaacctgccctacaccggcgccgagaccagagagacctggtactgggacagcggcaacatcaccgaggtggtgatgagcggcgtgagatgcaccggcaccgagctgagcctggaccagtgcgcccaccacggcacccacatcacctgcaagagaaccggcaccagattcaccgccggcgtgatctgcagcgagaccgccagcgacctgctgctgcacagcgccctggtgcaggagaccgcctacatcgaggacagacccctgcacatgctgtactgcgccgccgaggagaactgcctggccagcagcgccagaagcgccaactggccctacggccacagaagactgctgagattcagcagccagatccacaacctgggcagagccgacttcagacccaaggccggcagacacagctgggtgtggcacgagtgccacggccactaccacagcatggacatcttcacccactacgacatcctgacccccaacggcaccaaggtggccgagggccacaaggccagcttctgcctggaggacaccgagtgccaggaggacgtgagcaagagatacgagtgcgccaacttcggcgagcagggcatcaccgtgggctgctgggacctgtacagacacgacatcgactgccagtggatcgacatcaccgacgtgaagcccggcaactacatcctgcaggtggtgatcaaccccaacttcgaggtggccgagagcgacttcaccaacaacgccatgaagtgcaactgcaagtacgacggccacagaatctgggtgcacaactgccacatcggcgacgccttcagcgaggaggccaacagaagattcgagagataccccggccagaccagcaaccagatcatctag

SEQ ID NO: 87578 - DNA, 912 bp, synthetic construct
  misc_feature 1..912: note = Description of Artificial Sequence: Synthetic coding sequence
  source 1..912: mol_type = other DNA
atgagacccgtgagcgtgtggcagtggagcccctggggcctgctgctgtgcctgctgtgcagcagctgcctgggcagccccagccccagcaccggccccgagaagaaggccggcagccagggcctgagattcagactggccggcttccccagaaagccctacgagggcagagtggagatccagagagccggcgagtggggcaccatctgcgacgacgacttcaccctgcaggccgcccacatcctgtgcagagagctgggcttcaccgaggccaccggctggacccacagcgccaagtacggccccggcaccggcagaatctggctggacaacctgagctgcagcggcaccgagcagagcgtgaccgagtgcgccagcagaggctggggcaacagcgactgcacccacgacgaggacgccggcgtgatctgcaaggaccagagactgcccggcttcagcgacagcaacgtgatcgaggtggagcaccacctgcaggtggaggaggtgagaatcagacccgccgtgggctggggcagaagacccctgcccgtgaccgagggcctggtggaggtgagactgcccgacggctggagccaggtgtgcgacaagggctggagcgcccacaacagccacgtggtgtgcggcatgctgggcttccccagcgagaagagagtgaacgccgccttctacagactgctggcccagagacagcagcacagcttcggcctgcacggcgtggcctgcgtgggcaccgaggcccacctgagcctgtgcagcctggagttctacagagccaacgacaccgccagatgccccggcggcggccccgccgtggtgagctgcgtgcccggccccgtgtacgccgccagcagcggccagaagaagcagcagcagagcaagccccagggctag

SEQ ID NO: 87579 - DNA, 2271 bp, synthetic construct
  misc_feature 1..2271: note = Description of Artificial Sequence: Synthetic coding sequence
  source 1..2271: mol_type = other DNA
atggcctggagcccccccgccaccctgttcctgttcctgctgctgctgggccagcccccccccagcagaccccagagcctgggcaccaccaagctgagactggtgggccccgagagcaagcccgaggagggcagactggaggtgctgcaccagggccagtggggcaccgtgtgcgacgacaacttcgccatccaggaggccaccgtggcctgcagacagctgggcttcgaggccgccctgacctgggcccacagcgccaagtacggccagggcgagggccccatctggctggacaacgtgagatgcgtgggcaccgagagcagcctggaccagtgcggcagcaacggctggggcgtgagcgactgcagccacagcgaggacgtgggcgtgatctgccaccccagaagacacagaggctacctgagcgagaccgtgagcaacgccctgggcccccagggcagaagactggaggaggtgagactgaagcccatcctggccagcgccaagcagcacagccccgtgaccgagggcgccgtggaggtgaagtacgagggccactggagacaggtgtgcgaccagggctggaccatgaacaacagcagagtggtgtgcggcatgctgggcttccccagcgaggtgcccgtggacagccactactacagaaaggtgtgggacctgaagatgagagaccccaagagcagactgaagagcctgaccaacaagaacagcttctggatccaccaggtgacctgcctgggcaccgagccccacatggccaactgccaggtgcaggtggcccccgccagaggcaagctgagacccgcctgccccggcggcatgcacgccgtggtgagctgcgtggccggcccccacttcagaccccccaagaccaagccccagagaaagggcagctgggccgaggagcccagagtgagactgagaagcggcgcccaggtgggcgagggcagagtggaggtgctgatgaacagacagtggggcaccgtgtgcgaccacagatggaacctgatcagcgccagcgtggtgtgcagacagctgggcttcggcagcgccagagaggccctgttcggcgccagactgggccagggcctgggccccatccacctgagcgaggtgagatgcagaggctacgagagaaccctgagcgactgccccgccctggagggcagccagaacggctgccagcacgagaacgacgccgccgtgagatgcaacgtgcccaacatgggcttccagaaccaggtgagactggccggcggcagaatccccgaggagggcctgctggaggtgcaggtggaggtgaacggcgtgcccagatggggcagcgtgtgcagcgagaactggggcctgaccgaggccatggtggcctgcagacagctgggcctgggcttcgccatccacgcctacaaggagacctggttctggagcggcacccccagagcccaggaggtggtgatgagcggcgtgagatgcagcggcaccgagctggccctgcagcagtgccagagacacggccccgtgcactgcagccacggcggcggcagattcctggccggcgtgagctgcatggacagcgcccccgacctggtgatgaacgcccagctggtgcaggagaccgcctacctggaggacagacccctgagccagctgtactgcgcccacgaggagaactgcctgagcaagagcgccgaccacatggactggccctacggctacagaagactgctgagattcagcacccagatctacaacctgggcagaaccgacttcagacccaagaccggcagagacagctgggtgtggcaccagtgccacagacactaccacagcatcgaggtgttcacccactacgacctgctgaccctgaacggcagcaaggtggccgagggccacaaggccagcttctgcctggaggacaccaactgccccaccggcctgcagagaagatacgcctgcgccaacttcggcgagcagggcgtgaccgtgggctgctgggacacctacagacacgacatcgactgccagtgggtggacatcaccgacgtgggccccggcaactacatcttccaggtgatcgtgaacccccactacgaggtggccgagagcgacttcagcaacaacatgctgcagtgcagatgcaagtacgacggccacagagtgtggctgcacaactgccacaccggcaacagctaccccgccaacgccgagctgagcctggagcaggagcagagactgagaaacaacctgatctag

SEQ ID NO: 87580 - DNA, 1794 bp, synthetic construct
  misc_feature 1..1794: note = Description of Artificial Sequence: Synthetic coding sequence
  source 1..1794: mol_type = other DNA
atggccgccgtgcaggccgccgaggtgaaggtggacggcagcgagcccaagctgagcaagaacgagctgaagagaagactgaaggccgagaagaaggtggccgagaaggaggccaagcagaaggagctgagcgagaagcagctgagccaggccaccgccgccgccaccaaccacaccaccgacaacggcgtgggccccgaggaggagagcgtggaccccaaccagtactacaagatcagaagccaggccatccaccagctgaaggtgaacggcgaggacccctacccccacaagttccacgtggacatcagcctgaccgacttcatccagaagtacagccacctgcagcccggcgaccacctgaccgacatcaccctgaaggtggccggcagaatccacgccaagagagccagcggcggcaagctgatcttctacgacctgagaggcgagggcgtgaagctgcaggtgatggccaacagcagaaactacaagagcgaggaggagttcatccacatcaacaacaagctgagaagaggcgacatcatcggcgtgcagggcaaccccggcaagaccaagaagggcgagctgagcatcatcccctacgagatcaccctgctgagcccctgcctgcacatgctgccccacctgcacttcggcctgaaggacaaggagaccagatacagacagagatacctggacctgatcctgaacgacttcgtgagacagaagttcatcatcagaagcaagatcatcacctacatcagaagcttcctggacgagctgggcttcctggagatcgagacccccatgatgaacatcatccccggcggcgccgtggccaagcccttcatcacctaccacaacgagctggacatgaacctgtacatgagaatcgcccccgagctgtaccacaagatgctggtggtgggcggcatcgacagagtgtacgagatcggcagacagttcagaaacgagggcatcgacctgacccacaaccccgagttcaccacctgcgagttctacatggcctacgccgactaccacgacctgatggagatcaccgagaagatggtgagcggcatggtgaagcacatcaccggcagctacaaggtgacctaccaccccgacggccccgagggccaggcctacgacgtggacttcaccccccccttcagaagaatcaacatggtggaggagctggagaaggccctgggcatgaagctgcccgagaccaacctgttcgagaccgaggagaccagaaagatcctggacgacatctgcgtggccaaggccgtggagtgccccccccccagaaccaccgccagactgctggacaagctggtgggcgagttcctggaggtgacctgcatcaaccccaccttcatctgcgaccacccccagatcatgagccccctggccaagtggcacagaagcaaggagggcctgaccgagagattcgagctgttcgtgatgaagaaggagatctgcaacgcctacaccgagctgaacgaccccatgagacagagacagctgttcgaggagcaggccaaggccaaggccgccggcgacgacgaggccatgttcatcgacgagaacttctgcaccgccctggagtacggcctgccccccaccgccggctggggcatgggcatcgacagagtggccatgttcctgaccgacagcaacaacatcaaggaggtgctgctgttccccgccatgaagcccgaggacaagaaggagaacgtggccaccaccgacaccctggagagcaccaccgtgggcaccagcgtgtag

SEQ ID NO: 87581 - DNA, 1878 bp, synthetic construct
  misc_feature 1..1878: note = Description of Artificial Sequence: Synthetic coding sequence
  source 1..1878: mol_type = other DNA
atgctgacccaggccgccgtgagactggtgagaggcagcctgagaaagaccagctgggccgagtggggccacagagagctgagactgggccagctggcccccttcaccgccccccacaaggacaagagcttcagcgaccagagaagcgagctgaagagaagactgaaggccgagaagaaggtggccgagaaggaggccaagcagaaggagctgagcgagaagcagctgagccaggccaccgccgccgccaccaaccacaccaccgacaacggcgtgggccccgaggaggagagcgtggaccccaaccagtactacaagatcagaagccaggccatccaccagctgaaggtgaacggcgaggacccctacccccacaagttccacgtggacatcagcctgaccgacttcatccagaagtacagccacctgcagcccggcgaccacctgaccgacatcaccctgaaggtggccggcagaatccacgccaagagagccagcggcggcaagctgatcttctacgacctgagaggcgagggcgtgaagctgcaggtgatggccaacagcagaaactacaagagcgaggaggagttcatccacatcaacaacaagctgagaagaggcgacatcatcggcgtgcagggcaaccccggcaagaccaagaagggcgagctgagcatcatcccctacgagatcaccctgctgagcccctgcctgcacatgctgccccacctgcacttcggcctgaaggacaaggagaccagatacagacagagatacctggacctgatcctgaacgacttcgtgagacagaagttcatcatcagaagcaagatcatcacctacatcagaagcttcctggacgagctgggcttcctggagatcgagacccccatgatgaacatcatccccggcggcgccgtggccaagcccttcatcacctaccacaacgagctggacatgaacctgtacatgagaatcgcccccgagctgtaccacaagatgctggtggtgggcggcatcgacagagtgtacgagatcggcagacagttcagaaacgagggcatcgacctgacccacaaccccgagttcaccacctgcgagttctacatggcctacgccgactaccacgacctgatggagatcaccgagaagatggtgagcggcatggtgaagcacatcaccggcagctacaaggtgacctaccaccccgacggccccgagggccaggcctacgacgtggacttcaccccccccttcagaagaatcaacatggtggaggagctggagaaggccctgggcatgaagctgcccgagaccaacctgttcgagaccgaggagaccagaaagatcctggacgacatctgcgtggccaaggccgtggagtgccccccccccagaaccaccgccagactgctggacaagctggtgggcgagttcctggaggtgacctgcatcaaccccaccttcatctgcgaccacccccagatcatgagccccctggccaagtggcacagaagcaaggagggcctgaccgagagattcgagctgttcgtgatgaagaaggagatctgcaacgcctacaccgagctgaacgaccccatgagacagagacagctgttcgaggagcaggccaaggccaaggccgccggcgacgacgaggccatgttcatcgacgagaacttctgcaccgccctggagtacggcctgccccccaccgccggctggggcatgggcatcgacagagtggccatgttcctgaccgacagcaacaacatcaaggaggtgctgctgttccccgccatgaagcccgaggacaagaaggagaacgtggccaccaccgacaccctggagagcaccaccgtgggcaccagcgtgtag

SEQ ID NO: 87582 - DNA, 1569 bp, synthetic construct
  misc_feature 1..1569: note = Description of Artificial Sequence: Synthetic coding sequence
  source 1..1569: mol_type = other DNA
atgcagccctggcacggcaaggccatgcagagagccagcgaggccggcgccaccgcccccaaggccagcgccagaaacgccagaggcgcccccatggaccccaccgagagccccgccgcccccgaggccgccctgcccaaggccggcaagttcggccccgccagaaagagcggcagcagacagaagaagagcgcccccgacacccaggagagaccccccgtgagagccaccggcgccagagccaagaaggccccccagagagcccaggacacccagcccagcgacgccaccagcgcccccggcgccgagggcctggagccccccgccgccagagagcccgccctgagcagagccggcagctgcagacagagaggcgccagatgcagcaccaagcccagacccccccccggcccctgggacgtgcccagccccggcctgcccgtgagcgcccccatcctggtgagaagagacgccgcccccggcgccagcaagctgagagccgtgctggagaagctgaagctgagcagagacgacatcagcaccgccgccggcatggtgaagggcgtggtggaccacctgctgctgagactgaagtgcgacagcgccttcagaggcgtgggcctgctgaacaccggcagctactacgagcacgtgaagatcagcgcccccaacgagttcgacgtgatgttcaagctggaggtgcccagaatccagctggaggagtacagcaacaccagagcctactacttcgtgaagttcaagagaaaccccaaggagaaccccctgagccagttcctggagggcgagatcctgagcgccagcaagatgctgagcaagttcagaaagatcatcaaggaggagatcaacgacatcaaggacaccgacgtgatcatgaagagaaagagaggcggcagccccgccgtgaccctgctgatcagcgagaagatcagcgtggacatcaccctggccctggagagcaagagcagctggcccgccagcacccaggagggcctgagaatccagaactggctgagcgccaaggtgagaaagcagctgagactgaagcccttctacctggtgcccaagcacgccaaggagggcaacggcttccaggaggagacctggagactgagcttcagccacatcgagaaggagatcctgaacaaccacggcaagagcaagacctgctgcgagaacaaggaggagaagtgctgcagaaaggactgcctgaagctgatgaagtacctgctggagcagctgaaggagagattcaaggacaagaagcacctggacaagttcagcagctaccacgtgaagaccgccttcttccacgtgtgcacccagaacccccaggacagccagtgggacagaaaggacctgggcctgtgcttcgacaactgcgtgacctacttcctgcagtgcctgagaaccgagaagctggagaactacttcatccccgagttcaacctgttcagcagcaacctgatcgacaagagaagcaaggagttcctgaccaagcagatcgagtacgagagaaacaacgagttccccgtgttcgacgagttctag

SEQ ID NO: 87583 - DNA, 1344 bp, synthetic construct
  misc_feature 1..1344: note = Description of Artificial Sequence: Synthetic coding sequence
  source 1..1344: mol_type = other DNA
atgcagccctggcacggcaaggccatgcagagagccagcgaggccggcgccaccgcccccaaggccagcgccagaaacgccagaggcgcccccatggaccccaccgagagccccgccgcccccgaggccgccctgcccaaggccggcaagttcggccccgccagaaagagcggcagcagacagaagaagagcgcccccgacacccaggagagaccccccgtgagagccaccggcgccagagccaagaaggccccccagagagcccaggacacccagcccagcgacgccaccagcgcccccggcgccgagggcctggagccccccgccgccagagagcccgccctgagcagagccggcagctgcagacagagaggcgccagatgcagcaccaagcccagacccccccccggcccctgggacgtgcccagccccggcctgcccgtgagcgcccccatcctggtgagaagagacgccgcccccggcgccagcaagctgagagccgtgctggagaagctgaagctgagcagagacgacatcagcaccgccgccggcatggtgaagggcgtggtggaccacctgctgctgagactgaagtgcgacagcgccttcagaggcgtgggcctgctgaacaccggcagctactacgagcacgtgaagatcagcgcccccaacgagttcgacgtgatgttcaagctggaggtgcccagaatccagctggaggagtacagcaacaccagagcctactacttcgtgaagttcaagagaaaccccaaggagaaccccctgagccagttcctggagggcgagatcctgagcgccagcaagatgctgagcaagttcagaaagatcatcaaggaggagatcaacgacatcaaggacaccgacgtgatcatgaagagaaagagaggcggcagccccgccgtgaccctgctgatcagcgagaagatcagcgtggacatcaccctggccctggagagcaagagcagctggcccgccagcacccaggagggcctgagaatccagaactggctgagcgccaaggtgagaaagcagctgagactgaagcccttctacctggtgcccaagcacgccaaggagggcaacggcttccaggaggagacctggagactgagcttcagccacatcgagaaggagatcctgaacaaccacggcaagagcaagacctgctgcgagaacaaggaggagaagtgctgcagaaaggactgcctgaagctgatgaagtacctgctggagcagctgaaggagagattcaaggacaagaagcacctggacaagttcagcagctaccacgtgaagaccgccttcttccacagactgtactag

SEQ ID NO: 87584 - DNA, 1080 bp, synthetic construct
  misc_feature 1..1080: note = Description of Artificial Sequence: Synthetic coding sequence
  source 1..1080: mol_type = other DNA
atgatcgccgcccaggccaagctggtgtaccacctgaacaagtactacaacgagaagtgccaggccagaaaggccgccatcgccaagaccatcagagaggtgtgcaaggtggtgagcgacgtgctgaaggaggtggaggtgcaggagcccagattcatcagcagcctgaacgagatggacaacagatacgagggcctggaggtgatcagccccaccgagttcgaggtggtgctgtacctgaaccagatgggcgtgttcaacttcgtggacgacggcagcctgcccggctgcgccgtgctgaagctgagcgacggcagaaagagaagcatgagcctgtgggtggagttcatcaccgccagcggctacctgagcgccagaaagatcagaagcagattccagaccctggtggcccaggccgtggacaagtgcagctacagagacgtggtgaagatggtggccgacaccagcgaggtgaagctgagaatcagagacagatacgtggtgcagatcacccccgccttcaagtgcaccggcatctggcccagaagcgccgcccactggcccctgccccacatcccctggcccggccccaacagagtggccgaggtgaaggccgagggcttcaacctgctgagcaaggagtgccacagcctggccggcaagcagagcagcgccgagagcgacgcctgggtgctgcagttcgccgaggccgagaacagactgcagatgggcggctgcagaaagaagtgcctgagcatcctgaagaccctgagagacagacacctggagctgcccggccagcccctgaacaactaccacatgaagaccctggtgagctacgagtgcgagaagcaccccagagagagcgactgggacgagagctgcctgggcgacagactgaacggcatcctgctgcagctgatcagctgcctgcagtgcagaagatgcccccactacttcctgcccaacctggacctgttccagggcaagccccacagcgccctggagaacgccgccaagcagacctggagactggccagagagatcctgaccaaccccaagagcctggagaagctgtag

SEQ ID NO: 87585 - DNA, 1176 bp, synthetic construct
  misc_feature 1..1176: note = Description of Artificial Sequence: Synthetic coding sequence
  source 1..1176: mol_type = other DNA
atgagcggccccgtgcccagcagagccagagtgtacaccgacgtgaacacccacagacccagagagtactgggactacgagagccacgtggtggagtggggcaaccaggacgactaccagctggtgagaaagctgggcagaggcaagtacagcgaggtgttcgaggccatcaacatcaccaacaacgagaaggtggtggtgaagatcctgaagcccgtgaagaagaagaagatcaagagagagatcaagatcctggagaacctgagaggcggccccaacatcatcaccctggccgacatcgtgaaggaccccgtgagcagaacccccgccctggtgttcgagcacgtgaacaacaccgacttcaagcagctgtaccagaccctgaccgactacgacatcagattctacatgtacgagatcctgaaggccctggactactgccacagcatgggcatcatgcacagagacgtgaagccccacaacgtgatgatcgaccacgagcacagaaagctgagactgatcgactggggcctggccgagttctaccaccccggccaggagtacaacgtgagagtggccagcagatacttcaagggccccgagctgctggtggactaccagatgtacgactacagcctggacatgtggagcctgggctgcatgctggccagcatgatcttcagaaaggagcccttcttccacggccacgacaactacgaccagctggtgagaatcgccaaggtgctgggcaccgaggacctgtacgactacatcgacaagtacaacatcgagctggaccccagattcaacgacatcctgggcagacacagcagaaagagatgggagagattcgtgcacagcgagaaccagcacctggtgagccccgaggccctggacttcctggacaagctgctgagatacgaccaccagagcagactgaccgccagagaggccatggagcacccctacttctacaccgtggtgaaggaccaggccagaatgggcagcagcagcatgcccggcggcagcacccccgtgagcagcgccaacatgatgagcggcatcagcagcgtgcccacccccagccccctgggccccctggccggcagccccgtgatcgccgccgccaaccccctgggcatgcccgtgcccgccgccgccggcgcccagcagtag

SEQ ID NO: 87586 - DNA, 1347 bp, synthetic construct
  misc_feature 1..1347: note = Description of Artificial Sequence: Synthetic coding sequence
  source 1..1347: mol_type = other DNA
atgtaccccagcaacaagaagaagaaggtgtggagagaggagaaggagagactgctgaagatgaccctggaggagagaagaaaggagtacctgagagactacatccccctgaacagcatcctgagctggaaggaggagatgaagggcaagggccagaacgacgaggagaacacccaggagaccagccaggtgaagaagagcctgaccgagaaggtgagcctgtacagaggcgacatcaccctgctggaggtggacgccatcgtgaacgccgccaacgccagcctgctgggcggcggcggcgtggacggctgcatccacagagccgccggcccctgcctgctggccgagtgcagaaacctgaacggctgcgacaccggccacgccaagatcacctgcggctacgacctgcccgccaagtacgtgatccacaccgtgggccccatcgccagaggccacatcaacggcagccacaaggaggacctggccaactgctacaagagcagcctgaagctggtgaaggagaacaacatcagaagcgtggccttcccctgcatcagcaccggcatctacggcttccccaacgagcccgccgccgtgatcgccctgaacaccatcaaggagtggctggccaagaaccaccacgaggtggacagaatcatcttctgcgtgttcctggaggtggacttcaagatctacaagaagaagatgaacgagttcttcagcgtggacgacaacaacgaggaggaggaggacgtggagatgaaggaggacagcgacgagaacggccccgaggagaagcagagcgtggaggagatggaggagcagagccaggacgccgacggcgtgaacaccgtgaccgtgcccggccccgccagcgaggaggccgtggaggactgcaaggacgaggacttcgccaaggacgagaacatcaccaagggcggcgaggtgaccgaccacagcgtgagagaccaggaccaccccgacggccaggagaacgacagcaccaagaacgagatcaagatcgagaccgagagccagagcagctacatggagaccgaggagctgagcagcaaccaggaggacgccgtgatcgtggagcagcccgaggtgatccccctgaccgaggaccaggaggagaaggagggcgagaaggcccccggcgaggacacccccagaatgcccggcaagagcgagggcagcagcgacctggagaacacccccggccccgacgtggagatgaacagccaggtggacaaggtgaacgaccccaccgagagccagcaggaggaccagctgatcgccggcgcccaggacgaggccaaggagcagagaaacggcaccaagtag

SEQ ID NO: 87587 - DNA, 642 bp, synthetic construct
  misc_feature 1..642: note = Description of Artificial Sequence: Synthetic coding sequence
  source 1..642: mol_type = other DNA
atgaacgagttcttcagcgtggacgacaacaacgaggaggaggaggacgtggagatgaaggaggacagcgacgagaacggccccgaggagaagcagagcgtggaggagatggaggagcagagccaggacgccgacggcgtgaacaccgtgaccgtgcccggccccgccagcgaggaggccgtggaggactgcaaggacgaggacttcgccaaggacgagaacatcaccaagggcggcgaggtgaccgaccacagcgtgagagaccaggaccaccccgacggccaggagaacgacagcaccaagaacgagatcaagatcgagaccgagagccagagcagctacatggagaccgaggagctgagcagcaaccaggaggacgccgtgatcgtggagcagcccgaggtgatccccctgaccgaggaccaggaggagaaggagggcgagaaggcccccggcgaggacacccccagaatgcccggcaagagcgagggcagcagcgacctggagaacacccccggccccgacgtggagatgaacagccaggtggacaaggtgaacgaccccaccgagagccagcaggaggaccagctgatcgccggcgcccaggacgaggccaaggagcagagaaacggcaccaagtag

SEQ ID NO: 87588 - DNA, 642 bp, synthetic construct; identical to SEQ ID NO: 87587
  misc_feature 1..642: note = Description of Artificial Sequence: Synthetic coding sequence
  source 1..642: mol_type = other DNA

SEQ ID NO: 87589 - DNA, 1068 bp, synthetic construct
  misc_feature 1..1068: note = Description of Artificial Sequence: Synthetic coding sequence
  source 1..1068: mol_type = other DNA
atggccgtgcaggagagcgccgcccagctgagcatgaccctgaaggtgcaggagtaccccaccctgaaggtgccctacgagaccctgaacaagagattcagagccgcccagaagaacatcgacagagagaccagccacgtgaccatggtggtggccgagctggagaagaccctgagcggctgccccgccgtggacagcgtggtgagcctgctggacggcgtggtggagaagctgagcgtgctgaagagaaaggccgtggagagcatccaggccgaggacgagagcgccaagctgtgcaagagaagaatcgagcacctgaaggagcacagcagcgaccagcccgccgccgccagcgtgtggaagagaaagagaatggacagaatgatggtggagcacctgctgagatgcggctactacaacaccgccgtgaagctggccagacagagcggcatcgagagctgcctggagttcagcctgagaatccaggagttcatcgagctgatcagacagaacaagagactggacgccgtgagacacgccagaaagcacttcagccaggccgagggcagccagctggacgaggtgagacaggccatgggcatgctggccttcccccccgacacccacatcagcccctacaaggacctgctggaccccgccagatggagaatgctgatccagcagttcagatacgacaactacagactgcaccagctgggcaacaacagcgtgttcaccctgaccctgcaggccggcctgagcgccatcaagaccccccagtgctacaaggaggacggcagcagcaagagccccgactgccccgtgtgcagcagaagcctgaacaagctggcccagcccctgcccatggcccactgcgccaacagcagactggtgtgcaagatcagcggcgacgtgatgaacgagaacaacccccccatgatgctgcccaacggctacgtgtacggctacaacagcctgctgagcatcagacaggacgacaaggtggtgtgccccagaaccaaggaggtgttccacttcagccaggccgagaaggtgtacatcatgtag

SEQ ID NO: 87590 - DNA, 1191 bp, synthetic construct
  misc_feature 1..1191: note = Description of Artificial Sequence: Synthetic coding sequence
  source 1..1191: mol_type = other DNA
atggccgtgcaggagagcgccgcccagctgagcatgaccctgaaggtgcaggagtaccccaccctgaaggtgccctacgagaccctgaacaagagattcagagccgcccagaagaacatcgacagagagaccagccacgtgaccatggtggtggccgagctggagaagaccctgagcggctgccccgccgtggacagcgtggtgagcctgctggacggcgtggtggagaagctgagcgtgctgaagagaaaggccgtggagagcatccaggccgaggacgagagcgccaagctgtgcaagagaagaatcgagcacctgaaggagcacagcagcgaccagcccgccgccgccagcgtgtggaagagaaagagaatggacagaatgatggtggagcacctgctgagatgcggctactacaacaccgccgtgaagctggccagacagagcggcatcgaggacctggtgaacatcgagatgttcctgaccgccaaggaggtggaggagagcctggagagaagagagaccgccacctgcctggcctggtgccacgacaacaagagcagactgagaaagatgaagagctgcctggagttcagcctgagaatccaggagttcatcgagctgatcagacagaacaagagactggacgccgtgagacacgccagaaagcacttcagccaggccgagggcagccagctggacgaggtgagacaggccatgggcatgctggccttcccccccgacacccacatcagcccctacaaggacctgctggaccccgccagatggagaatgctgatccagcagttcagatacgacaactacagactgcaccagctgggcaacaacagcgtgttcaccctgaccctgcaggccggcctgagcgccatcaagaccccccagtgctacaaggaggacggcagcagcaagagccccgactgccccgtgtgcagcagaagcctgaacaagctggcccagcccctgcccatggcccactgcgccaacagcagactggtgtgcaagatcagcggcgacgtgatgaacgagaacaacccccccatgatgctgcccaacggctacgtgtacggctacaacagcctgctgagcatcagacaggacgacaaggtggtgtgccccagaaccaaggaggtgttccacttcagccaggccgagaaggtgtacatcatgtag

SEQ ID NO: 87591 - DNA, 987 bp, synthetic construct
  misc_feature 1..987: note = Description of Artificial Sequence: Synthetic coding sequence
  source 1..987: mol_type = other DNA
atggccgtgcaggagagcgccgcccagctgagcatgaccctgaaggtgcaggagtaccccaccctgaaggtgccctacgagaccctgaacaagagattcagagccgcccagaagaacatcgacagagagaccagccacgtgaccatggtggtggccgagctggagaagaccctgagcggctgccccgccgtggacagcgtggtgagcctgctggacggcgtggtggagaagctgagcgtgctgaagagaaaggccgtggagagcatccaggccgaggacgagagcgccaagctgtgcaagagaagaatcgagcacctgaaggagcacagcagcgaccagcccgccgccgccagcgtgtggaagagaaagagaatggacagaatgatggtggagcacctgctgagatgcggctactacaacaccgccgtgaagctggccagacagagcggcatcgagacctgcaagaaggccctgcagcccagcagaagagagcccgccggcagaggcgcccccggccacggccacgccggcctgcccgccagacacgcccacctgcccgtgcagggccccagcggcccctgcaccgtggccgacgccgaccccgccgtgcccgtgagacagctgcccaccacccccgccggcaagcagttctgcgtgcacccccaccccgccggctggcccctgagccaccaggagcagtgctacaaggaggacggcagcagcaagagccccgactgccccgtgtgcagcagaagcctgaacaagctggcccagcccctgcccatggcccactgcgccaacagcagactggtgtgcaagatcagcggcgacgtgatgaacgagaacaacccccccatgatgctgcccaacggctacgtgtacggctacaacagcctgctgagcatcagacaggacgacaaggtggtgtgccccagaaccaaggaggtgttccacttcagccaggccgagaaggtgtacatcatgtag

SEQ ID NO: 87592 - DNA, 954 bp, synthetic construct
  misc_feature 1..954: note = Description of Artificial Sequence: Synthetic coding sequence
  source 1..954: mol_type = other DNA
atgaccctgaaggtgcaggagtaccccaccctgaaggtgccctacgagaccctgaacaagagattcagagccgcccagaagaacatcgacagagagaccagccacgtgaccatggtggtggccgagctggagaagaccctgagcggctgccccgccgtggacagcgtggtgagcctgctggacggcgtggtggagaagctgagcgtgctgaagagaaaggacctggtgaacatcgagatgttcctgaccgccaaggaggtggaggagagcctggagagaagagagaccgccacctgcctggcctggtgccacgacaacaagagcagactgagaaagatgaagagctgcctggagttcagcctgagaatccaggagttcatcgagctgatcagacagaacaagagactggacgccgtgagacacgccagaaagcacttcagccaggccgagggcagccagctggacgaggtgagacaggccatgggcatgctggccttcccccccgacacccacatcagcccctacaaggacctgctggaccccgccagatggagaatgctgatccagcagttcagatacgacaactacagactgcaccagctgggcaacaacagcgtgttcaccctgaccctgcaggccggcctgagcgccatcaagaccccccagtgctacaaggaggacggcagcagcaagagccccgactgccccgtgtgcagcagaagcctgaacaagctggcccagcccctgcccatggcccactgcgccaacagcagactggtgtgcaagatcagcggcgacgtgatgaacgagaacaacccccccatgatgctgcccaacggctacgtgtacggctacaacagcctgctgagcatcagacaggacgacaaggtggtgtgccccagaaccaaggaggtgttccacttcagccaggccgagaaggtgtacatcatgtag

SEQ ID NO: 87593 - DNA, 1305 bp, synthetic construct
  misc_feature 1..1305: note = Description of Artificial Sequence: Synthetic coding sequence
  source 1..1305: mol_type = other DNA
atggccgtgcaggagagcgccgcccagctgagcatgaccctgaaggtgcaggagtaccccaccctgaaggtgccctacgagaccctgaacaagagattcagagccgcccagaagaacatcgacagagagaccagccacgtgaccatggtggtggccgagctggagaagaccctgagcggctgccccgccgtggacagcgtggtgagcctgctggacggcgtggtggagaagctgagcgtgctgaagagaaaggccgtggagagcatccaggccgaggacgagagcgccaagctgtgcaagagaagaatcgagcacctgaaggagcacagcagcgaccagcccgccgccgccagcgtgtggaagagaaagagaatggacagaatgatggtggagcacctgctgagatgcggctactacaacaccgccgtgaagctggccagacagagcggcatcgaggacctggtgaacatcgagatgttcctgaccgccaaggaggtggaggagagcctggagagaagagagaccgccacctgcctggcctggtgccacgacaacaagagcagactgagaaagatgaagggcagacagaacaagcacgaggccaagaccggcagaaagagcagagccgccagcagcagccccaaggagagcctggacctgggcatggagaccctgaagggcaagcccgagctgagctgcctggagttcagcctgagaatccaggagttcatcgagctgatcagacagaacaagagactggacgccgtgagacacgccagaaagcacttcagccaggccgagggcagccagctggacgaggtgagacaggccatgggcatgctggccttcccccccgacacccacatcagcccctacaaggacctgctggaccccgccagatggagaatgctgatccagcagttcagatacgacaactacagactgcaccagctgggcaacaacagcgtgttcaccctgaccctgcaggccggcctgagcgccatcaagaccccccagtgctacaaggaggacggcagcagcaagagccccgactgccccgtgtgcagcagaagcctgaacaagctggcccagcccctgcccatggcccactgcgccaacagcagactggtgtgcaagatcagcggcgacgtgatgaacgagaacaacccccccatgatgctgcccaacggctacgtgtacggctacaacagcctgctgagcatcagacaggacgacaaggtggtgtgccccagaaccaaggaggtgttccacttcagccaggccgagaaggtgtacatcatgtag

SEQ ID NO: 87594 - DNA, 1047 bp, synthetic construct
  misc_feature 1..1047: note = Description of Artificial Sequence: Synthetic coding sequence
  source 1..1047: mol_type = other DNA
atggtggtggccgagctggagaagaccctgagcggctgccccgccgtggacagcgtggtgagcctgctggacggcgtggtggagaagctgagcgtgctgaagagaaaggccgtggagagcatccaggccgaggacgagagcgccaagctgtgcaagagaagaatcgagcacctgaaggagcacagcagcgaccagcccgccgccgccagcgtgtggaagagaaagagaatggacagaatgatggtggagcacctgctgagatgcggctactacaacaccgccgtgaagctggccagacagagcggcatcgaggacctggtgaacatcgagatgttcctgaccgccaaggaggtggaggagagcctggagagaagagagaccgccacctgcctggcctggtgccacgacaacaagagcagactgagaaagatgaagagctgcctggagttcagcctgagaatccaggagttcatcgagctgatcagacagaacaagagactggacgccgtgagacacgccagaaagcacttcagccaggccgagggcagccagctggacgaggtgagacaggccatgggcatgctggccttcccccccgacacccacatcagcccctacaaggacctgctggaccccgccagatggagaatgctgatccagcagttcagatacgacaactacagactgcaccagctgggcaacaacagcgtgttcaccctgaccctgcaggccggcctgagcgccatcaagaccccccagtgctacaaggaggacggcagcagcaagagccccgactgccccgtgtgcagcagaagcctgaacaagctggcccagcccctgcccatggcccactgcgccaacagcagactggtgtgcaagatcagcggcgacgtgatgaacgagaacaacccccccatgatgctgcccaacggctacgtgtacggctacaacagcctgctgagcatcagacaggacgacaaggtggtgtgccccagaaccaaggaggtgttccacttcagccaggccgagaaggtgtacatcatgtag

SEQ ID NO: 87595 - DNA, 1188 bp, synthetic construct
  misc_feature 1..1188: note = Description of Artificial Sequence: Synthetic coding sequence
  source 1..1188: mol_type = other DNA
atgtggaccctgagagccaccggcagagaggtgggcagcagcagctgcgaggacaccgtggcccccgtgccctacgagaccctgaacaagagattcagagccgcccagaagaacatcgacagagagaccagccacgtgaccatggtggtggccgagctggagaagaccctgagcggctgccccgccgtggacagcgtggtgagcctgctggacggcgtggtggagaagctgagcgtgctgaagagaaaggccgtggagagcatccaggccgaggacgagagcgccaagctgtgcaagagaagaatcgagcacctgaaggagcacagcagcgaccagcccgccgccgccagcgtgtggaagagaaagagaatggacagaatgatggtggagcacctgctgagatgcggctactacaacaccgccgtgaagctggccagacagagcggcatcgaggacctggtgaacatcgagatgttcctgaccgccaaggaggtggaggagagcctggagagaagagagaccgccacctgcctggcctggtgccacgacaacaagagcagactgagaaagatgaagagctgcctggagttcagcctgagaatccaggagttcatcgagctgatcagacagaacaagagactggacgccgtgagacacgccagaaagcacttcagccaggccgagggcagccagctggacgaggtgagacaggccatgggcatgctggccttcccccccgacacccacatcagcccctacaaggacctgctggaccccgccagatggagaatgctgatccagcagttcagatacgacaactacagactgcaccagctgggcaacaacagcgtgttcaccctgaccctgcaggccggcctgagcgccatcaagaccccccagtgctacaaggaggacggcagcagcaagagccccgactgccccgtgtgcagcagaagcctgaacaagctggcccagcccctgcccatggcccactgcgccaacagcagactggtgtgcaagatcagcggcgacgtgatgaacgagaacaacccccccatgatgctgcccaacggctacgtgtacggctacaacagcctgctgagcatcagacaggacgacaaggtggtgtgccccagaaccaaggaggtgttccacttcagccaggccgagaaggtgtacatcatgtag
